United States Patent Application Publication US 2014/0057251 A1 - sequence listing, part 102

SEQ ID NO: 187308 - DNA, 9366 bp, Cannabis indica
atgctacatgttccatcaaattacaagaattcaatttagtgtttcaaaaactaccaatgataataatgtgtctattgtaatctttccaattttttgttgtgtgaaggagctaacacaggaaggaggtgttgcaaggaacacttaaagatggtctctacagattaggcccaattccagcttgtttttccactactgtctcaagtttaaaccagtctagtgtgtcttctttcaattccctaaaggatatatggcataggcgtcttggccattcatccatttctgttttaaatcaagtgttaaggctgtccaatgtaaaaattaacagtagtgaaacacatagtttttgtgatgcatgtcagttcggaaaatcctactctttgccatttaaaaattctgatgctcatgctactcatgtccttgatttaatacataccgatttatggggacctgccccaattgcatctcacactaattatcgatattacattcatttcttggatgattttagtcgttttacatggatgtatcctttaaaacagaaatctgatgcattacaagccttcactcatttcaaaagtcttgttgaaaaccaacttgaaaggaaaattaaatagcttagaaccgattgcgggggcaaatttcaagcattttctcaacttgttaatgacagtggcattcattttcatcattcatgtcctcacacatctgaacaaaatagtcgtgtcgagcataagcatcgacacgttgaaactggtctaaccttgcttgctcaagctcgtatgccccttaagtattggtctgatgctttccaaactgtagtatatttaattaatcgtatccctacatcagttcttaaaggaaagtcaccctttgagcagttgtacaattgggttcctgactatacctttttgaaagtatttggtgtgtcctgtttcccatgcatccgaccatatcaaagccataaatttcagtttcacactgtcaaatgtttaaaccttggatatagtgatgtccacaaaggttacaagtgtttgagtcctcatggtcgaatttatatatcccggagtgtggtctttaatgaatctgactttccttgctataccggtttctttaacactcaaaaacctgaacaatttgtcacaatgcagactccccattcctggtttgtcttgcctccagtctctccagttgtgcagccaattgtctcaacctcaagtattcctgtatcaccttcaactcctgcatctcctcacactgtaagtgattcccattcttcctctggttcacctatacatttgcctcatgatgattttcttgctgatatagacacagtagctccacctgtttctgttactcccattgaaccaacttcacccgataatatatctcctaccagacctgttgctccagcttccccaccagctcatattgcaccagttcatcccatgattactcggggtaaagctagtatttttaagcctctcactttccttggtcaagctacttttactcccctagttttgaacctacttcagtggctgctgcccttcaacatgaggggtggaatttggctatgtcagaagaggttgttgccatcaaacgcaataaatcatggatcctggtacctcccttgaagttctataatgttgttggttgtaaatgggtgtacaaagagaagtacaatgctgatgtaagtcttcaaagacttaaagcgcgacttgtggccaaaggttttcatccacatcctggtttggattttggtgagacattcagtcccgttgtgaaagcagctactgttcgtgttgtacttactcttgctgctgcatatgattgggaagtgagacaagtggatatcaataatgcttttctcaatggtgtgttagatgaggatgtgtacatgatgcagctatcgggttttgaagatgcaaaacaccctgagtatgtctgcaagcttaacaaatcgagttacggtctgaaacaggcactgagggcctggtatgattaacttcgttccacactcacactctggcagtttaaaactccaaagacgactcatccttttttatttacaaacatgttaactatgtcatcatggttcttgtttatgtagatgatataattgttacaggaatcaagtctcaagagctcaacaccttcattgataggttgaacagaaccttttctctaaaagatcttggaccacttcattacttcctagggattaagtgttccgtgataatatagggttctatttgacacaaagaaaatacatcagtgaactgttagaaagagtcaaaatgcaaaatactaaaccaagtgttactcctattacagcaggcagacccttgtccatcaatgatggagaacctatgaagcatccaacactatacagaagtgtaataagagccttgcaatatttgagtcatacaagacctgatatctctttctgtcaataaactcagtcaattcctcaaacaaccaacagatattcactggggaacagccaaaagaatactcagatatctcaagggtactatgaaccatggtcttcatatagcacccagtgaaaacctgtctatgataggtttttcggatgctgattgggcttgctgtcctgacgatcgaaagtcagtagctggttattgtgtcttcattggagactccttaatatcctggtcttcaaagaagcaaacggttgttgctcgctcgagtacggagtccgaatatcgtgccttggctcaacttgctgctgaaatctcttggctgtaaagtctgctgggagaaatgaagtttaaactaccaggtgcaccaattatttggtgtgataatttaagtgcaagtgcccttgcagccaatcttgtgtgtcatgctcgaacaaaacacatagagcttgatgttcactttattaggaacaaagtactagaaaagaaattggagataagatatgtgatcaagtggttgattgcttgacaaaaggcctgattccaacacggttcaagttcttaattgacaaacttcatgtgactcagtcaccatctcgtttgaggggtggtgttaaagaatttgatgatgcagcttatgaatcaacaaaggagtagcagatgagaagtgggaccgagtgaatgagggaatcccaaggtttattctgtaatccttttctgtaacaactttctgttaggcattgtattctgtgccgctttattcaccacgtggtgtatctttattggcttgtaatatttccctgtattcaccaattgcctatataatgaaacttgctacactcactcatattgagttgagttttccaatttcttttctctccaaatttaactcatgtgtcttgcttagttcaaaaatagttaatattaatttggttgttaggtttaccttgaagaagcttgacacaatctatggttttttttataacttttcaagaagaatacaagacaagttctgcttgactgtaatgtgctttgacttagtcaaagcatcggttcacaggggcggaggtacattgcaaccaagggtggccttggcccccccaccccaagtagtatatatgcattatttttctaatctttattatatataatttaattttaagagtttgttactaagtggtctcccttgatcaaagtaaaatattctaaagaatttgtcaaataatattaaaacaaactctacttgtagagtaaatgttcaaaaacatattagttttcttttttttttattttgtaagtcattgattattttttattatttattagtaaatttaataattaataatataaataattagcaaaattactgtccaatttttttttttaagaatatcaaaacacttacaataatcaagtatcatcttaacttttttttctattttatttcaaagcaagtcacacgagtcaccattttgtaaataaagtgatcatatatcattgagttttattttgatcctatatttataaatatgcttttattattaagttaaaaaataacatatatataattaattggtagtagtgagtttggcccccctcacttttaaacctggctctgcccctgccggttcatttgtatttttaaaacacaagtggttatttatatttctcgcttgtgtataaatgtgtaaaatatggggaaacccacttggtataactttccattagataagattgaataactactatcctatttttataaattgcagtgaaaataatgagaaagggaaaaaaaaaattgtatgtcgaatccctacaaaaatttgtatacaaaccctcagagaaataatattgacttgtgtactacatagattttaactattaaactacgtaaaaaatccttacttttatttaatttagtcattcttatcacgtaaatatttttggtgtattaattatcaagtctcatttatatcaacgaaattttgagttaacaaacatgaatagttgtagctaaggaatattgtttgaggtaaattagctaagcatataatgttggagttttatgccctaaataaaactcaatttcaatgtaatattatttactatcaataaagatcaaaatcatatattgacctaatcattatctttgttcacatgtctatttcatgattttatatttgatatataagttctattaaatcttaaacatgtagttcttcacaattatagtgatgtcatcacaatagaggataattgtgattatatgcttcaaactatttagtcccgagatttatcagtgcagtaaacttacactgacatgataatcaacgatgtggtttacatatacttggataggtgaaatttcttttttagggcattagcaaagtaagcttgtatcagatgtattggctatacattagactagaccgatattgacagtaaaaaagatatcataaacttaccgttatatctttttaagtcaatatcacttagttgatcatagatcaattcatctcaatcttgagattaagctttaacctaattatattgcttaagttctttgacttgttcgttatcagcttacctacaacgccctaacttttaggagcgtcacatgtgtgcttttataaataatcttataataataagctcaactttagactctaaaaatacgtttaattaaaaataaaacaattaatacaaataaattacacctttatatatactttaaattgcagactttctttaccggaaatccccattcaaaactaaacacttttatttatataaaaaatatttaaatgaatggttaaataaaatacgacagagccttaacatctgttgctaataattaactcaaccccataggttgagtagactagaacttgtacattagttgcctcgctctccaactcatggcagcactaagttatcttacatttatctacaccataaagcatctgtgagtcataaagactaacaaaaaaggcattaaatcatatttaattatttaaataaatttcaataattgaattcgttactgatattttagatgacggaacatctcaaccaatctgaaatatctttaaccactttttaaatgaaaatatttagctaattgacttacttaaatatgtaattaacccaaaaagacaaaaccaatagggacacccaaatatagggtaggtgcctaccttgtctgaattaagagaaggatgttgtcttttgtcctaaaaaattttgtctcaacaaatattgtcttaacaacttttatcttttctctatttaattaatttaaaaaattatttatttgttacaaaaataaataattactattttactaattcaaaatagatttttccgaacaacattatacaacttttttttccctacccttgattgtatttcaaggtggcaattcgggaaccatggacctataaatttaagctccaataaactagattatttgttgagtttcatcaaccaaataatctttgtttattaattccatgattactccactataaatatgaaatcgaactcttagtaattatagaattatatttactgagttttactacattatccattgatataatcaattccagtgattagtcctccttgcattacttcgtaattagttttggtcaaactaccgttttacccttctaattacttttttattcttcagtaccattaactcactagtggaagtataattcaaatcccatctgaatttgtacacaacttttcagtactaaaatttacacataaagggaaccaaaattcgatccgttaaaaaagtcaggattccattattgtagatcatgttcccagtcatctacaatattagattcccaaaacagaagttgtaagaatcatcttctctgagaaactttaacgagtgaatcaaagaaactaataacatgaacaggatttcatgattactcaaaatttaggtcgatctactattgatcatcgttttgatatgaattaggtctttatagaaaacagtaagtttgataaagacaaatttatttatattgatccttttcatatataatctctattatatacaacacattcacttaaatgccatcctacatcagtaatcggaactgagattacttgcaccaaacaacgagcattagtgaaccgtactagcaaccattaattaaaaattccataactttaatatgttgttgactatattattcatagctaagtgatcttagttatctgtacaactacaagtcacagtcgtctcatatatgaaataaataaagaattttttgatatttatataaataatctaataataaatattaataatttaacattcatgcatataccaaaatattcaagtctttattaataattagaaatgtctttatagacatctcagggcataaactctaaaaatctcccacttaccctaaaagcaaaccgggcatctcccttagtctcatattaattatatgacccataaaagatttcgctggtagcgtctttgtgaatggatcttccaggttatattttgacacaatctttaagtccattatatcacctttctctactatattttttagtagatggtacttcctctcaatgtgcttgcctctcttgtggctccttagttccttagagttggccaccgctccactgctgtcatagtagagcacaagtggtttttctacttctagaattacttctaaatcagtgtaaaattttcttcaaccaaattgcttctttagctgctttgtaagctgctacatattctacttcaatggttgaatctgcaatacttgtttgcttaatgcttctcctcactacaactcctccaccaagagttaatactgatctagatgtaaacttttgactatctttgtttgattgaaaatcaaaatcagtatatctagtaggattcaactctccaccagaatatacaagcatgcgatctcttattctctgaagatacttaagaatgtgctttacagctatccagtgttccaaacttggattagattggtaacgactaacaatccatacatcgtagcatatgtcaggcctgcatacatcaagctcccaattgctaatgcataagggtactttctcatgtcctcttcctcttgaggattctttggacattgatacttacatagagtaattctatgtttggacggtaactatcctttattggcattctccattgagaatcttttaagcaccttattgatataatttgcttaagaaattgctaatgttctctgctttctatctctatagattttgatcttgaaaacatagcttacttctcccatatcattcatttggaatttatcggctaaccaattctttacttctgacaacatttctatattgtttccaataagtagaatttcatcaacataaaaaattaggaataccactacattacctttaatgtatttgtatacacagacttcatgttcgttttgtttgaagccatactctttaatagtcgtattaaaggtgatattccaagatctataggcttgctttaattcataaatggatctaagcaattttcacatttttcaatcttcctatggtaacacatacccttctagttgttccatataaatgaattcattaagatcgccatttaaaaaagcggtcttgacgtccatttgccatatctcacaatcataagtgacaaatatggaaagaagaatgggaatggatttaagcattgccacaggagagaaggttttgttataatcagtgccttctcactaggtgtagcctttggctacaagcctagctttaaaggtctctaccttccattcaatatttctattcttcttgaaaatccacttacaccatatggttgtaatgtcctcaagtggagtttcatattcccaaactttattggtgcgcatggaatccatttcttgatcatggcattgttccacttgtctaagtcagggtcttccattgcttctctataagtcaacaaatcttccttgtctatgtcagaggtaagaacatgtgcttcgtgttcatagcagacaggttgtctcacaatcctcccactacgataatctactagggtttccttattaggaattgtggtaaccgttgtcggtcgttcaactaatggtgatgaaattaatgttttaaaaatcttctaatttcttatttcctcgataaccacttatggtttgtgacttttcatatagtcatgttcaagaaaagtagcatttctctatgcaaatactttgttgccttgatgactatagaaataggcacctcgcgtttcctctaaatatcccacaaacatacacactttagttctcgaagaaagtttcccagtcttcagtttaagaacatgagcaagacaatcctaaatataaaaaaatgtttcaaattgggttttgttctatttcataattccattggagtattgcttatgctctttgaggatactacattcaaaatgtaggtagccgctagaagtgtgtatccccagaagtttagtggcagtaatgagtaacacatcattgatctaaccatttctatcaaggtttggtttcttctctctgcaacaccattttgctgaggtgttccatgtgttgtaagttggaacaagatcccttcttccatcatgtagtctttgaattcagaatctaaatactcgccaccacgatctgatcataatgtcttcaatgatttacctaattgctttttcagccatggctttgaagtctttgaactttccaaaagtttgatataatttgctctactttgtttattgtgatgagtttccctttaaagtttgatatcttattcattgtattttaattatttgttgatcttgattttttttttcttaattaacctatttttggaaagaatattagtttattcttgtttccttttt

SEQ ID NO: 187309 - DNA, 6811 bp, Cannabis indica
acttgtaacccctgtgtgccttggaaaaggagaatgtggtattagtcatattgtggatcatgttacttatagtgaaatacttaatagtccacaattttcaaaatggataaaatctatggatgatgagattgactccatgaagaaaatgatatatgggagttagttttattatctgatgattttaaaccaataggttgtaagtgtatttaaaaaactaaaaacgataataaaggacaaattgaaaggattatgtagacctctaataacatgtcatgtgtacaactgtatacacatcagcagtttgagctggcatttaacattaaaatttggacagaatagtgagtaccaaattaatatgtgagtttggagggttttaccaccagaaaatcagtttgtggggttaagggtcacaagcagtatagttcaagtagtattgccgccaatatgcctattttcttataaattagttgtagatacattgaaacaagatgagaaatttgtttggatgttttttctccatcataattgtatactcattttgtttagagatgttttatttgcacccaaattttttagagataattacattaaatacaaatttaacgatattctataaaaatacaagaaaataataaaaaaccacatgaaagtaacaagaaaataacatcaaagcaacgtcaaaaataataaaaataaaaaaaaaacaacaaaataacaaaaaaaaacataaaaataacaaaaaatcaacaacaaaataacaagagtaaaacataaaaaatacataataagatcgtattttatgtaaataaaatttaaaaattgtaaaaatattaaaaatttcatacagattgtatttttataatttttttttatggtttttatatattttttttaaaattaaatgcaccaaattttgttacttttattttatattaagtatataattttaatttatagtaatttttttagaaaaagaaataaatatttcttccttctcacattctttaaaaacatatatgtaaaataaaagtaaaatatattttaaatatatagataaaaaaagttatatgaaatttttttttttttttagagaaaatgctattatattaaaataagaagtcataatacaataggcataaggggtggaggtatttcctctatccatgaacatttagcatccactgaaagagcgaacctagctaacaaatgagcgattttattagtagatctaaacacgtgagacatctgaacttcataaatattggacactaaaaaaaaatattatttaacaaataatgaaaatcataaactaactcttgtgaagaatgtactcatttaactactaagagggaatcaatctcgataaagtgaacaggttgttgaaggtctttaagccattgcaaactatgcataagagccatagctttcataacttcttgtttgaaacatccacgaaatagagcagacatggcagcaacaatctctcccatactatttcgtaagatagcactgaatctagaagtttgattcattgtgtcgacaacaacgtcagtgttaaatttcaggcgacccgaagagggattcaaccaaggagcatccagtgaaatagctaacgtggaatctgaagcattagttgaggctacaataggcatgacttgtcgaacaaccctaaattcatctaggtaggagtgtgcaaaataaagaattacatcaagtggctttggcttagtaccatgtctctccgtgtttctttcggtccaaatgctccaaaaaattatagcaaactgctcaagctgtaaagacgaccatattgtggagacatgtagcagaaattccttcaaattcatatgatttgaaaataactcattaatcgaaaaagaagagtaccaccacactcgtctaggacgcttacagtaaaaaaaaaaggcatgagaaattatctccttttttctattacacaaagaacagcgagcagagtcactaatgtgacatgtatggagaatatcagggacaggaagacaattatgaatagcacgccacaagaaaatataaatcttcgaagagaatgacaatgcccgtaattttttccaccattagagagattgaaggcagcttgctgaaggttgttgctcttcaagttttgttgccagagagtaactcgatttaacagtataaataccgtttgattcatgatgccacattagttgctcttgttgatcaaagagtgttagaggaatactttgtattttgtaaaacccaattccaaaaacaaagttgttaacattatttaaaaaatatgaaaataagataaaattaatacaaaaaattgtgatttcttttcaaaaactaaaaagtaaaggttcaaaataaaattttcttgtttcaaaaaaaaaaaaaaataaatttatcctaatagaacatctaaattcgaatctcccttcctaatgtaaaaaaaaaaaaaaaaaaaaaaaaaaaaaaattaagtgtctcttctaaaaaaattaatttaagtttaacgttgtagtaaaatgcatttattattttttgagttcaaataaaactccattactttattttaatgataatttgttgaaaaaagaacattactatagcgattcttttgtcaataataatattaaaaaaaaagatattgtaccgtaacgatccgcgccaccattcagctgttgcatttcatccttaaatgaaatactatcgacggtcaagaaaacgtttcactcttcacacggatcactcttctcaaccgtcgatgaaaagtatcatcctacggctgaaaatggatcataaaaaagcttggcttcgaattctctcccttatatatacgccccaaaacccaatcccgtttcatctcgtctttaactattataatcattgtttggttgtcgagaaaatctttgagaaaatgtcaggaagaggcaagggaggtaaaggcttgggaaagggaggagctaagaggcacaggaaggttcttagggacaatatccagggaatcactaaacctgccattcgaagactcgctcgtaggggaggtgtgaagcgtatcagtggccttatctatgaggaaaccagaggagtcctcaagatcttcttggaaaatgttattcgtgacgctgttacttacacagagcacgctcggaggaagacggtcactgccatggatgtagtttatgctttgaagagacaaggtcgcaccctatacggttttggtggttaattcccaaaacgatttctgtacaatcaatcggttcctgtcttttagggtttttaggttcttttcttttctgggtctttggacatagatttgttatctcttagtatctgatgtcaatgtagtcggaatttgaggaaatgaatcaaaattatcttagattggcttcaaattttgtctttgatctggaacaatggaattgcaatgaatggaaaatgtttaaattaattctcggtcgtaattagagagacttatattcatataatacccacgaacttaaaatatctaaaatttagattgaaactgccataggtggtggactggactcgtacactaaaagtctacagaagattatgtcgaatgcgtctgctcctttgggtggagtagaaatgagagttgaacctctggtgttgagttttgatacgacaacgaaaatggtgtcgtttgtggtgaatttctcgtcggggcaatgggtgcgtggtgattataaggatctggtgaggggctcagtggccgtgcgtgtcctcatatttgattcctatgcagatgaatgataaatcaaactcaaagatagatactctaatttattgtgtaatcatattctccaaattattgcaatttaataattaatatccattttatgttattgctattcagtcatcaaataatatcaattttcatttgagaagttgctcatcctatttcttttattttcaattattgtagtacgtgataatacaggtattatgtgacttgagtccattattaattcgctagtttaaaggttatgttactaatagtagtatttttacaaatagctacaactctgacacatgtcgaacacattatattagtgtctggggcaaattgtaagaaaaaataatttgaggagacaaattataaataaatagatataatttctttctacttatgtaatataggattattatagagttcctcacttggtaatacctcacataagacaatatacttttttttgtgcagtagctttaggttgtttttaactttacaacttttaacaatcagttttgtaacttgttgttacagttatttttaaaatagttattttttatttcctttttcttttataatttgtaattttaaaaaataaaaatgtaactttgactttcttttgttttttcataattgtatcaacattgaagagtattgtatttgtatcaacaatgaagagtttatgctctttttcagtttttttagcataaataattattgtaagatattgtcctacattgaataaatggtagagaattgagttatatttaaaaacatgtactactctattcattgctaattagttttgagatgaaaccccatgattcacaatatttattaatgtatttgtttttgttcaatttagatttttttaaatgaatagttgtattatttttttttgttcaataagtgaggatggagacgggtcagcatttcttgttagtttttctccccgtatgtatccataccaacagtaataggactccccttgatttcctcttctttaacgattttagatttcttcttagtaggagcctttctttgtttgagtatgcactcaacaaaatcatcatcttacttttttttcccttttctatttttttggagacagattttaaccctatttctaaagctttaactcgtataattagaacttttttcacagagagagaagcagaagagcgagttatagctatttatatagaacattagtaaaaaaaaaaatgtgggttgattctttaaatcatgtagggaagttttcaatatataactaaaaataagaaaaaaaaaaatttaaatcatatacagaaactatagataagatagataagggaaatttgttgagtgtgatagaagagcaatgaccatcaatactaagagaattatatgggtggaaaagtgtgttttaaattttaacataattttttgtaataaaaatctaattaacattattataggtttcagcagaaaaaaagacacaaaaatacattaccatgacatgcttttgtaaaaaaggaaataaaatacattattttaacgatccgcgcgacgattcatctgttatgtttcatccgtagatgaaattatattaacggccaagataacatcttactcatcacgcggatcactagtctcagccgtcgatgaaaactatcatcctacggctaaaattggatcgcgaaaagcttggctccaattctcgcctcaatatataatgccccaaaacacaattccacttcatccatcttaaacttttaaacgtcctgtttggcagtcaagaaaatcttgagaaaatgtcaggaagaggcaagggaggtaaaggcttgggaaagggaggagctaagaggcacaggaaggttctgagggataacatccagggaatcactaagcctgccattcgaagactcgctcgtaggggaggtgtgaagcgtatcagtggccttatctatgaggaaaccagaggagtcctcaagatcttcttggaaaatgttattcgtgacgctgttacttacacagagcacgctcggaggaagacggtcaccgccatggacgtagtttatgctttgaagaggcaaggtcgcaccctttacggtttcggtggttaattaattcccagaaagatacatacaatcaatcggtttttatcaattaaggatttttaggttttcgttttctttgtttctttattaggttttggacatagatttgttacctcgtacgatctgatatcaatgtaatctgaatttgaggaaatgaatcaaaagtatcttggattatcttcaaattttgtcttttatctgaaaagcaatacaatgaaagttgcaatgaatggaaagttttgaggtttattctttgacggaattagtgacaaaatggtcaagatgtttaattagtcgaagtagctaattataattgtcaaatttactgtgcgtttttgtattgttgagggaggaaatggaattctgagcgattcaaagttataattttcttgttaatgtgatgagcattcatgtgcaaattaatgtggcatttttgagaaatagtaataagctgagattttgtaactcagtgtacctaggctgcgagacctccattgtgtgaggccatgccttgagcttagaacttggcttggctgagacaaaacaccttagctcgaacctaaggtttcggcactccatataaatcttatttgttttgtcccattaaattctatttacactcaatttattatgagaaaattataccaaaaaccgaaatattaaaatagtattacatgaatgtggttagattattaaagagcattgttattgtacactagtggtgcatagtacttctaaatatgtcagccttatctattttagtttttttttttttttgttttttttgtttgggtaaccggtataaagttaagataacaaccggtaacaagagttacacaggtaaggaggggggtttcgttccatccaagaaagttcattgtctatcctaagggcgatgcttagtccaatctatgagcctcaacattaaagttgcggctaacatgagaagaag

SEQ ID NO: 187310 - DNA, 1876 bp, Cannabis indica
agggaaacttttttctttcttctttaattaatgctcgaattaaatttactcaaaaaataaaaattaccaagtaagagagctcatcatcaagccatttgacaaaaggtacaacatcttcaatgtctgtaaacgcagcattctcaacttctttaattaaaaacctaatgaaatcgccctgtgtttcaacgtctgtttttatctgcaaaattaaaatacgacaacgaccaaaggaagtctcattaaacagattttaaaaattacaaaagatggccacaattttgataactgctttaatttgaaaagagaaaaaaattaaatagaaagtgaaaaagagaatatcaagtcgaatcctagcactgtcttatctaggaagcaaacgaaataaaatccaaacgaaaaagtagtagaagccaccaataataaagacacttacgacccatcactgttctctctctcactgacataatgaaacaaaaagctagtggcaatacctgtaaatattttcaaaattcaaaaagtaaaagaacgaaaaaaacacagttaaccggtgacctagacttacagcgagcaagtaggcggaccggttctcaatctcgccgatcatgtcacgggcattggcggctgctggagcatctgtaacgttggattctttccgggagtccctcctcataagggagtggtaaaattcgaccacctctggtacttttctaacttttgccgtcattggcttcaaaccctttgaaggcggaggcggaggcggaggagctaccgttttgtttgatggtggcggaggtggtggtggagccgtgactgacttcgccggtggtggtggtggtggaggtggtggcggaaggacttgttccgtttgggctctgttttctaaagttgggatagtagcacatgctgctccggttggtgaaatcgccggcgatgatgacgatgacgatggcaatgacaatgttggtcttggaggtggttttggaactctgggtacccgagatctgacgttggagataactgcgtaggatgactctgctagttcctccgagttacacctcgagtgccttggcctctcactttcaacagcttctacttctctttttgagcccgcagcttcgattttttgttggctctcttggttaataatgttaacgtctaaagattttactccctttttcaagctcttgattagatttgacttaactgacacctccattaatccctgaaacctctgtgaagacgaaagctcatcactttcaacaaaaaactcatgagtgcctctgctacgatccaacggtcctgatgatttgttcaactctgcaacttcagcttccatcttcttaaccttactctcgtactcgcttctctcttcctcaagcttcattttcatttcctctgcctcttttctcaacttgtcattctctgcctccaaaccctcgattcttttcaaagctttttcgagctctgcttctctgtttgagatctcagtttcgagtatgggaacgatagccactgtctctttcaatagtttttgctcaagaagctcggtcttcaaccgagattctcgctcccggagctcttcgacgaggcggataagctcggtgacgtccggaggctttggctgaacctgtgcagacgatcttgggaagtaaacgccgaaggatcgtgagaaaactgttttctgagtaaccttagctccggagctcggtgaaggagagggtggttttgatggtgggggtgggggtggcgtttcagccggcttttttggatgagctggtgattttgttaggcccattgctactctcattttgccagccaccattgatgagaatgataaagcttcctcctttcttttctagtactctctctctctctc

SEQ ID NO: 187311 - DNA, 5674 bp, Cannabis indica
atcaaaaacagttaaaaaattgaattgttttaagaaaaacttgcaaaacaataaaaatttctaaaaaggatatttttcccattttttctatttttgataatttttttagatttcaatatttacagagatgtggtattttagtatttgtgcaaataattttattaaaagtatttctataaataaattaattttatatataatattagaaaaaattctaaaattaaaagagtagtattgccataaaaaaaattgaagagattaaaatataaaggaatatgacagtaaattactcttaaaaaaagtttttatcacttaataatttgctacttcgcttaaggttgtttaagtaataaacgtaataagtgataatagggggttgttttttttttgagaataataatcggggtggttgaaaataacaaaattatttatttatttattacttgaaattagagaaagcaaaatgaaatccccaatgaataataattgaaaaacccgtaaatatacgtcttgtcatgctcaacttttacagaaggaaaaaaaaaggaaaaaaagtgatataattgtgaaatgcgatagcttctcgttccacatttcttgctaaaaccattacgagagctaaggtaatttcaacgattctctctcaggttccatgccttgctttctttctttccctcattttctcttttctttgctattgtgatcataaattaatcattatttttttttcatatcttcacacctttcacgttcttagatcttagagaagctctttatcaattgtaatttcttctttttttttgggctccatcggttttctcgcagacccttttgcctattctttaatcccatcttctcttttttagctaattatttttgtctcgtgaagatttgtgagtgtagagttgaggcatggggagattgtttgtggtgagtctagaagggaaggtctacagctgcaagcactgccgtacccatctcgctctttgtgaagacgttgtttcaaaggttgttttgatcacttccgagctttgattagtcatatcatgtaatgttttcatctgggtgttgttaattttcgttgattttgcttattctttgcttcttaccaagttataaatatattggttgtcacacatttgtttaataatgcgtttatattcttgtcgttgtgatctaggagtttcgtttttttggattataaatgaaacaaaatttgcggtggtactgattgagaattatgatcatgactttacattcaattttggctgtagcttttagccaagttttagctttgagccagttgatccatttctttccctgctcaaaaactgaaaacttgattttccatccgatccttttcggttggatgatttcaatgtacttggcttcaggtggtaaacatgtaatcttgtgggagaatgattgaatttttttatgctagttaagcttcgtttggctacctaataaagtatcagaaatgtacttgtctcacaacgtcagagtatgagattacttataacattgatctgcaaggacatataaggtttgttctgtgtgaggtgagggacgttatatgatggttttaaaattctttaaggaagtgctaaactgttggaaggttttcttggtttatgggttgaatgaaatggatatttagtttctaatttgaattagttttgatgtatacatttcaaagtaaagtatttcaacttattgtttgagaaagagtatctttcatagatgtcaaaatgacctgtttgatcgtatggtatcttcatatgccagatgcatatatggtatcttcaaggatgctgcttaaatacacaaccatatatgcatctgtcatatatgcatttatggtatcttcatttactaaatatcaagtaatatggagagcattctcttggtgttgtgcttagtttcagatttttattagttttgctgagttataataaataatgacttaaatttgtaaaaatggatttttgtaatatcttgattcttgatgataattatttgatttttgttgtctcaagtggtctacaaatgtgaatagtgagatcagcaagaaccgaataatctaactacatgctttgccttgttgcttctacagtcatttcatagcaggcatggaaaagcttatctcttcagtaaggtgtaagttttcttttttctcccccttgaaaaaatatcaaatgttctaaacataatcttataacatttttaaaactttagaaaaaacaaatttcaacccctcaaaaataaataaattcaagtgtacatatgtaagatcgtactattaagtgttagcacttcttaacataaccttcaactcttgaatcccttgaatacttgtggatgcaatgtggaagttatggactctctggtattatgtggaacctaaatctgatgctgcactgatgaaagttttattgtgctcttacaagtattgagatgtggcttagcatttcattgttcagtgtgatattgtgtgctcagtgatgaaataagtttgaaaggcttagaatcttggtccgttgtgtttttgtcaatagtatgtgcatgtgaactataaggaaaggcaaataaatgatgggaaagtttggactaatttctttaagagctgaatttgacattgggctaataaaggatgatttcttgtctctgaggaagtcatggaacattacattcttgaagtccttactagatgtaattctcatatccaattacttaacagatctaatatctctcttggagagaaagaagatagactgatgatgactggattgcacactgtcgccgatatcttctgcgttggctgtggatcgattgttgggtggaaatatgtaagaattagagacattaatgatatgtactcaacagtttttctaaatcctttgccccttgagttattttgatggttgatttcaggagactgctcatgagaagaaccaaaagtacaaagaaggaaagtctgtactcgaacggtcagtaagctatatagagagaacattctaataccaatatcaagtgaatttttcaagtaaatgttgtggattcaatgttgaacagggtcaagattgcaggtcctgatgggaacaattattggattaatcatgagtcacaggttggtggaagtgatgcagatgatgcttaaatctccattcataatcatatcccaattgtacattcttaaaccctcccaattattgctgtttttgttcaaatcatgtgtatctttaaactgtgactcctaattcggggcaccttgcctgcttgttcatcaataacatatctgaaaacatttcattgttgattctaatctcattctaatctgatttgtgttcaaatttcttgcgatcatagcgtgtaatattaaagttttgttttgtgttaggcaacaaagtcttgctattcttgacaagcaaatcagacttgggcattgctttttgttccctaataggattagattagttgatttattgaacgcttgttcaaaccgaaacaatctttgatgtcacagtttgattggtttcttagatttactattctcatcacatattatattatgtctcaattaaatatgttttgtgcatttagaaaactagttgcaatttcaggacatggtgtttttttaataccttaaaataggttaaaaagctaaaacattgtgatcacatgagaattcaccttccaaacatcaagaaatccaaaacaaacattattagataaacccaagccaactcttttgcagccacattacaaactctagcaaaccaagaaacatgacactcaaaaagttgcaacctacataaactctatcaaaacatggaagatgaggaccatcttggaggagactttttctcagtctatgtacaggttagcattatcatacttcgattcctccatcacctgtaaaccagcagaaaaaagccaaaaaattgcattctaaaagaccactggcctccacctttttttcgcaaacagagcaaaaacttcccactcgtctttagccaccacccaacagcagcccttccctctttaaaagttgcatcaatcataacacgtattcttcttggctgaggtagggattgaagagagttctaaaaagtaaaaacacacaatcttagcatcatcatcattattgatcacagtaagcacctttcagttgttgctgacgcctttttcctcttcatttgttataaattccatcaggaaggaggtgttcttgtgaaaagcttcattgcggaagtaccaaaacatagacagcataattgcaagaaagatactaaactcctatttttgaatgaaaccaagtgttgcaagaatggagggtctaaaatccaggttacaatatcagccccattaacaaaacaaaactcagtcaccctcatccaccatttacttcatacattgcatctccctttcttgccttacttatgtatataacctattctctctcacaaactcaccctcaatacattgcaaatgagagccctttgatgcaaatagagatttacttcatacattgcatccccctttcttcccttacttatatatataacctattttctctcacaaacccaccatcaatacaatgactgaaatattttttttatttaatctcttataccctattgtactatcttggggtgtaatagatacaccctccttgatgtcaaaacatgccaacccagaccaacaatcaaacactacaaacaggtaaaggccaacaatcaagtactccaaaaaaggcacatccaagtttacacatagacaccaaatacatatgtaaactacaccagttactgcagagtttgacacaacaccagtctacagaacaaccaaacaatgtacaattgcgaacaatgtatttatgaatggccatcatacacacacactcggccaattttttgttcacaagtttgatgtttggacctacattcaaagttggtgccaaataagttagtactaaactaattaggtctttactcttattttaagtttgagaacaataatctgttttggaataagaacgagttaaaatataaaaacatcctccaaattgtagtaaacaaacctatcataccaatcaattggtatttcttaatatatgtatatatatatatacacattacactaatctttttttttaggctagtttggattgatatgtatagtagtgagaaaaatagaagagaaaaaaaatacatttccttaaaatcaacctttattaaaatttctcaaaagttcatttccgcacaattttaaatccaaataagagaaaattaaaacacattgtaagagttcaaatatagaaagaaagaaagaaagaaaaaagtttgtttccatgattaaatctacataaaacagggaaacaaaaacatataaaattggcttctccaatccaaaatcaagattcaaaaccaataacaaatcacaaaactcctagatgataataacatcaataactagatttcagtttcattaatagaaatagtaacgataaaagagcagcggaaacattgaggttgagcttcatgactactgtgaaagtgaagagaatggtgagcacaaaactcaccaccaaagcactcagtccacacacactcagctgattctgccatgaagatctgttccatagagggaacgacgtcgtttcctttgttct

SEQ ID NO: 187312 - DNA, 2576 bp, Cannabis indica
acttctacaccaaaccactcaacacaaagaggatgggcaaaattagagttagtatagtatttttcaaatctttgttcttttaatgcatccactaaaagaaatagtaaaacaacccaaaccccgcccaatccaataccaagttaacctaagaaaaccctaggctaaacttgaatgtttgattaaaacattcgagacttcatctctctcgtacacacgcgagaaaaaccagcgagaaaaattagggttatagattccatctcacacacaaacacaatatgagatttcaatataagaaaaatgaaagagattcagtaagagatgcaaacagagtgtagtcgtagagatttttggcaaggttcacccaaaattgctagggctacgtccttgttcgagctctcctcagtgaaactcgattccactatcatcaaacatcaggtgcagtcttcattctcaagattcctagccacagataagtattggctgataatctttgcttctctcactcttttacaactttatttatagtactaactctcttttccgtttcttatcttcctcttgtttcaacaatgtcaaggatcgcctgctctctctacaaattatactctctctcacttacttctagctcggagaagatggttattatatcacgtataatttttgggttttttcttctggttttatagctctatggtctgattaatgacagtacaactgagctggattagtgtaactgaattttaaaggttgttgtagattctgttagagtgtaaagtagtgaaagcaacttgtgcttgagtcgatcttagtccataactgttttcaattgtctttcttatatgcttgagcttataaggatgtttatttaaccaattccacctaaatgtccttataagcgatgatagtgtacttcattgagggtcttagctctctgacccttaaggtcaactttctttatcaatccctagcaggtccatatagtgttttaacttgctcggggatacgactttggttcccatgtctgctgggttgtgtttagtagggactttctctactatcacctctccttgtgtcactttgtctcgaataaagtgatacttaatctctatgtgcttagttctatgatggaaagtaagattcttccatatatgaatggaactatgattgtctgaaaaattgtaggcacctccttagttagctttagtttatccatgaccctttcagtagttgagaatgcaacaacagattgtaattgtactcttccactcacacaatttcccctactagaaaataatatgtagaagtgattctcctagtatccatatccccaccatagtctgaatcacagaatcctttaactagggttggattcttgctctgtttgtagattaatctagtattagtggttccaatcaagtatttgaaaatccatttcatggctaaccagtgtaccttgcctagattatccatatacctgcttagaacacttatagcaaaagttaagtttggtctagtgctaaccattaggtacattattgatcccacaatattagaatagggcaccttactcatctgctctttctctgtcttggttgtagggcaatcctttttagaaacttattgattagtgataggttagcttgtcctcttagcttccttcataccaaatttatcaatcaacttctttatatattcttcttgacacaactttatgattctcttctatgtgtctctaatgatagaaatttccaagatcttaataattgttcccaggtccttcatctcaaattctaagtttaaaagttgtttcatgatatcaatcttaactctttccttacaggtgatgagcatgtcatctacataaaacatgaagtagatgacatcttcaatcttagtttcattgaaatacacataagtgtcatagtagcttctggtaaagccttgtttggtcataaatatatcaaacctcttgttccactgtctaggggactgcttgagtccataaagagatgactttattagtaatatccgtaaatttaaaaattaattagcaatcctaattaatttacttaaatactaatgtatgattatattgtaatataattaattatatgatattatttgagaatatatgaatttagatccatatgtgtgttaggggtatttttgtaattttgacccgaaaggagtaaaataattattttattatatttgtgataattgactacattattatgtagtatgtttgctttattgtgttacaggtaaattttgacaagttagtgtggtatagtcataatcgggtattttggctcgaactagattcggagtccaaaatattgaatgtatgagattataataatgatatgggatatatgagtttaattggaattgtatatgattggaatgacttttatgccattgtcttcttattgttttgatttttaaagccctaagggcaaaatgatcatttgatcgaaatgtagtaaaatgaaatatatgtttcatttctgaaaattaaaagaggaaatcccatttcttgcctttgaagctcccattgaactctctctctctct

SEQ ID NO: 187313 - DNA, 5408 bp, Cannabis indica
aataaaataaaaaaaaataaagatataatgaaaaaactaatagtacacctttcaacaggcgtgtttaggtatatcatctatctatgtcaatatatgagagaactttttagtacaatttttaatgatcgtgtaagttgttaattatgaccacctgtaaatttataaaaaatttcaaatattttatgacactcgtaattactttatcttatacaagtggtaactaattgtttaaactttattttcagcactatattattcaattttttttaaaaaaaaaaacttacatttgattctaaataactacatcgtgcacaattataaaaagaaaaagagaggaggattcaaaagctcttttctgtgcgaaaacaaataaagagtgtactagaacaaccattttcagagtatatactcgtaattataaacttagccaaatgggtcaatatataatttagattaaaaggatattttcataattacccaaaataacaaaaataaggaatcacgatttatttttaatatttttacggatttatttttttcatataaaaatacgaatgattgtttttacgttgtattcacaacaacattatactatagcatgctttcatgttactttcttgaggataaaattataattttattaagctatgtgctaatacattacattattatgtaatatatttattttactatgttacaggtgattttcgataagtttgtacagtattcataacatcaagtattttgactcggaacaggttcgggtcttgtatgagtaaaaatatgacatgactattacttaaagttgtgattatatttgtgtgagtgatatggttcaaaattatatatataatcttagtcctcttatatgttgatttttggtttagagggtaagaaccatatttttattaaccgtttcagttcaaggagaagctcccgtcaccccctttactctctctctttctctctttgcaatttttcactttctatcaaaatgaaccaatttttttatgtgtaggagctaatcttggttagtttttgaaaaattagaaattttagaagtaatttgtgataaaaattttaaattattttctgaattgatatagtatttttggtttaaactagggttattcgttaatttttgactatgtgatttgaaggaatgagatttgatagttatttgaggtgttaaaatggtttggtgttagttttaatggaattggggtgagaagctaaattgtctttcaattcagccaaatatttatagttcaaggagaaagttaagatttttagagcatgagtttggttatagtgttttaagtttttaacatgtaaattctatgttttgtaatgcttcattttgtgttgattgaagcataagtttttaagttgattaaatattgtaggtctgggtttagaaactaattgcatacatcatagaaattttggtgcattttcggagttaaaaattagggttttgacccaagcgctgcaatcctgttcttgagagtcacgacttatgattttcgagtgtttttgctctctgtaaggagcaagagccacaaccttagttgtagagtcacgaccgtctaggtttagtagaaccaaaaattttttgtaacttgttttggtcataactttaattctgaactctttttttgaatgtattttatatcgttataaagctcgtgaagagctttataatttagtccagtttatgatacctacttgttatatgattgaggattaattttattgtgttcgtacctaagtttgtgtagtttcggtaatcaaaattgagataaactctaatgaggccttataaattaaatagacgtgtgagcatgacacgtgatgtctatacaaaatagacttaagatgttgtggcatcatcataaatgcaatggtgtattagataagtgcaatgacacagttattagcacagtggcgcattaaaagtgatcatgatgctatgtgattatattgtgggtttgattatactttcttgttgggtcttggctcacgagtgctctaatgtacaggcaagggtaaggtagtttcaaaccttctatgagtttgaggactttgactgtggattgtacatgttccggccaagttagaccatgagggttggatcctatggggagattgatttaaaaatctcattttatttcagaggtagacttttgagttagcaacttataatattttgaaaaaagaaaatacgagatcccggttatataaatattattttagtttaaagttaaagttattataagtttgtttgatatattagttgttttatttaaatccactggacttagtagacctccaattagtgagattagcatagtataatcacaacctatgtctttcatttagttagggtgttacaatttggtataagagaaccaagatttttaaacttcctgaacacaggcagaacatgtacaatcatcgttaaaaaaagctcaactcatagtatcgtaagtgttgagagtaaatacttaactatttatatgattaaatatttactacttttgtgaatgggcaacagaagagtatctataaattatttatagataactgaaattatgattatttgtttataaatgttaaataaactatgtggggagaaattccatatgtgttaattaaggattatggaaagaaatgtgtaagagtgggattggtacttgattcactatgattgttgattgtagggttatttgaaaaagaatagaccatattagatcaactagataacagagcgagcccaataaggatggttataacaaaaccatcccactaacatgtccaatacctttacagaatcttggagataatatagagtttaataacgctaatcctcttactgattgacatcaaatgttcgttgaaatgtgagctatcattcttcgttaggaagaagagttacatcgcgctagacaatcagtttagaaagagttcctctagctcccattccaatggtagttaaccacagactagatcttcaacaaatagatttaatctttgacagatttgtcacgctacaaccttcgacattcttaggtagtattgatactgttaaagtagaacaatggatgagtattctcacttacattatggataatatgggtatagttggaaccaagcgggttatttgtgctgctttcatatttcaagaacatgcccgcacttggtgggatttggtaggtcagtctcaagaccataatactatgtcctgagaagaattcaagaatctgtttgaagataagttttacaatattgctattcatatagctcacaccgtgatattcacctgagtgttttctgggggaagctggttctcgtcctcgtcagcgacattgcttctaccgtcttgagtggatggtttgaccactgctttgcgtgttgcaaccattgttgttgatgacaactctagtaattgattcttcaactctcaatgaaaacaccaaaatatttactaagattttggaagctaattttgaaaatagataagcttaagaaatagataaattaaagaagaagagaccaagattttcacgtggtttgagtgttaataaactctatttcacgagtcaatcttattaagctagaaaagctccaaagtatttcttacaagtgtttataccctaaatgaagaaccctaattcttagttcttctttccaaaaaattcaatctcctttacatgaaggggtaatgttctatttatagggaagaacaaccgagaatgggcataccagatccgatagggtttaagggtgtcaactaggccctttgacagagtaaaatacaatgtttattgactttgggccaattggatgaggcttaattcacgaggtaaggattgtctgtacaagcaaggaccatttgaggatgcgagatgtcatgcaataccgtgtccgtaccgacaatatcaagaatatggcgttggataaaaaagtagccttcttttggtagcacacgcactcgacagtatgatgtagaggaaaaactctgacactgtggggcctcgtgtctggagggttccgtgttggttgaggttcaaaagccatttgaatgactattcgattactcgcttcaagattacctcttgaaggtatccagattggtcttagcagactctttgcttctaggcctaatggctttgtctggactagggtagtccgatcttggtagtaaagcgagttgggtttacgtccaaatcggaattacagtttgatttaatcattgggcccaagtttgagccaaccttctggtattgggctttagaattaaaaacatcatcattcctaaaacccaaataataattagttataagtctattataacaactgtattcttaagctgttaattgtgctcttttgtattgtatatgttgagcttgagctcctttaatcaatgaaaattgtttttacaattctgttattgaatcttaacatagattttgttagtgtcataaatagaatatatgtaagactcagattctaaattattgaatctcgacaaaacatgtagtactaattacatacacattatttaaaatatttaaaattaaatagataattacaaatttaagacactgataaaattaataaaatatatacgaaactagattaaaattttaatgatattcaatttttttaaggaaataatattcaattttgatcctactaaaaaatcattaaacatttattgaaattgagaactttgtgtagttatgttttaggctaattaggattttcgcttcctgaattttgacatgtactaaatcatgctctcaaaaattttaaggtcattaaaaatacctccttaactattgagattgttatcattcaattttactattttagtgattgtttatgtactaaacaatgctccccagactttgatatctatcaaattatgcccgtggaactttgatatgtactaaaccatgcctcctgaactttcatacatgttacttttgtactaaaattggataaatttaaatccaataatctcaatatttttttttgaaacataataatcttaatagttcaggaaatatttttaaactttaaaagttcaaaggacatgatttagtacatatcgaattttaggggctaaaaaacctaattagcgcatgttttattaatcctcaagcacttcccccaccctacctttgtttctttcttgacgtcatcgtttacctcatacaaaattattgttttaatgatatttatcctttttttttttttttttaaaaagaaattaagacctaaaccggaaaagttgttagaaaaggcaaagaaaaatagaaaaatagaaaatcaatcttccttttcctcttttctgagttaggtcccgtatctttctctctctctctctctctctaactaaa

SEQ ID NO: 187314 - DNA, 3371 bp, Cannabis indica
aaattacaagttcttacaatcttagaaaaattacaaccaacaaaaaagaagaaagtctttaacaatagttagcatagttattaatctcccatctagcacaaacaccattaaaagtattgataaccacgctagagtcgctttccacaataacaaaatggtggccacggtccatcgccgcatgcagagccaaacaacaagcagcgatctcgccacaaaggaggttagtgaaacaaacactcttagtcatcacctagaccacctcaccaaggtggttacgagcaacaaccactaaacacatatcttctatccccacatgaatatcgtagctagtttaatccaatcaagagggggagggaaccatttctccaccaagaaaagggaaaagtggaagaagagggaagcacagtaatatgcataacaataacaaatagagtcaatgtaatattttacgctacccttattattgtgtaccttgtcatttgggactttctaaattatatccacgacaatagaggcgtataggagcacctcctccacattgattcttttatactcaaaccccagatgaatttaacccaatttcacatacgaatgcttggataaatattccacggggaagatctccacagatgagacgctggcaaacagtgaagaaaaaggtgttatgtagattccttttcacccccacaaatagggcaaaggttgtcatcaatttgcagtctctttcttaactctgaatgcactgacaaagcattggacaaggcaagccgacttactagagaaattattattgggttccttattctaaacccaaaagtcatggtcttgaaccgaagcctaccaccttttaaaatgcacgaatcgtatcctgattaaagaggtaggtcaacttctacagatcccaatcaccatttttagttagaaggtcggcaactctgttaaacccaatggacggggcccccttaggttttgaaacaaaatacttcccatgggctacctaaggatcttcccaaatattcgtgtctttcccatcaactatcactttacaagcacattttcttagaatatcatgggctttaaccacatttttcaaaaactaagagttcgagttcttgtattggcccttcaagaaatctttgcccctcaaatatttagcttccaacaccttacagtggagggattgatttcctgtcagaagattctagccccatttaacgagaaaaactaaattcatttctttagttttacgaaactcaagacccccacgaaatttaaggaggcacaacttatctcatgacttaagatagacccctctgttgcccttctcaaaaccccactaagtctcgcaccatgccatccatactggatataccatcttgttagacaactttgtagattgcatgaagtacattggcatagataatccaacatatttgattaaggtagcacccccaactttagagagtttcaacttaactttctatccttgcagtttggaagtgagattatccaagataaaattacaatcaacatctttctgtctagattttcataaagttaattttcaaaaaaaaaaatacttcataaattctttggcaaaatttttaaaattatttattttgggaccataagattttatcattttttttttgtaaattctaagtgcatatttactcttattaactcttattaacatttattatgtatattatacattatataaaaaaaaatatttattatattatatataaatggatgaataaaaaatagaccttttaatataagggagcttatgtagtggctcaaactgtcatatgcttgagccgaccatgctttattcattcataacaaaaaagtctacatggatgtttgtttgttcctctattgcgttataaaattaaaacaaactaataaacagttatcaatatttttaataaataggtcacaaattcgtatttgacatatacttataatacttaaatctcgacacgattttgtaaccacaaattattacccctacataaaatatataataatttctaacattattttgatccacctccaaatgactcgaggttttgacaataataataataataataatatcaattcaaaaagtcatattgaaaaattattagaggcaaaaagaaaaagttctactaaaataccatctttagaatgaaaagtagtgttatgtgtaagtgttgtagaatatgaccacttacatcatcattatcatgttgcaatgtatttattaaacaacaatgcaataataaaggactaaattcatgttattctcatattttgacactgtgacatagctggactggccctagactagacttatataaaaagaatatataattatttgaataaggacaatagcaaaagaaccataaaataaaataaccctaattagccttctatggcttaaaaatgaaagaaaaaatacttaatcatgcatcatatatgtaataaataaaacacactacccataatgtgacacttgtaatgtggagcaaagaagaaaaagaagagaaattcttttaaagaaaaaaaaaggtgatatacataaccattatatatatgatttcattcaaaggaggggcctttgttctaagtttacaagaattgattgtatatagtcactcactatttcatcttatgcatctttttaattgcattaagagtcaactataagaataagatgtggtgtggtatgacaatgtggagtctactaaaagtgatgttgatgacactaacttgggtttaaaagtttatctactaataaaatatacaagactatttcagtctcattaggaggaatgtattttgtttattttacattattgtcaaatattaataacaggattaaactctctaagtactactttattaataaaattcattttattttgttaatatcccaatgattttacttgataaaaaatcatgcaaatggagatgtttatatagttattaatctcatttatcttaatttactaatccatgtggtactttgtttgaattcctaacgaaaagtgtatatggaagtttgtttgttcttttattgtattataaaataaaataaaaagatagattcacctgtcataagtcacaataaatttaataatttttttttaaattattaccaattattttagtataaatataaattcaagtcaaacctatgaggattatgaaacaaaaagtgaaaaaggagattgtaagtttgtaatttaaccctgatatgacaaccaaatcaaaatgcacaactgaagagggaaaaaacgtacactttagtgatagtgaactttgcctgagctgctaccaacgacgatggatctccgtaagagagagagagagagaga

SEQ ID NO: 187315 - DNA, 2436 bp, Cannabis indica
tattatattatttactaaattgtctggaaagaaaaacagaatcatattattttgtttacataactagaaaaagtaatcgaaatgctttaatttgacaaaattatcattattagatcatgtaattattttctgttcatagatttttaaagggcatatttatctttttcatttttaattaataaaataaaaataaattaagttagaaaaaggaaatgtattcctataaaaatgaggagagaacttttttcctttattttctccctaatttgtttagggcccactattttttccctttccaaaattcagtaaataattagaaatcaatatcataccatttatttttatttccttcaagtaaatatgccattaaggtaaaacaaattgtaaactttgcaagaaatgtgaatcatcattaagttttcactttttctcactttgatatgaattatatttttttctttggaaatgaaaaaataaacattacaccaacatatcttttctcaaagtcaaaagtaaaaatagttttatttaatttctctattacttcaagattaaattaaattttatagtaaaattacttaaaactaactaaagtgaccatataaaggatattaaaatataggtgtgtggagttataggatcgaatttcaataacttaaaaatataatctaaagacaatctatcgaaagaaaataataataaactttagtgaaaaagttttcttttgctttttgtccattctttctatttagaagattccattgatcttgatcctacattttttttttttttcaattttttcacaccataagtcgttggatttgtttcttttttactagtttcttccattttaatttatagtctaaacaatatacctaataataacaatgaaatctctttaggaataatgttggtactaaacaccaaataaagccatcaatttagggattgatttttgttggtggccaaacatatttgtcaaatcttctttaatgaaaaccactagttatgatttatgagtcatgactttgtatggtgtcaagaaaaataaagaagtgattagcttcattagaaggtaccatctcatgaattattgactagaagtagatgcacaagatagtccaattccttggttggtaaatttaacaaatgtgggtagacaataaacatgttttttttattatttaattttaagtgtgagtagatattttatgaaaataagggaaaaattaattattttccaaccaaataaataataataataaaaaaaaaacgagtattgcgattaagatctgtttgttaggagacaaaagtgagtggatagaaagaagaggagagaaaaagatagaaggagacaacaaatctatttatttggcagaagagattgggaaagaaatagatagttaaatgaaaagtaaatccttccaaattttaatttataatcattttatgaataaaaggatttatactcttcctcttcaattatttaaaattacaaatgtattcttgtaatattatattaaaaaaattacatctaagcataatataataatttcataaatactctttattattattcctcattccttttaccaaaactcaaaaaaattgctactctcatctctctcttgctcttattttacatcctccatcaattttccattctctctattttccatccttcctaacaaacatagcataagacaccagcaccacttaaaactgatattaaatgttagccatattttataaattttataagacatataatatcttaaattttatatattagatttgagcattgttattagacactagtggtgtctagcatcttctcgacatattgcattgcgattggctaacgatagtctctaaaagctattatattaaactatatggacgatatttagttggaccaataacgatattaatacataggagagtactaggcactatattctcattagatttgtagtcaatggaccactttctctttcaatggagcaccacccaaacttcaccttccataatcatatcaacatatatatgactcccaaccatacaacaaaagggtcaataattcaataaatgtataagctcctaaatgtcaccgactaagagtacgatcacctttaagtgataaaagtagaatatcaccactaaaaaatagttcaatttcaatgttaatattaactcatcttagtgggtctcactctcaaagattgacctatgttagtctttaaataaggggcttatcttaattatatataacaccatcgataatgttaccatcaatattattgcttctccgtaaatgtcattaaattacgttagaattgctaatacaacttcttattataatctcttaattaatttttatgtccaaaatcatatattagaataatttcgttaagttacactatcatgattccttgt

SEQ ID NO: 187316 - DNA, 3617 bp, Cannabis indica
aaagtaaatctgtgttagtactttctagctattcaatatacaagcataattaactactatctaataatacttctccagcaaccccatcaaaagcatgctaggctgagagtatgaactaatcatggaaatagaaacttgcccaacgattctgatgcccagtatttggactaaaacagatgtttattgcagcaactcaatctacaacatccaacagataaaagagatggcgaaaacataattacagtccaaaatagcatcaaactcacaattcgtggaaatgcagctcttagccctgcaagtctccgttcactaccatatatctcaccagctgctatatagatctgtgtgttcctgtcaaatcccaatgcttgcaaaactgttgatgcctcctctggtgtcaaagggcacaaaccttgcgatcttctcatttcagaatctatttctttatctctccaccagatgtatgcatacctgaataaaaggttcaatcaggtggacattagaaatggagcagaaaatcatgcactaatctcagtttaacaaatgcattataaactgctctgccaactgcctttgcacgaatgaagaactatcatcactagtcagctaagcctaaaggttttatacatgaaaatgctgattacttcagccccatcccatgtgctttcaagcaattcttatatagaaagcataacactccaatagatcaaaagtgtttgaggagcaaattaggtcaacaaacaaaatatctcattcacttcttaaccaagcaagcactgcaacttatatatttacatacctcatttgtttgagctcctcagcttctttctctgaacaaccacgagtacaacctgagaaagccaacatgtccatttcatatctcaaatgcaaagccacaaaaggccccttttcctgaagtatccgaaccaatttgtatcccaacgtctcaatctggggagtgaattttagagcctggaaattaacacgacacctaagtttctgaagatcaagagcaatccaattgtttgccaaacgtgcatctgtcttgttaaaatgcaacaccctatgtttcttgaacagtggcagaatctgttaatgcaaatgtagctttataagaaagatgaatcaaaataaagaaagggttgaggatcttcaagcgtttcagctttcagtaattttcaataaatttatttaacaatgtacgtgatgtcttggttactactttcgttcctataataaccggattttgacggagcaactgagctgtcatataccctcctaatatatagattaacattctaaagacctaaataaacccaattaacaaataatatacaaaatacaacttccaatggtacacatcatcatctgcaagtatatgaatgatgagcccatacaacaaatgctatgactgatacagaaaattggcagaaaacataattaggtataacctgttgcaagtagtaggtttcatttgaccaactaacaggaggcatttgaaggggtttgtgtccgtgtttcctgttgaacctcttaggcagtcttctgacaattcgaacttcatctctcagcgaatcaatgaaatgtctcacatcaaagatatcttcaaagttactgaaagagaaaaataagggtttacaaactccaaaaaaaatcatgtcacaagatgattaaagaaagtactcagcatctattaaacaagtactttacctaggatcagcccagaaagacgtcttatcaagctctggtacaaccaacgtaagattcaaaagccgagcaatcgtcaccatatcacatatctaaaatgcaaaattgcctgtcaaaactagaggtgacagagaagaaaatatgagagtggaaaattacgaaccgctgcacgcatttgatttaagcccccattgcaggacaccctgagaaaaccattacttttatattttcctgcaaaatccaggacttaaaatcttagcattcacccaaaagaaaatgagtgaaaaaattgatcaatgacattcatcaaatcaatctaaaatattgaattaaatacgatttcatggagctttatcttatttacacaacaaaacaattttttttgttgtattacaagtcccttttcaaacaatcatggttttccttataaacaatcaacaaactataaatttctaaaaattacaataaaagaaacatgactttacaaatgaaaactaatgttctgtcacgtctaaacttgaagtaggggtaagtgcaaagtattttattgtgactgaaacttggcaactgcctctcaagttgacctatgtggtttcacattctcgccaaacgttcttatgaggatgttggaaaacctctcggtgctgtacactgttagattttatgactttctaacttacctgataacaagggatcaatggtttcagggtcttttttgctcttatgtttagtgtccaactaaaacaattaaaatctcatctcattactcgccatctctagtcaaacctataatagagccttgacttttcagctaaattatcaatggcagtaaaatgatcagccagaggtcagagggaattatacagtgagtttcaaaattattgagttattaaccattaatttacatatacatctctagcatgcacttaacctaccaaatgaggtctcaaatccacgaaaacaagtattgagcaaaaagaatttcttctccaataaaaactgttctgtcttacgttgttctaaattaacattaaatattcaaccttaaaaagtgcttttttctccatatctaactggattttcacattccagccaaaaaaaaaaagaaaaaactggcttttcaccaccccaaatgaaaaacaagttcacatacaccactccttactttcttaactttcaaacatcaaattaatgcattaacattaatttggtgctctcctttaattaatgtttttttttctcccataaaaacataattaaaagagagtatccaaaaacaatcagatacaaaagaggcttgaaactaagaactcacttgctggaagcagtggtggtggtgattgaatggcacgcggaaccatggcaatctgagatatccgatttgttatattgttgaaaaaatgtggatgccatagctccccaacagctacgagctgaaccaaacacgtccatagcaaaatgctggagcagacacgaatgaaccagacctgtaaacgggtccggggaatcaccggagccggaatcttatcgcaccgaaccggaacgccgtcagatctaacctccatttctctactacacaccacatcgccgtctcatcggctaattattcccaaaaactaatcactgcgacccaattcaatgcaccactccaattaccgaaatttccattcacattccaaatcagaaccacataaaaagccctatctccaatttatctcccaaagtccaaaccaaaaccttcaaaaaaaaaaaaataataataatcagactcccaaaataaaattaagaataatcaaacaaacatatgagaaaaactgaaaccaaaaacataaagaaagaaaatctcgacaacccattacaagaatcagtccaatgcttggtgtgatttccttttccgggaaaaacgtatt

SEQ ID NO: 187317 - DNA, 5397 bp, Cannabis indica
gttctaaagggaaaagagatgatatagttcatgcattgtggggctgccgatatagtgttatggtgcggaaggagtgtggactatggacacaggtctgtgacaacatgattccagacttaccaccttcttgagcacaatggcaagggtttgggactccaacacatttgattttttttctaattgttgcttggaatatatatggaatgtcgaaactagtgttaatcatggtggcatctgtcagagagagaatgacacgataacatcaatttattttagccaatttggtggaatcggactatttaattaagagcaatcgaacttcttcaagagaaagaggatagttgtcgcgatatgaacggggtgctacaccagatttgaagtttgtgtatcttatttgtttgttgtttatagagaagctaaagaggtgactcacattttaaccaattaagcattgttatctaaaactgctactactctattatgttagtcaagcttttccatttgatgagttttttcctacgcagtaggtacaatcccaaaaagctgtctaggtacaatacgtctaacctattcgaatattcagttatgtggtagaaaattgctaacatcaatttattctgtataaatatatagaaataaataagtccaaaattaccttcatgcacagtcacttgtaaaaaaataaaattagaaataacagctcacgggcttcaattcggagaatggatatcaacagtttttattcgtttttttttcccatattataaattccaagcatccaacctagctaaattctctcactctctctctccaatggctgctacctccatcttcttcctaatacttatcatcactctctcacaatccccgatccaaacgacatgcaaccccatcaaaacagtcgtcgttctagtcatggagaatcggtctttcgaccacatgctgggatggatgaaacggcttaaccccgaaatcaacggtgtagatggttccgagtccaatctagtaaccccgtctgacccgaactccaaacgggtcttcttccagaatcaatcccactacgtggacccggatccgggccactcattccaagccatacgccagcagatattcggctccgataacgagagctccaccgagccgcctccaatgaatggattcgcccaacaagctttcgccatggacaacaccaccgctacggctcaggccgtcatgaatggcttcgacccggatatggttcccgtctataaagctctagtctctgagttcgccgtctttgataggtaatttaattaaatgttcatttctttatttattattcataattttaacacaatattatctcttaatactgtaagaactttttcccagaggtaatacatattaatggttacaacaatttagtttaaagtgtgggatacggaatgtgttacatatataaattgtttttcgaaaactgatttctctctttctttctaattttgcgctattataagaaactaataggattattagataattataaaatgccattggtgtttctggtcagcagagaacatattgatacagccaaaaaagtttaaagcttgaaatgacgtgtctttaataattgcattgcaataataatatcccatactgttttctgatcacgagtccaccttaatattattactattttattttatttttccggaatagttatgggaagttggacatttttttttgaaatggttagacattgattattagatttttactatatatataatatataataacaatataattttttagaatatatatatttagtaatatcttacaaatattgaaaatatttccaaatttaaaacatgtatttaaaaaaatatatgtacttcgcataattttttttttcgaattattaatttaaattatgttaatttattactatatatctatatatagtctatttttttatatatatataaaaaaagaaataacgacattaaatgtcccaaaagtaaatttatatttaaattattttatatatccctattttttttaacaaataatacccctattatttatagatgatgaattagtggcttcgtattactatttatcagtgttttattatttattttgtttgcaagtgatattattgctctattaattatataaatggtaaatcttttcaaaagtaattgcagtgttggtatattacagtaattttggaattaattaattgtattctaattcagagaattttgtttaaaatgaaaaatcaatgttattgaaatttatcattcttaatataagagtctaaaaatttcatagagtattatacttaaaaatgctacaatcaaataagtaccggagaggtaccgagagtgcccaggaaaataatgaatttgctgatcatgtaacaaaatataattgaatatttggtaaagaagaaaataaaattttacaatccttaattaataataaaactagacaaggacaagagaagaagaagagatgacacattaataatggttaataatcaagagataaatttaagggttgtttgttaatacttttatttttgtaattttttaatcacaaaaatagaagtaaatttgtatgtttaaaattttgttttacaaaaaagaaaaatagtgttctttaaacatttttattttttaacttaaaaaacataaacaaaagtgttttataatttttatttttattttataattttatttaagtaggaatctaagtcccaaggtttatgttgggatcaggtctaaaatattaattaagaaaaagtatgttatttaaaaaaattcaaaagtaatttttttgtttgtttttaaaatttttaaaatttttatttccaattaaaaaattaaaaagtaaaaataattttataaaatttagttttggaaaatatttttacttttttaattaaaatagataagaataatattaagtgacaccgtattattaccacaggagaagagaagaggaagagatagacaaacattttaatatcccattcaacccattatgatttaataaatactataataaactgcttagcactgattattacatggtgttaatcaccataaagactcagattataaaaacagattttttatatataaatcaaataagaataatcttacttctttcgtatttttcttttttaaaaaatataataatgttattttatggtatataaacaattaatctcatacaaaattttcaggtggttcgcgtctgtgccttcatcaactcagccgaaccgtctatatgtacactcgggaacttccgccggagcaacgagcaacatcccagcgatgctggccaagggctatcctcagcgaactatcttcgagaatctggacgacgcaggaatatcctttggaatttactaccaaaacatcccagccactctgttttaccgtaacttgaggaaacttaagtattggggcaagttccactcgtacgggagttcctttaaaagtgacgccagcaaagggaagctcccgggctacgttgtggtggagcagcggtacacggatacaaaatcttccccagccaatgatgaccacccttcccatgatgtctaccaaggtcagatgttcgtgaaggaggtgtacgagactctcagggccagtccacagtggaaccaaaccctattgattattacttacgacgagcatggtggtttctttgatcacgtgcccacacccgttatcggggtccctagccctgacgacattgtggggcccgaaccattttcgtttcggtttaatcggttgggggttagagttcctactattatggtctccccgtggattgagaagggaaccggtaagtactactatactatttatttaaattgtttaccaattcagtccatgaattgttttcaagcaactaaattgatgagttctataaacaatatcaaagtatgtttagaggtctataatattaataatagactaattagaattttagtgatgtagctaatcatgtccctcaaacttttaaaaatagtacatgactatgattaattagtagatgtacaaagttacaaaaacatgatttggtagatattaaatttggaaagcataatttagtatataaataatcaactaaaatagtaaaattgaatgaaattaaacaaaagtcttaaatccaacaatcttaatagttaagggcattctataatactttcaattttttaagtatcattcacttttttaattttttttaaaaaaataataatagcaaaatgtttttttttttcaataactgtaatatataacaatgtgtcacaatgattttttaagatatacaaacactttttctatcatattattttttaaaaaataataatatgaatatattttttagatattagttaattatttaaatattagttgctattacttaattattaatttaaacaataataataaaattaaatctaatataatttaattatattttttttttaaatatattaaattttaatttaattttaaatttatttataaatatgtctaataaattttattaaacaataaaataaataaataaatttaaatatttttaaataatataacttgttaatattaattgaataatataactgtaaatttgttataaagtatgattaattaatgaaattgacttttaatttaaattttaattaaaatatacataaaaaaataattatttaatttgttgatactttttaattaaatttaaatatttaaatgtttttttcaataaaaaaataattaattgatttattaattaaggtgttaattttaaccgttagctttaacgaaaaaaaactaattaaactaacaatttttgtaaaatagctatattttataaaaaaatgtgaattgggtaaaaaaataataatagaaagatatttttttatatctgtagtgagttaaaatttgaattagaatattcttttaaaaaaaatcaatattttttatttcttaaataacatcttgtattatataaatacatttaatataacacatatctataatatatattaaaaaaaattgttgatgaaaaactttaaaataactgttaaaacattctaaatttcaattgtttctacagttttatcatttataaaatgaagtgtatatatttactatagaaaagttttatagagggatctattgatacaatttttatttgtttcaacattttggagaatattttagttcaattatttttatagttgtctatgttttagttatttaggatttttttttttgaaatttagaaaaattatttaactcgttgaagatgaggtttaaacagtctatttcaggcgcgtataaaataataaaaaaaaaaacttgcttgtaatactgtttgaatcctattttc

SEQ ID NO: 187318 - DNA, 1764 bp, Cannabis indica
ttaagctctccacaactactactactccccataccaacaactttccagttcttattcctttctctctctctctctctctgtttctcactatgacagaccgagtttatccctcggctaaaccagccgccggaaacggcgtcgctaaccctgcgtttccggcgaccaaggcccaactatacagcaatgcccgcccggcttaccgcccccaacctcacccgtaccgtcgccgtagccgttgctgctcttgctgcctatggtccacagttgctatactcgtccttctctttatcgctggagtcgccggagtagtcttctacgttatgtaccgtcctcaacgcccttccttctccgtcacctcacttaaactctcgtacctcaatctcacctctgctaattctcaactcaactccaaattcgacctcagtgtgactgctcgcaaccctaacaagcatctcgtctacacctacgatcctatttccatctcgatttactccggagacgtcgatatcggcgacgccgtaattccgtccttcgtccacggtaagaagaatacgacaacgctgaagacttcgattgtgagcaaccgcagagcgatcgatacctcggcggcgagctatttgaggacgaacatgaagagcaagagtggtatgccagtgagggtaacgatggacactaaagtgaagggcagagtcgcagcgttgaagtcgccgaaaattggggttagggtttcttgcgacggaattagggttactctaccgacggggaaaaaggcggcgacggcatcaactgccaaggctaagtgcaaggttgatgttagaattaagatctggaaatggaccttttaagctttgaacaagaattttatgagatttatttcccaaaacaaaaggtgtgttttattttttcgtaatttcattttcaagatttgtatttttttttttctagtttaatgtgattaattttgttatacttttttgttttgtgattgaaaattgtttttttttttttttttttgttatagtaatgaagagattatatggtgatcgattgtattaaatataggaaataatatattggtttatgaatagttttcatttgttaaatatatatttttgtgatgatttcttgagtttaattttccaattcttgtttgatagtgattgtcctcatgttcctttgtataatttattatatattatgtaagaacattatacttctttacagttctttgtgaaaaagaattactcacataaaatgagcaagggaagtatcttgactctttaacctttttttttttttgagtcaatataaaagaaaaaggccctctgagatatatgtataaaataagtccaaacgaaaaatggttcttcagagttgtagacggtcatattagagaaaagataaattaaatatagattgaatggttctcgtgtctttcaaatgacaaataatcgtgccaagaaggtggagccctattatattgacacttatttatacataataataataaataaaaaagccttattaggatggtcctttagtggttgtcataaacatgggagtttttcttataataaaataaaattatggctcatatatacgtaatatatttatgtatgactgttgaattttatgtttagaatttatccaagtgtcggtgggggtttgtttgtggtgggcttcaaattcaattattgtgaaacttatattgtgtgatgatgtgtttgaactttcatgtttcaagtaatagtaatagtgacccaa

SEQ ID NO: 187319 - DNA, 3049 bp, Cannabis indica
tggaatcacatcacgcagtgatgtactgactgtagaagaagttcaacgcccttctcctttctcatgaaagtcgcattgaacaccatgttgccatgagtgacctttccctcaaaatgcaggccaatcttactttcggaaatggtagatcaggaggtgttcgaccattttccaattctaattcaggccctccaaatcatagttcagcaaatggtcgtggaagagggttcatgaagtactctaatccaagagttatctgtcaagtgtgcatgagagttggccacactgctgctgtttgtcactatcgattcgacaaaaactggacaactcctaaaccaggtactcccgttaatcgtgcttttctcactgatcttgagtttgattgtgatcctcaggcctacaccacaaccatggttcaagattttggtgaggatagctactggtatgttgattctggtgccaacacccatgtcacattcgacaatgccaatctcgactcttccaaaccttttaatggcacagaaactctagccattggagatggtaagaaacttcttgtttctaatgttggttctatctccattccttcatttaacccaaactatcccttacatatgcattctgtcttaaatgttcctcatatcaccaagaatttagtcagtgtttccaaactaaccgaggataatgacattttccttgaatttcataaaaactgctgctttgtcaaggacaagacaacaggaacagttctgctcaaagggagagttaaagatggtctttatcgtcttggtgatgcctcaaaagagtcgactcccaccctgcaatgtcatgttgtttcccctactgtatccaatagtgcttacaattgtattactgcctctaattgtactcctgagtattcttactcagccaccaattgtaacacaaattctatgaatgaaagttccttttactcttctgtgtcaaatccttgcacttttcatgtttcaaagcctgctgatgtaaacttatggcattgcaaattaggccactgtgctcaatcaacattgcagcacctattaccttcccttccccatacaggcacattgaaaaccattcaattctgtaatgcctgtcaaagaggcaaaagccatcgtctgtctttccctgtgtctcaatttcgagccagtcagccccttgaattgatccacactgatctttggggtcccagtcatgaaccatccaaagatggctttcgatactacatacattttttagatgactatagccgattcacctggatctatcccctcacagttagatcccaagcttttgacaggtttattacttttaaaagtatggtcgagaaacagtttggattgcccattaaaagtgtgcaggcagatggcggtggtgaatacaaaccatttgcttcttggctgatcaaggcattctttctcacatcctgccctcatactcaccaacaaaacggcagagcagagagaaaacacaggcacgttacagaaactggactcaccttgcttgctcaagcaaacttaagtttgaaatactggtggcatgcctttcattctgcaaccttcatcattaatcgacttcccactcctgtactcaatgggattagtccatatgaatgtctattcaatgacagaccagactacacaatactaaaaagctttgggtgtgcatgctttccccatttacgaccatacaattctcataaacttcagtttagatctgaccaatgcttgtttcttggatattcttctgctcacaaaggatatatctgtgaaaacaccaatggtcgtatctacattgcaagaaatgtggtcttcaatgagcatcactatcctggccattccttcaccaaccaccaacaacaggtacattctgaccatttcactagttttgttcctactgcaactttttccacttctaatactagtaatcttaatgttgctactgctggtgtttctgagacacaaaaccctcctatacattctgatgctcccttacaccactctccaccgaacccctcatcacaaatcaacacagatatcccacaaatgccaccatcaatctcaccattacaaacccaaccaactctcccaaacacttctcacgaaccttcccaacaccaacatccatctgacaccaatataatcacagcccccattccacacatttctacatcctctcttccctgtccaaatgatccctcatgtgtctcagaacccactcagtccaccaacaatgttcacaggtctcatcctatgattactagatcaagaaatggtattattaaaccaaagtcgtacctggccaccaagcatccgttgcttgaatctctcttaccatctgaaccgaagtctctacagtctgctcttaaggatcccaactggtttaaatcgatgcaaactgaggtttttgctctaaagaaagctggtacttggactcttgttccttaccaacagggtatgcatgttattccaaataaatgggtacatcgaataaagttacatgctgatggttctttggatcgtttcaagtccaggctcgttgctaagggttatctccaagctcctgggatcgattacgaagagactttttctccaatagtgaaaccagtcacagtgcgaactgttcttactcttgctgtcactggtaattggatggtcactcaattagatgtgagtaatgcatttttaaatggcatcttgaccgagactgtcttcatgcaacagccacccgggttcattgatgaaagtaagccaaatcatgtttgtcgattacacaaagcgctttatggattaaaacaggcgccccgtgcttggaatgataagctcaggacttgtttacttcaatggggttttcagtcctcaaaatctgacacatccctctttgttcatggtcatggagataatctacttatactacttgtatatgtagacgatatcctagtaacaggcccaaataagtctttgaatactaaaactgttaactgatcttaatcatgaatttctactaggtattaggttgaagttctatatttttt

SEQ ID NO: 187320 - DNA, 1813 bp, Cannabis indica
aaaaaaattctattccatttttcaatataaatcacatcaattagcttttctaaaattcatcacaaaaagctcactttctttaatttatttttaatatattttatttattcaaatatataatatacaatttaagggtgttcatcatatcggcagcactgcacaaaaaaatattagttcaaatctttcgtggtgcgactataatttgcaaaaataaacaatataaataaaaattctccttttttaatttggttcactaacatacaacttaggcatgttgcgccaacacttaattttcacactgccaattttaggtaccttgccatattaagcaccttgataggttaagtgtctcactaggattgttaagtatctaactaggttaactggctcaataagattgggaaagggtacctcaccaactatacatctttgtccaattacccaactttccaagtagatgggcgagattactagcttaccaaactctcagtataagactgaacattagatgggttttaccaagtagggtttcatgtagtgagtgtgtactgaattcgtctggtttagtaatgaatttgtaatttcaaattcagggttggattttggattgtaatatgaaaactctcatgctttttttttatttttttttataaagtatttaaaacaaacagtgtatataagtacatataaagtgatatataagtgtatggagaagaagaaaacaaagaagaagaagaagacgacaaaaagaaggaggaggaagaggagggaggggttagcaccgacgttaggctgctccaagtggagatgaagtgaggaggaagatgagaagggaaggggtaacgtcgctctaagtataagaataagataaatagaaagagttaagtttggggttttaagctagaaataatattgtgatagggcaattatatatttttatattaagtggagacttcaaaatttcaataaaaattatagaattagacataataaaatgtaaaacaatgccaagtatctatgggccatatctagcaaataagacaacttatgggttaggtggataaatgccatatacttgaagggtcaaagcatttgggaggctgaatttaaacaagatgccagctggtattacaagaaacttcttcgtcttcgatcggttattggtgaagctaatgttaagatggcggagaggaaaggtaaattccaatctaaactgttttatgtctcatttatccaagagcagagtgctgcctatgcgaggaatatatggaatatattgatcttgccaaaacacagatttataggttggaaaattatgaatgaacatctgttaacgagagataaaatcagcagaatcatgtctattcctactgaagtttgccctgtctgatgtactgtgatgtgtgatggaaacacatagccatgtttttacctcctaatgctacacgcagagagtcatacaggaagtcatgtccttgtgtggtgtcttctgttggccgagcaacattaagtcatggttgtccaggccttcgaacaagctgagggacagaattctgaatgctgtagttttagctacaatgtattcagtttggaaaaaccgtaatgggtgcattttcgagctcaattgcaaggcggctggggccttaagcagagaaatcaaattggcagttaaacaaagatttttaagctgcaacattatgaagaaggagactttagataatcatataattaatgtaatagaaagctggtagtgttgtgattctttttctgctgattttgtttctggttttgtactttgtttggctttgttagt

SEQ ID NO: 187321 - DNA, 2624 bp, Cannabis indica
atttattatttttttttttgtcaaattccttctttaagttttttttttttgtacaatttaaggcgccagtcaaatatcaactgaattattgttgtattggcttcaaggtttaactatcacatataaacaagtgtacacagtgtttatccagttgatatatgacaaaatatttaattagcgtctacaaatttaacaaaaaaaaaaaaacttaaagaggatttcgccaccaaaaaaaaaaaagaaggattcaatgtataaaaattaaaatataaaagaattttgcaaccatttacctaatttaaaataataaaataagtgactagtaaaagagtggataccttagggagagtgtaccctccaatctcaacttcttttgaagtctctcttgcaattaatggagaaaccatgtaaaacctcatcgactccttaatcacctgatcaagataagggaatcgagtttgcagatcatgagctgtcggaatcagatcagatggtccaaacccatcaatttcctccaccaactttcgctccacctcagggtgaccggccaccaaataaacagttgatgacaatgtaaacgatgttgttgcggacccagcaagcaagtgctcatatgtgacggcactgatatagtcaggactgaaaacattcttcgaaacggaatctgaatctctcgaattcaaaatcactgaaagaaaatccttcgatcctctttctttctcccgcattctcttacccacaatatcattgagcctactagcaatatttcgattggtacgatcgaccttccaatccatcgttccaggaacccttttgaggatctggcgaaagggttcttggagaatcggtatcagaaggcctaagattatcgaaaatgagccagacaagtccatcttaagttgggtagttgagtagatgtgttgatttatgaaatcataaacttctgtgtcgccatcggatgtgggttttggattagagaggttgaaattgactccgaaggcggcttggccaattatgtcagtggctaggccgagagagagtttggagaagataatgtcttggtcttctcctgtgccatcaggttggtcgagggtttgggtggcagagttgatgaagtcctgcatagtggggatgaggccggcgaggtgagatggttggtacactgataagattgtgtttcgcattgttgaccatcttgtatctctggaaatggaaggtacattataaatcaattttgtttatataagggtaaatattatttttgaccttgtgttttataaaaatttcaactggattttttgttttgttaaatgacaattcagatcctgcgtttttcaaaatagtacaagatagaccctaaacttaatttttgtcaaattaaaacttaatagtaacctgacttggaggtattatgacaagaatagttacattttttttatctgttcgtgctagaaattggtttcaagttggttatataaaaaacgaaaaattacatttaggatctatttgtattattttaaaaaatactgggtacaaattgtaatttaacaaaacagatagtccaatctgtaatttttgcaaaacacaaggtttaaaattgtattaaccatttatatagcgatataatttgtaattagtgcacacatctatcaattttaaagaattttcgaataataaaaaataatatttaatatagataattcctttcgtatttaaaaacaaaaacaaatggcatacaaataactagttgcttaaattcaattatatttttcgtgtcctgaagtgaactattaagaattttcaaaaattggtgagatatctactcttaagcatgcatcatcatactaaaaaaacaaattaaattatgataccactaccaattttaatataataatatataatattttgagagtacatataaatttcttatgaacaattctaaaataatataaaccctatataattattttaagaaaaacaaaagaatttaaaaaaaaaaaagagaataggataccataccttgtgaaaaagagacccttttggtgcaaaggagaggctgcaataggagaaggaatgcttctatttggaatgtctttgaattttttaattccaacttctctacaaagctctgcatctcccactattattaatggttgtcttcccatatggaacctatccaatttttccacattatttactcattaattttctatatttagcaaaaatcaagagatgagatgaaaagtcaacttaataacctttattcaagtcaaactatagaagatgtaaataaaaactttaatgatctccactcttatatggcatatttatttattattgacatcacattgttgtgtttgaaaattaaacaaattattacaaaattttagtcaatttttgtattcgttataattttaatactatttttataaatttttaaaattttttgaatagcttacagtgctaaaaataaatttaaagtttttgaacatgtgtagtaaattaaaatatcaggaactctattgttgataccgtaaattatttaaatttttttaaaaatttacaagaataatattataactataacaaataccattaaaaataataataatatagtatgtgat

SEQ ID NO: 187322 - DNA, 713 bp, Cannabis indica
attaaaagaaaaatattgttttttgtaaaagcatgtatcgtttacaattatgaaaaaattgatagattttaaatggtgtcaaacattgaatgcacctttggctcggatcatatacataatataataggtattatgtggtagctactagtagctacatttatttatttcttctaacgtggagtcacttatgccattagtcaagtatgatttttttttaaagcaaatataagaatatgaatggttaaggctaactatcattatttattctacttcactaacaaactactctactatttgctttccttatccaaactaatttcaaataataataataataataataataataataataataataatgtagaatattgatattgcattgtttgacaaataagaatggtatggttttggcatgggattgttcaaaaccactaggcttgggtcgtgattggaattttaggattgcggcttttaggcctatatctctagagattgttgaagtcttggcttaaggaaatactttcgtagttaaagcgtgatgattttccgtgtagtagtataatagaatatctgattatttggtattggttcaaagtgttaactttgaatgtttttgtcgtctacttttggtgatattgttgaggattgtaaacagattttatcttattttaatgatatttttttatgttttctgttaatcgagttgttga

SEQ ID NO: 187323 - DNA, 1787 bp, Cannabis indica
tttttagttttgtcatttaatggaaaatttgaatagtttagtaagatgttgttgcatggggcctaatatgaaacacggctaaatagtatatatcatgaagatcaatcaacttgtataaaaaaaatatccaatgtgtcggtaatttttggaatatgggcattggccaatgatttccagcaccaattattagaaatttctcttatttccccccaaaaaattaaactttatttgattgcgacccgtgaaccgaaatctagccgaggagataagaagcatcatttataaatatataatatgtatttgtatagatatacctacatcttaagggcatatcgtgagtaattaagtcacttctcgattccacttggactaatataaagggagaaagtattatataatatactacatatacaactaagtaccccacatatagataaaatacatgaaatctaatggatgttgccaattcatgaagggaatgattgaagaagaggaattaagatactccttttcttttttttcctcattattttctttatcggattgaattttaaaatgaaattttattttgctggtaatggtaacctgtttgtgaaaatgactgaaacgggtagatgcattgcatccatgaaactgggagggaacaaaagaggtcagctttgaatggaccgagcccaatgaccccaaaagaaatggggccatgtgaaggaaaggaagccctttctctatctgtctctctctctccaaaaaatgataagagctaaattgtaaagaacttttctctctctctctctcttctccttctgtgtgattcttttcttttttatctctccccactcaatctttcctcttggacctctttgaccacccttttgaccattctttttttaattttgtttttgggtctttcttatgcttgtcttttgaatcatgcatgaacaaagagggagtataaagatagctcatcaaaaagggtcccaaactaataaagattttgttattggccaaagtcttaaaatatttccaaatcggatagaaggggtcagaacagttggtggagctttgggggaaaggaactaattataactatttatgggcaagttcatggattctagtaaaggagtggttcattatgtatcattcatcctcaacgttatcatcataatcatcaagctttagaagtgtgagatggagttgttagattgtcagggatctttgggtaatttataaagtaccactattaatatgtatgtatgtgcaatattgggcataaaacaccaaaaaggggaaactctaatatgcatgtatgtaataagtaggtttcaaatggtggagacaaaactatagattggttagacattaaaatatatagactttacgtacaaaagcttaagacaactcttattctcaaaaaaaaattgactataacaaattaaggggggatttatatgaagtatgacacaatgacatcacacagtagaaattttaaaattgtgggattggattttcatattatttaattatataatgatatgatttgatatcaatagacttattatatgcactagaaaattaattcaactaggtagttagctagttagattaacctgactattaaatctttaatataggcccaacatttggcattttcacatgatatatatggttggatcaaacccctttctatataacaattaataatgcttattttaatttgtcaattagtgattttcacttgtttcagtttgttaagattcattaaattttagttatgtaatcctaaaagt

SEQ ID NO: 187324 - DNA, 5953 bp, Cannabis indica
cgacaattcgcacaaccacattcaccgccaatcgccatgtctttcgtcgtcgacgacgacgacgatttccaggtccctttaacccgatcaacccctactcccaaaaatctcactctctcacagaagaaaccattgaaagcttcaagctttactactccacggccatggaagaaacctaagcaattgagctctgcagcctcttcttcttctttgcagtttggggattcaggagaacgtagggttttgaatcgttggatggtgtggattgtagcttggattcgataccgtctagttttgatttcacaaaccctaaagttagtgacgaagttttcgttaatggcggtgagaaagaagaattgttgaataaatgggggggtttcttgtaattcgattgagtctaagctgattaagtctcgaggtgattgtggagttggtaatgttgggtgcattgaagaagaagaagaagaagcagaagaagaaggggatcttgatgttttgctcaatttacgttctgtacttgaagatggagatagtatcaatggtggtgattctcctcatcattcggaaggtgatgggttagtcgatgatgggtatgatggagtttttgtggcttgtcctctttgtggagttgatatttcggatttgagtgaagaacaaagacatgttcataccaatgagtgtctcgacaaagaagatgctttagctcaaaatgtgagttttattgttatcaagttctttttttttttggttacttcattgttggaacttggaatgcttaccagtttgttctttctcatcagggtggggagcctccaaatgacgctcaagctcaaaatgtaagtgaccgaaaatttacactgttaaaataaaaataacaaagtaatttttgttgatcattattgtaacagagttttacttttgaattcggtatggatagaagattcgcctatgttatattattcaattcttgacgataaattgatttgttagatattgtcattcatgatattgatctgattcaattacacacaagatttatcatcttcaccaaccgaggtttgtataatgatcagcaaatatgtttataggtcgttcttcgtggtgaagatggtgagcctcaagtgtctaggaaatgtgctggtgtttctgctgttgtaaagtggctgcacggtcttggtttggcgaaatatgaagatgtttttgttcgagaagagattgattgggatactctgcaatggctgactgaagaggtagaatatttgtagtgaatgatatggtactttgctatgtgtttgtgttatgtgagtttaacttcatctgatgagttttattcggttgttaatttgtttgatcttaaggatctcttaagcataggcatcacaacacttggtcccaggaagaagattgtgcttgctctctctcaacttagaaaagccaatgggcaagcaagtgaagaacatgcaagtacaacattccaggtccctggtgaacccgaaaagatcactagtggatttgagatgcccaacgatgtatctgagcgggtaactgatagtgctagtaaaattgctgctaacaagttgattacagattattttccaggatcttccactgataggaagaaagtaagcagcatctccaaagatcagagcatggtggcaaagagatccactggttctggtaataaacaagttaccgcgaagaaaaatgttaggaaaggaaaactcaagaatcctccatcttggtgttgtgttccgggaaccccatttcaagtggtaaactgattttacaatttgattaagtaaaactggaagaatttcttaatgtaatcttagtctaatcttttaagcatatgaaaaccaatattgcccaccttcgtaaggtttagactatctaacatggtatgatggtaatgcaggatgcttttcaatatcttagaggggattgttcacattggtttctcactcatttccatatggatcgtaagtttcttctttcgatcccaatggaagttactacctaaagcggctatattattttacattactctaggctttcggttttaacatagttgaattggttgttgcagattatcaaggtctaacgaaatccttctgtcatgggaagatttattgctctttaatcacagctacccttgtaaatatgaagattgggattccatgggacagattacaagtcttacccctcaaccaaaagatcaacattgttggtgttgatgtgacctgtgtggatgcaaaccattgtcctggtgccataatattactttttgaaccacccaacggtaaggtgtggtccaaacttacttcccacctatttatttgtacaacaaatttgagctttttgtctcttgctcttttatgtactgattttgataatgaattcaggctgttttacacactggagactttcgctttagtggggacaaagacattatgtctcttgtacggacatgtcctattcatacactcatactggatacaacttattgtaattctcaggtaatgtgaatgaataaaggaatagctaattaggttgtttattatgtgcttgaaaccatgataatgggcttcatttggactctaaactggaaattgtagaaagaggaaaaaaactaaaaactccaactttctacttggaaaaatgttgaacattgaagctaatgttaacatttgtagtcagagagagagagagagagatagaattgaactggactttcaagttttacctttgactttcccactttcttgctcgtaatgatgaatgtgcattagtctcttaagttaaaatacacaagtgataattttatctcatatcttattgcagtatgactttccaaagcaggaaacggtaatacaatttgtccttgatgccattcaagctgaaacctttaaccccaaaactcttttcctgattggcagctacacaattggtagacctttctctctctttatcccaatgtattttccctgcttgtcttctaacatgctgaagatattaattgtatgttatatctatgcattttttgtgggaatttcctctaaatttgttgagctcaaacacattgaacaaaaactttagtttgcaatagtgactttttaagcgttatctattaagtttcacaggcaaggaacggctgttcttggaggttgctcgtgtgctacgtaaaaagatttacatcaccacagcgaagctacgtattttaaaatgtttggggctacctaaggaagatatgcaatggtttacaccaaacgaaaaagaaagccagattcatgttgttcctatgtggacaattgcgagcttcaaacgacttaagcatgtcgccaatcagtatgcagtgagagactaaacagaattttcatcctttgctatgtaattctagttgatttgttggcttagatgggtgctaataattttttcttaaaaaaaatttcagggtagattcaatcttatagttgctttttctccaactggctggtcatttggtaaaggaaagaagaattctccagggagaaagtggcagcagggaacaataataaggtgactacattcatacattgaatttacttgctaattttacagaagaataaatttagaatttttttcccgaactttgacacttgaatgatattgcccttgatttggtttttgtaaaatgcccctcgaacttttgaaataattgtaaatttgttccttcggttgcattttgcttatttttgcaaacaatttattgatgtaagactaatttattactaatttactgtgattcgagatttcatacaaaacataattacataatctaatgataaaatccagaactgtatatctagaacttttgagttaatgtttgaatatttaaagattattatacttgattctaactagcttaagttagttaagtaggccctcatactgtaattatacgcatgaaccacatcaataaattgtcttaaaaaatgagtgaaatgtaaccgaaagagttcaaagggcaaaaatcttatttttctttataaaaacatttaacttgttaagattaagtttttgccttttaaacacttaacaactttacttgtaataatctcaggtatgaagtgccatacagtgagcatagcagcttctctgaacttagagagtttgtgaagattgtatctccagtaaacataatacctagtgtgaataatgagggacctgattctgccaatgccatggttaacctcttagtctcttaatctgtatccacacacacacacaccattataaagctagtttatttaatacatacttcaaacaaacatgtcttgtattattgtaataataaaaactttttcataaaatgaattgtatattaatacatcaaactgatccattctcccttatatcttttgttatgtctagttacatttttctgggaaaagttaataataaaaactttcatatatcttccttgtatgcattgcaaacctcttcaatctccatttcattttcagcatcatcagctactaaaccctcctctaaatcactaccatattcttcttcctcaagttccaaacaactgctctcactttcagaatttctccgaaccgagccattatcttcgtcttcttcttcatccatgtctgattcgccgtcatcaaaacattcaaagttcttcctctttcctctataaccagtaaagctctggactttctccttccatagaaccaaaggacctttctccttcaactcagtaccttcataagcttcagttaagaacacactaaacctctttcctctctcagaaacatagaaaatcccaaaatgcttcaaaagaagtctcataagtttctgaggcataacaaactctcttcgaaaatgtgttagatgatcagtagtaaccaatctcttctcaatggtgaagctaagcagctcgtgcataaccgcaatggccctcttgtcgaattcatgtgaaccagcctcaagtcctcttgcatcagcataaggtgacaagtaagacctcttctgaaaatgtgctatctttcctccatatctataaactttcttatattcaggtggaaacttcaatggaaaaggaagcgaaagcattcccggggtatgatcattgagctcagtaatccccattactttcttctctaactctgttattgcccaagcaggattccaatcaacaagctccaaaaactgagcaccttcaccatttttaacaagcttgaagttttgaggatacttatgaacccaattggttcgaaaatcgacaggcaacccaaaatctctcctgaaatgggaaatcttatccaatgcaaggcatttatcaattgacatcattagtaatctagtgacatgttcagcagccttatcttcatgctccttaatcaatctctcctcctcttcaaccaaatcttcacctctttttgtcatcccacaccacaaaaccccttttctatccttgtaaagctcgaaaagtttaggcgattttcggataaaatcagagaccttatgaggctttggaagattaatctgtctcctgtattgttgtagagaccttacagggattaccatttcaggctcttgcttcagaacttccattaataacaaagctttaaaagctatcttccatttctctgtcactatttcaagatcatgaactctcttggtcttgcttctatcttggacccttttactagtggtcatgaatctgcattggtttccaaacaaagattctacaagccaagttgttcttaacaaagacatttgggaaaccccattaagagaaaggccataaagtttcattctttatgttctgaaccaattttttgggaccaaaactgaagttgaaagcaaagtctaccaagtgtttgtgaaaatgccaagctgaagttttagaggtgtatgttagcagattgtgattctagacaactactcactcactctctctctctct

SEQ ID NO: 187325 - DNA, 3824 bp, Cannabis indica
ctcgactaatctcgacattcctaatgtctaacaaaaaaatattaaaatgtgattctaatggccaaacgccgcattccgatgttgtcgggcacaaaacatgcaaaaacataaatttccatctatgacatgtataatgcattctgaattcagataaatctttgtaaaatgataattcataattaatatttcaatttcataattacaccctaattatctactaatttccaaattaaagttaaacggtcattatagattctattggccaaacaccgcgttctaatgttgtcgggcacaatacatgcaaaaaaatgtaaaatttcatatatggcataaataatacaccttgaatttaaataaatctccataaaattataaatcctaaataatattctagtttcataattaaaccctaattattcgctagttccaaattaaaactaagcggtctttacagaaagggttaattatacaaagatattctcacctgtagtgaaatataaaactattaggataatgttagctatggctactcaatttgacctagaggtagagcctatggatgtaaccactactttcttagatggagaactagaagaagacatatatatggaacatcctacagggtacattaaaaaggggataagaagacctagtatgcatactagaaaagtcactgtatgagaagccattatgaccattgcttgtactgcaaaggaacagaaatctatacaacaatctatctacttatgtatgtagatgatatgcttataataagcaaacaaaaggccaaagtaaaaaacctaaagaatctactaaaggtagaatttgagatgaaagactttggagaggctacaaaaatacttggaatgaacatcagaagagatagacataagggaaaactagttttaaactaggaagactacatccataaccccattaagagattctccatggaagaagccaagataaccaagcaacttatcacctatcatcatcaactatctaaggcacaatttctaatagaacctaaacacatagaagaaatgaaagagataccctattctaatattgttggatctgttatgtatttaatggtgtgcactagacctgatctaacacacaccatgagtatcataagtaaatccatgccaaaccctaggaagaagcattagaaagcaatgaaatggactatgaggtacatagtaggcacaactaaggtaggtttggtgtacaaaaggcttaacactaaactactgataaaagggtacagtgatgctaactatgctggtgatagatatagcagaacatgaacaataacctagtactttaaaatacgaggttgttgtgttagctagaaggtacagcaccaaatagttgttgctttgttaaaacctaaatcagagtacattactattactgaagcaataaaggaaacactatggcttcaaggtctcctagtagaggttacgaaagacaaaaaacttcctactgcgtattcaaacaatcaaagttgtatacacttatgtaagaacccaattttccatgacaagactaaacatatagaaatcaaatatcactttatcagagacaaagttacacaaaagttagtttctatacagaaaataacaacaaaagaaaaccctactaatatgggaactaaaattgttacccttcataaattcaagctttgcatgagtttgttaggggtagacaatggaggatagacctaaaagagacaagatttgggaccctcaaagaagagaaagttgatactaatcaacttatatgagaaataaggtagaaattgttgaaattaattccccatataagttgacctgtcacaactgacacttaaataaaacaaaatcagagcctaactaacctaactgtttacaatccaagattcaagacttcgttagttgctctcaaacccaaaaataggtagatccatgaggaacaaacctagtgatagttgctctcgtgttcaagaaaagaaaagaagagagttagggagagaagagtaagaggattgattcaatccagagagaaaataaaagtgtgggagagaaaaaacatacatgtgatggtgaaaatgagctaccagtcgatgaatgtgtcttggagctctaaaatctatgatcttaatagtagattgtgaactgagcttctcaaaggcagctcactaaggacgtaacccaaatttggtggtgaaccttgtaaaatctcttagtgcttgcttctctcctaccctcacatcttttacttgatttattgcccattgttgttgcatgctttttctcatcaagctcaagaacagagctgatggtctctcatttttcttcaaacttttgccctaattgttttttctttgaagcttgttagataagacatttggtaaagattgtaagataaaatcaaaggcaaaatcttaaagtgatacgtgtccattttttgttcattaatttagacaaaagaaaggtcaaaatttaccttgtgcactaatatgtgtgtgagagttgtataggaagatttgtcaaatttcctacaatttctatatttattttctagcatcttattaaatttttaacatagaagagaagtttattaattcttatatgtatgcaatatggatatgcgtggattgacttaattgagagaggaggtggccaaattaaagcgtgaattgaaggaccttgatgagagattgctttcaaatgatgccaaattgaatcttatacttgaaaggaatgctaggagtggtgaggagagacgaacatcaactaagttgctgatgttaaagtatgttgaggttgttgactatgttcgtggtgctgccaattgcttgaaggaagataaaataagtaatttaagggaagaagatattttaaaagatgatattgagaagcccaatgttggcatttcctccgatcaattcggtgttcttcctagttttaatttcaatcttcctaggaaagaggaggcaaagagcccgtatgtagatgaaaatttgaccaggcccactaatttaattgattactctcatgttgatgctaaatttattgataatagtatgaagcgtccaaggacatggccaagttttattgctatcaacagtcaatttggggagactttgtctaatgtagaatgtgaggaaaacgttagtgtaaatatacttgaatgtttaagattatcctttattaagattgatggtttgcgtaattgataaaaatttgttactttactttgagttatgtttgaaatttaattgtccatttaattttacaaatattgcacaataacttttgaataatattgtacattaatttagaaaattttgcacattagtgaaagatattgcatattaatatggaaattattgcatattagtgaaagatatttcacactaatttttggaaaatattgcacattaatttagaaaatattacacggtaatttttggaaaatattacacattaatttagaaaatactaattttttgtacttttaagtatattttaccaaagttaaaagttcaatttagaatgagaaaataataatactttaaagtatacttttattgtatatatgtataaatatccttattagttttaacaatatataattaaaaaagggatgaatttagaataaatttttgttctagttttctaacaatatgcaactagaaaagggatgaggatagaagaaaaaaagtatgaaacaataaaagaatcctaaacataaaattataaagactttgacaaaaataccatatctttatataaatttaatctaattaataatggtttatagaaaattaaaatatg

SEQ ID NO: 187326 - DNA, 1369 bp, Cannabis indica
accaagccgtacctatacctagggaaagttggtgggcctaatcggaaaaaaaaagacaactacttgtagctaattttaagaaggagatttttttttaatttagtttatatattttttttgattatttaatttaatttaatttagtttatattagtataataatattgtatataaatgtagggaccctataaatgtaatcaaatttgtcatctaaaaatttattattggtgatcaaatatgccaattaaatgaaaatctgtaatcaaatttgtttaaatcatctaaaatttgtgtcaaatgaaatgtaatattattttaggtataattagttttcttgaacatgctcttattatagaaacgaaaatcaatctatatacatatatagttgtgtatttttatgggcaaatctgtcattcaactaatgaaaaggaatacaaagtaaatggacaagtgattattttatattagggaataaataaaaaattatattagggaataaaatgaatatttggattcttttctgtttttttttcaaaaaaaaagaaaaaacagccaataattataaagttctagatttccacagctgaaaaagatagaaagacagcatgggataacataattacatttaaaaaataaagcaaatttaactacattaaaaatacaaataataaaattacaaataatgtacattaggcgtggcaaattgtgttcgcgaatcgtattcatatcgtgtcgagattcatacataatatgtaatatatatgtttaattcgaacacaattcatttaataattgtattagaaaataaaacctaaacacatgtttacaaacggattgacacaataagacttgtgttttaaatatgtcaactaataacatgtttataatccatttgtgaccagttaaagtactaaaataactttaaataggttattaacgagtcaatttcgtgttagctgtgccaactcaaacacaatctgttagacaagtcaaactaaacacgactagaacccagttaaggaaaatccaaacccactaactcttgtgcgcgcttcgaatcgtattatcgtgtctcacccgttttgttggtacatatacaacaatcaattcaattggtttaattagaaaaatataattgtgtattaaagtaggtgattacgccactttacaaacagatataacatatattggactccgaagtcaacggtactggggcccattgggcccagcgcaatgtcagtagccgaactaacagtgttccccaacacccccggcgcacgatagcagcagagaccccaagtagtagtagtggtggtggttcaagcagtcaaacaaatatacgttgggctacgtgtcacgcttttaaggt

SEQ ID NO: 187327 - DNA, 5007 bp, Cannabis indica
attacctgtgtatcaatgctcgaagaagaagttttgtgctaacatctttgacatttgtaatcgtggaagggggagtaaagcaaagccattgagtaaccatagctttttgaagactctgcaggcgatgctgctctgcaacatctgataactggttatttgtaccagctttgatttcccgagatcttgatagaaccctgtttaaatttataggcacaaataaaatgagcataaagattgcatagctgtgttataaaatataaatagaatcattaaaatccaaccttgaagtaaagtatgcttaactttgtgaaagaaaaaaaaaggaagtcaagtatgcttaagaagagatttcaaatacctctcaattatttcttcaaagctgccttttgaatcatccccagtagaaaatggcaagtgttgcattgcggatataaagatcttgtacttgacctgcacactttgagagacaaaaaagaataatataataacaagtcaaccactgtaaaaaatttacaaagaaatccttgtatgaagaaaaacaagggaaggtcaaagttacaaagcaatgtttcagtgtgcatctgtcaattatgctcatgtcgtaaatatttcatttacaagttcaaagagtgtcaatgtaagtcattcaatattcgattagcttttaattagatgctacatttttccatcaagaataataatgcaaatcagaaagttttaaataaaatatccagttccttcccttcccaaaagaaatataattaaaattctcttgtatgaaagaatatattcatataataagttccaaatgtctcatgcattttaagttggatctccactccatcattacaatctcaaagagaaaagttccattccagcagatgacatgtaaaacaaataatcttgacagtatctgttacctgctgttccaccttagctccatcatgtgcacaaacaagtcaatgcatcgatgacgtgcaagttgagaagcatatatgcccaccaaatcctctcggtgctttgaaaatagaaacatggcatacctaaaagagaatgacagtttatattaatgagcacaatgaaaacttctgcatccatactagactttcaccaaaagccagaagaatcaccctatttctccattaagctcaatgtgttatatacaaaagacaggtctattctacatcaatgacagaagagatatgtatgttcgttctctgacagataaataatatccaaatgtgatcatataactccaactcgagaagctctaattaaaaaaataaaagtagatactgcagtgtataggatgtgcaaagaatttggttgcgaaggcgtggcatgggttgcacttatattaagcagaacaattggacttagagtatgcagagcaacaaagaatcttcagagctaaatccgcgcttttaaacaaatttacgacaagagaaataagatcaagagagcagagaagccttataataaatagtatgatccaaatctaacacaataatcattctttaaaaaaaacaaaacaaaaaagcaatctgacaaataaattaaactttttgctcctttaaggaccaagaaaaaaaaaaataaaaatcaaaaagtcgagtgcaaatataaaagctgcgggcattatgcagcaccttcactgaataagagttcaaaaccttattcagctggacacatcctagtaaagcagagcataggcagctacatttccagtgaaaaagttatttatttattgaaatttagttttttgcagtcgtactaatcaatttctgaagaagaaagcacaaggagcaatggggcatgacccagcactacttacatgtgtaggatgaggtcaccaacatttacaattttgtctttagaagtatccttcatttcatcatcaagtaaatatctaagaacaagaaccaagtgtgcaccaaatcgaatcatttcaggatctccatgaggcctaacataaaaataaatgccaaccagttagaaatacaatccacgtgttattctcagaggcataaataagagaaagttaaatatattcccaaaacagatagcaatttgtaaaccacacatgtaatggaagaaaggcactaaaagccacgaatttctgcaaatcttatatagtcatggtgactttgcattcaatctggacatcttttcagttgtaaaatttaacaaggtttctgagcaagaacaaataaaggcaagttgaagtccaagcagtacctgaagacactctgatcgtcctcagaaggtgatatccatgaccatataagatctaacagacttggtatatctcctgacatcagaatcatctgtcaaacaaggttaaacgtgaaaagagaggtcagtcaaaagaagagatcaaactaagatgataaaaatgttgccaatggcctattatttatatttatatctatgcatgtatataaattttcctttggttaagtagtgtatcaaataatactttaatttgcagcatatcttcagagaaaaatattgttcaacacgcaactgcaaaattgtattgaacaaaacacatttcttaaacacaccatgatttaaagcataagaacagcaaaaaagctaaaaaaaatattgttacctcaatttgacgttgttgctccttgcatgctctggtcacactttcatgtaccatgtccctacaatcatattaattgattcttaattagtaaggaacataatgagagagaaaaatgggtcaaaaataagttgatagtgtaccctgaatgaagcttctggagaagatcagagagctgtcgtggttgctgattcacaacttgccgtggccaattttctggtccatttgaaggctgaaagtcttggtcactatgtccaggacttccactaatcacatctccagggtttctaaattgatccagcccttctggttgcagatgagccaattccatatccacctgaacttctagccacgactttgccattgcccagcatgctgactacacaaatattacgtatcaaattttcagagggtttggtggcttcaaaattaattaacctgtgagtagatagaaatatatatatatatatatgtatacatagaaatttgtacatatataattcccaaacaaaaccatgtaaatgaactttaatactgcataattttttaccatatacacaaacttcatcaacataccacttgaagatgaacctcattagaaaaaaaaaagaaaagaaaaacacacttggagatgaataccgcgcaacttacaagttaattaaccatttaaaatgaatatcaggtctgatgtattcttttgtgcttagcttaagacgccttgatgaaataataaattgcaaatataataattttttctttggcacacttggtgcctaattgaggctctaagaacctcaatattaagagatcccagcttgagccagggtctctcccatttcccaaacaccctcaccaacagcccacaccaacctagtggcttaatagcgtatatcattttatacctatatgatacacgagataattatttcccatgagttacattgatttattagtttccaaaccaacgtatcaagatgaaggattggcatatatgcaaaactaacgacatgtaataaagcaatcaaaatcaaagatttatgaacggagccaaatgtgattcgatgcatagaaaccaatcgggcattacaatagtaaactacagaaaagtttctcaaacattcgcgggcaaacaaaagcatcagtatattttttttctaacaagtgacaacaaaagctttcattttttttgaacaataaaagctttcacattagaaaatttatgatcaagatattcatctatttacataaatgacatgttttgtcaagacaatacaaacaagagttctgaaagctgtgctattaaaatagtatgtcaaaatatttgaagttgattctctcttctccatttattataattatatacataaagtaaacgaagttgttattgatataattattacaaaagatgatacacctatcaatatattcaaaaaattagaacgaaatacaaacctaaaagtaaagaaaaaattaatgcaaataacaaataaatcctcaataggagatcctttaataaaatgcaccagctaccgatttttatcagtctgaatataggaaaaagattacctcccagtctgtgcaaataggaagcatgcgttgcaagttgctacattgggctgcatatatagctgcttcaaacttcccaccatcttgatgagatattttcttccatgatagataagaaaagttacattaattcaccaaagaatgacagaagcacttattataatcaccgataaaaaggcacacccccacatataacacggagaaaagaaactgaacaaggaaacatacgcaagggaattgatcatatcgacatccaaaataaaagtaatttcaaaattttgaagagctacagcagaaaaatgcatatccaatttaccaatgagtacagatacatgggcagagaaatattcaaatatagaacacgtgtaacttgctctgctagacaataaaactttgaactctacctctgaggcacaataagatgcccatttccaaagacgccactggtgaccaataccactttctagttcaatggcttgtagagttctatccttcccattttttaagagagcttcaacagaaggaaattggtctcgccccccaaatgggcacaaagttgccgctctccaaggctgcaaaaaagtcatcataaatcaaaagagaaactgaaagcataattaaggtaataacttcatgaatttaataactctgcttacttgtcctgcagatctacaaaggttacatgcttcttcaagtttaccagctctcaaaagcgtccagagatcttctaaaagtgattcatcttgtttctgttgacatgaaacataacatgaactttagaaaagcacgcactcaaaggtcaaactttgtgcatttacaaccaaaaa

SEQ ID NO: 187328 - DNA, 1497 bp, Cannabis indica
atcggagactccgtactggaacaggtacagcccgtggccttgaaggaaacactccaaacacgatttcaccactcctctactccttgttggattgtatccacacctttcacaatttccgctatatttgcttttgttgttcttacttttgtagtaaatcactcgatcgttttccacgtaaattcctgtaaccatttcgtacaattattgcgtatgtatacactataaaaaatttgatttttagtcacaacaaaacttgtgacgaaaaataaaaaattgttactaattataaattatcattttaatattatgactaaaaggtctgagagtcacaattaaattaataacaacttgtatttaaatactatatttaaattttattatttttctattttattataagatagagtagctatatatagctaatgtatatataagagaaatatatatatatatttatacatataaactgaccatgaatggtgcatgtgtgtaggtttctgtaagtgtagatgtgatctccaatcttcaaactgctcttgtcaattttgtgcgataataaatccataattataatatttttctgaatgaagtacttatatgtatatatataaatatttatctcactttctcttttctctcacaagactaaaagcaataaaaaataatgattaataatattggtattctgcgtatgtatatatatatcgtcagcctagtttgggaataataattattcatacataaataaataaaaattgtggcgttataatatttgacccaaatttgagaaaagtattgtgtagaatatttaagtgttgttcacatgtgaagtgctttgcaagttcacaacaaaaggtgtggaccattaattggtatgcgattgtaggactttaattttcgaatcaagtagggtactgtttcacgcatccaagaaattcctccacaacttcacaggaacatgcagcaccactctctacctacacaacttctttaatgtcttttaagacttttatttttataggaacccagttttccaaaacactagctaataacttgtggttgcggtcactcacatgcattttaaaaaataaacaaaattgattactgctatttattattatttttttcaaatcttttatattcttttcttctatcattttgtattagaatcaataataatttaataaaatactttgattttcttatatatatattttgtaatatatataactgtataataaaatattatttataatgtcttcgtcatgtagacaaataataatttatacataaatacataattacaaaaggttaccttagatttttccaagtcttccaatttgaccaagtccatgagttcgactgacattgaatatgatggtcgactaatattgaaaaattatatcagcagtgactttattaattattttggtccctacagatagggatgtctccattttaagaattgaacaaaattataaataatttatttaaatg

SEQ ID NO: 187329 - DNA, 4004 bp, Cannabis indica
aaacaaacatgataggagtgtgcgagtagcgagttcctacccacacggacacctacatgaaaatatcatgaacttgcaaacagatctcttttgccttgtggcctcaagctccttcctctacatttctctgaaaaagtgaaaagatgaggggttaagacttgagcatatatattgacatatttaaggttaaaatatcaaccaatcattcactaaatatatcatatagatattgtatttatatttatctaagcatgtaaacatgtattgaaaatggtcttaaaatgtttctaaaatcatatataaacaatatatatacataaataatggttgagacactcaaattacatacatttttttatatcttaactatataattaaaaatgatacggtccaattaaaaaatataaatagttcatgttagaatagtaacattactcatatatacatttataatttgtttcaaatgcatggcacaaacaaatcaacttatgtatgtatgaaaaacaaaatgtatgggttaaacttaaacatgaatgttttgattgaaaccatagaatttttagagaaaattagagagtagtgtacctgtgtttagcttagctatgagttggattggagacgctccaacaagtttgactcacccagcttgtaagtttcatacatctctcccatactattaacataccaaaaattgactgacggaatatgctgaattttccaataaccagcgccatttggttgtagatcgaccacaaactcccttgacatgtccatgatatcaagagatttgagtcctttcaagagttgaatatctgaaggcatctcactcattgatgggaaggatccaagccataacttctcaagctgaggcagtgcatctctctctattttcatctccttcatttctttaaaatgtattactcttagatgtttcagtcttttaaaaccacctttctcaaaatgcaattcatctccaacatatgtctccaccatcctcaagtatgctaaattcggcaaccctttgaggtattttaatggctcttcggttaacctcgaaaaccaaagaactaaagcttgtaaattttgaagctttgaaatccattttggaagctgttgtagtcgacagaacaaagagagataacgtaagaaaggaggaggagatgaaagtgattttaaatctagaatttcttcttctgtcttggcatgtaagtgtaattcttctagttgactcattctctcaatggatgaacacagtgtttcagtactgattcctgatgtcaagtgttgaatccctaacttcttcaattttgtcaacttctctagttctttcactaactcaattgtgctaggagatattctcacagatgaaagtgtttgtaactcttctaaattcccaatccctttatgtattctcacaccaatatctgaatcaaatctgtaatctttctcataattaattaaaactccagctagaatgtgtcgcagacttcgaagcttataaatctcaattggtaagtcttgcgcatagaaggacttgttcagattcaacatctgtagattttgtaaattaccaatggattttggaataatcttcacatttgtcattcttaaattcaagtacttcagattgaacaaatttcctatctctttaggaagcttatgaagaggtgcattctcaaaatcaaacacctttaacaattgaaacttttgaaacaagctaattatgaaagattctgtcacttcatcaatgtcaaaaagaaaaatagatcgaatcttagaattgcttcctacaagatttagaacatcttttgttgtgttgtggattgcgaggcggcgacaatctcctttgaatcttaacttgctttgattgattatttggcagaaacacaattcttcacattttgttaaaataacatcatgaatcaaatcatgaactcgacactctttttcaattccatttactgtttcaaacgaaaccaagtttctatgaatgagctcattcaagtattcttcagcaacttcttcttctgtcttgcctttccttgatttgataaaattttcagcaatccaaagtgaatataacctcttgttataaattttactatcttctggaaaaataccaaaatataagaaacaagttttaagatagtagggtagatcatcatagctgaaagataaaatcttgaacacactagtaagttggggatttttttcaaactcgtaattgagattatcaaacactcttccccattccaatttggtcttttcttttttagagaataaaccagctacagcagaaatgacaagtggcaaaccgtgacatttgcttataatctgatgagacaattgctctaactcttttgggcaatgtccctcaaactcaaaacgaaatgcttttttgcaaaataactcccaagccaactccgaggaccatgttttgagctcttgaacatgatcaaagggggtatcttttgcatcataagcaattctagtattgcgagttgttacaatgatcctgtcacctttattattactactaggaagaacatgtttaatattcctccaaaagtctacctcccacacatcatcaaaaacaattacatacctctttgtctgcaaatgttgccgcaaaagctcaattagtccttcaatagtttccacatgctcttcttcgtttgttgggcatatctgacttttcatggtggttaagaccttctccaagttgtatgattgagacacagtgatccaagcaaagtattcaaagtgtgttctcacatttccagcagtgtaaacttttctagcaagagtagttttcccaattcctccttggcctacgagtgaaatcacagagcgggtggttggtccttcgagcaaactccttataagttcattggtggttgaatcaattctcacaaactcatcttcaccaataaacaacgaacccaatcgagggtcaatgacagatgcatccctatttgtgatcctactactacttgaaccttcctcaaaatgtctcaagccataacttatgcctctcttttgaacttttagcaaagactcgttaatgtctttaattttagaagctaagttacgacgtagtttgacggacccaatataaccagcagctcttcgaattgaaatgataagtccatggtgatggtgatggtgattatgagcaagatggtaaaggtactcgtcgataacatcttcaatgcgttcagccacttctctcatctgtttaagccattcttttgcagcatcactgagttcatctttggcaagtttcttttcggcatcaataagaaaaggctgaatgatcttcaactcatctttcaagctctctacttctttgtggactcctttcagcaaagttacttgctgattaagcagatcaagtaacttgtcaatcacagggctcaaaaacgtctctgccatttcatacaatctgagaaattgggtattcaaaacttcccatcataatttgtatggcattatataaatggagtagttcaaaagagacaagagttttcaaactccttttctccctaagtcataatatacggtctccccagctgttctgcaatgtatttataaaatataaaattttgtcgtttatagtggaagtagtgacctagtcttcaaagtagcattcaattatttaagggtatgtactaattaaatattgccttttctttttcgtggatacattctaggtgggtgatgtattattgtctgcatagttaaaatggaaaattttaaaaaaatactattttgttttatttataatattaccaattaaaattttcatttataagaatatacttttaaaattttaaaattactaagatatactttttccaagtaagaaaataatcataagaaaccaacaacaacaattataaataaattataaaacaactaaaaaattcaaaaataacttcattgcaattgtaatacaactatcatttctaatattgtgctgaatttattccagacaggtatgt

SEQ ID NO: 187330 - DNA, 1815 bp, Cannabis indica
tctgacatactttctagcttaggatcaagaagtgaagaagagaattattgtgaacttaggaaatattacgcaaactatcagagttatacttagtgactcaagtaattctagtgtaaataattggatgttaaaatacaaatttgttgttgagttaatttttaacataaacagtaattatatttatgttatattaaatgtgattatataattgaaagtgttttttttttttaaaaaatattacaatttaaatttaaattcacaacttatctctcttatcttttattttatattaaatatgaatatataatataaaatatttttaacattacaatttaatttaaatttatcctacatatctaaaaaaaatatatatttttattaaaagcattataccaagattaaattttagagaatttatattatatatttttttaattattttgtattgattttaataattattttttttcttcttatgtacattatagtatttttttagtcaattattttttatattgtgaacagatttcttttagttgtgatgttaattaactaaataataatataatttgactttaaatgataaattcgttaaatgatttacacaattttgagtttaaaaaaaggataaagatttaaaatttgaaatctggagatagtgtataaattactaattagtgtcaaaaaaaattaattagtattagcaaaaattatggcgatggtttatcatggtaattgttttgaaatgttaatgcaaacaacacacagcgctatcgagcagaaccacagtaggggtgacagtaacagtgataccaatattcagttcaagatcaatttcatctaccaaacaaagcatatcatcggctacggccatggccatatatgtaagaacaactcctccgacagaagaataatatcccacttcaaaatcaatgaaccagttgaagcgacagccccactcataaatcaatccacaatcttgactagtttcaccacatcctacttgcttttagaatccactctgtccagtattggacttgacgaatatccaactatcaaaatcagaattatagaaagtcttgctattcactgtcagaagttgatggacgaaggtagagtagtagttgaggagggaagattaattgttattcctgtaaccgtgaagattgataggtccatatatacttggatgtgtgaatgtagaaggtgtattctcaagtataataaaagaatactaaagtatcttgatcgttgcactgtggatggagagggaggtacttgtactgtgtgtttggacgagtttcaagtaggatcggaggtgttgcggatacctcattgtgcacatatttttcataaaaactgtattgttgcttggcttcaaaggagtcttacttgtcccgtttgtcgctctgaattagttcccgattgcatgctatcactccgctaattattcaataattatcatacaaaacatcaaatattagtaattagtaatattagtagtagtattggcaccattaataaaaatagctattaattaatagatttacgttgtctgatttacaatggatattaatctccgttttgttttcaaaattatttaatagaattactcttaattattatataagtttataaattttttaatttcatcgtcattatattaattaaaaattgtttataattaagaaatcattattgcctttaagattaattggaaactattaataatgtgtttttatatgagataattggatgagagattgaggaatgaggtatgtaaataacaattttactttaatgatcaacttatta

SEQ ID NO: 187331 - DNA, 3044 bp, Cannabis indica
cacacgactaacttttgggataacacaaggtaatgctcaaacttttgtggaagattgtgaagaactatctctttttgagttaaagaagaagatcaaggttcagtacttcttactactctgcaacagaatggaacaagggttatagtactaaaaggaaggagacattataatctactgcaacaattgcaaggcctcttgaactgttacatgtttatttatcgttgtaggattattcatatatgacattcaagtcgagtttcttaggacatgagaagaacatgaacttcttcgagcgataaggtatcactttgagaagttattctagaaacaacagggtcaaactccggaccaagaccattaaggagatgaagaatcacatcaagatcaatgatcgagtgtcaaacaatagctaaaaagttacagatagacttgatcttatcaatatagtcagaaatgctaaaggtacctttgtggatatgtctaagagctgacttttgagttgaagcaatattgctttggctgattaaagaacttatgttcaagggcatttcacataacatagaagatattgtaactcaaaacagtaccaagaatactacggtcatggacgatcaaagctatgagagaagaagttgatctttacaccgcaattgaaaaaacatagagttgttttcaccattgacaagcttaggaggtggagagatgtgactgagcaaaatctcgtctaggtcgtgacccatgacaatagagacaacttgggactttcaagaaaattagctcgatcgagcttaatggtaagagatgagaacagagaattagagaaaggattctattattgaacaacaggaacttgttgtgtggtttgattagcttgagatcgatgaccgcaattggagatgagttgtctatagaaaaagttattgatgtgggtctgagaggttctgatactatgaaaaaagatgatagagacaagaaattcagagtgaaaagcctccgaacaatactaaaaaaatcatagcattattaagaaggagaagcttttattcatagacatacccttacaacaaaaattcggttgtaacaaaattagttagggtaagtataagaagacaaataacagaaaagtaagcctaaaactaactatttttattaactaactatttagttttggttatcctttataaggacttatgtataccacttttgccattgggatggtatggagacaatggtttgtatctctattatatatttattataaagtaacactgatacagttgctcacccttttttgaggcttaggaggaatttgttgatatatatatatatattatccaagctaattagtttgtgtcttattaatgataattcccttgtatacttttaaaataaatacattgcaaaattaaatatatggtaagaaattagtgcgtcgtttataggtacaatatttatatatatacaggatatatgattttaaaagatataaagtaataaaagtcaaaacttcataaaattaaaaaattgtaagaaattattgtatattaaattcttcaatatattgtaaccgtatgcagttggcgttttcatcaatctgggtgtgattcagtatatatcctaacttcttttttttttctttcttatatatatatataaataaatatataaggtttctctttctttctaatcaaacaaaaatatatataataaagattctccatattattattcttaatcgcataaagaaagaatcatttaacggctacttgtttgtaaatagttgctttctaggcagcatcaaactatataaacatactatatatatatagatacatatgtatatataaattaaaataacccaatatacatatataataactaaattgtgtacgaactaaacttgttttaaattaattttattattataattaactatatatatatatatattgttttaacaaatttaatatataattacaccaaagtagtatttatatataaatataattacaaaatttttatcatgggttataattagtagctacttataggtgtaatataattttcacaaattactgcacacatgaataaagtggtcacacacacacacaacacaagtttctattttttagttttttttttattaaatttaatcatactaaatatatattcttatataatcaccgacctatatattaatgattttatttgatcatattatgtatacgtctatatatatatatatttatattggtatagagagcaaaaaaaattaattaaaatgaagatttttcgtcaaatattatcttattatttttttaattaacttaaaaaagacacaatgcgagttttatgtatgctttgtcgatctacattatatattaaaagaaaataatactatatagttcaagcactattattatttttattaattgcaatggtttttatatacatgcatttaattattaattaaagtaagaaatatagaatatatttcaaaaatgatattgtaggttcatttaccgaacaccaagattccataatctattataataaccatcaagatatgtatgaaatatattctattatatatatttgttgcgagaccaaattttaatatccatataagtggaataagaattttctacgtacatccacaaaatgatgtttttattattgtatatataatattctatttaatttaaattaatttattaagaccaacctatattatatcatatgcatgccatgactactagtaagattatatataatgataaaattattatagggtttttatcataacatacatacaccgaatatgatgttatacgttataataataagccggaaatacaaatataaaaatatcatttctcatatatatataattataacatcaatatgtaaatatgttttgttaataatggacgtgacaaagtctatcatgattcttcttctagactaattaatatggtataatagtgtttacatcatccactaattgatggaaattttatattgtcttattccatcaaaaaaaa

SEQ ID NO: 187332 - DNA, 4156 bp, Cannabis indica
tccaaatttaccttgaggtcaaatgttctgtcatgccattgacttgtggtagttgcttttcctcccgtagaaacttttgtctttcttcctcctttaaaggacttcggcgtggctgctaatggagattgggttttcggaggccttcctcttcttttcttctgccccaaatcagcattgacttgcctcgttatttcctttccttttctcttcgacgaactagctatcagttgttctgtggccccaggagagaagcttgcatttgctatttcttcaggggatagcatgggggtaggattcgaatgaactccattggcagagggggacgatttcatgtcttggttcgtttgggtagcactgttttgatctgggtcaggatgggggtttgggctgaataaaatgccatccaaagcctttctctttcttggcccatctagatgttcttggaccctaaagtcctctatgtcacaaatggggttaaaaagagtgggctctctatgatatttatcaatagttaaagctcccataattagctcacgggccttggggtcggcccaacactctttagatggccatttaacgaattgggcttgtgaacccaatagttcattgggttgcttataagattcccccaagttgttggctgagatatttgggaccacagggatgcatttgtttgaaggttcttttgtcttttcttcagccgtgtactctatttgggtattaggtttgttggatgcaatgtgatgcatattggtttcctctaaaatggaaacattcccatctgtccctttcgatttctcctgagctagcatggttggtgaagccacttctcctctgttgctgttcttcccgttggactgagttgcagcataaatctcagtcgcttcttgcaggtctaggatggagacagtttttgtattattaccaaatggggcaatctcaccaatacctgggagataaacaagaggcatatgggtaatgaccagctgggaactcggctcaccggagctctcatcttcgtcggagactattcttttcttccctgggagttgtcgcctacactccctaatttcagcagcttctccattctgaattgccttatggattttgatttggtttcgaagagtagagtcatggaataatttcttttgtaaaacccaatcttgaaaccattttgccaagggagataggaaggtggatttttcaattgaatcactcttcaaccagaccccaaacattgggtatatacttccattagcatccttgataatagttggggatttgaaacaagtgctctgatcgtgtgtgagtactccacacttgaagcacagtttaggtagacgttcatatttatattgtatccacaaatccttgagtcgttgacgccttaggaaaaaaccggagaaaatcgatttgttgatgtcgatcgttgccctgaatcgcagattgctcatactcacagcatcttcaacacctggagggagttcgtatactggtgaggctttggaagccaactcttttagattggaaaggttccaatagaaaggagggatactttcaatacgcacccatatcggggttttgtcaaaccttacttcagcaggggataaccatgccggccatggcattatgaccactaacgccccacaaacaaaccagggacgtcgagccagtacattcaaagcatcttctctgtttgcaaacgtaaattgtattatgccattctcaatttctttccatttccatccctttatggcattccatgagagtttgagagaaccttgtatagctgcttaggctgttaattacttccaaaaatgacacatatggattctccattggtccaactcattttttttttatttaattatgaattttaaaatagtcaaaaactaagcaacaataaattttaaaaaataaaaacttaatctaattaataaaaaagttataaaagcagattttcatattcaaatcactttaaaaacaaaacacaaaacctcaactacttatcaatgaaataaaaaaaagcaagaaaaattcaaaaatttataaacacaaattcaagatttaatttgtatatatacatagatggagagattataccaagaatttatagtcgaaaagaacatctagtgagccatatacagtaatattgaatatgttaagctcaattcatgactaaatgattgtaatattgtatatcttaatccataactagcaagcatgctaatgtgattcattaagtaagcccatacaaaaaaagcttcaagtttctaatttagaagaagacattaataagattatattgcttaataaataaaagttacttccaatttgtgagttatattgagattccactaatatacacaactttatacatattgaaatctttgattgtaagattatggtctaaacaattttgagagagtaacaacatgttacacacatttatcaattaatgaaagaatgataatttgacaattaagaggataatttgtgacctacattatgaattagcataagcaccatgaaagctatttgagttgttcaacttcaatcatattctaaatgaattttctatgctaaatttttatccaaaatttatgatttttagatcaataccttccattacaaccctggaatcataaaatgtcaagaaacatgaaaatttcccaaaggattatcttaaaatgaacaaaacactcaataaactcatatcaaaccctagttttgaccactcttatcttgacattgaatttctctcaaacccctcaaccaaatttcccaaaaaacattcattagaaagcttaagtcctaatctaaaacatatccgaaccccataaaaatatttaaacaaaatctcatgttataccaattagaaatcaagttaaaaacacaccccaaaagcttatccccatctctaacattacttcaaacccttatccacaccttcccacaagatacccttatggaccgttgataagcaaaagatccaaaggcccacatttaaactctcggtgtatagctgatccgtgtcacattaatttcaaccaatcagagctcaccatttcagtgacctttttattatataaatcatcctccttaactgtcgctttacgtaccaaaatatatctctcaactctctattttcaatcttaagtctcttctctttcttttctaaagatttcccattcgagtttccgacttgactcgctgagttgaatcatgacttccgaagctgttgttgatgtcgccgtgtcggtgccggagaaggcaaccaaggcctcgaagcccaagaaagctgtggcggcgaagaaagccaaatcgaccgcttctcatcctccattcgccgaggtatttaattcgtattaatcgccttttatacggttatcatttttttttttgttatttgttttagatctaatatgatttttcttattcagatgattaccgaagcgattgtgtctctaaaggaaagatctggttcaagccaatatgctattacgaaattcatcgaggagaaacataaccaattacctcagagtttcaagaagttggttctttcaaacctgaagaagcttgttgctgctgaaaagctcgtgaaggtcaagggctccttcaaggtttcatctgccaaatccgccacgcctaaagcttctgcaccggcgaagaagcccgctgctccgaagtcaaaggctgccaagcctaagtctaaagcagctgcggccaagccaaaggccaaaaccgccgccaagccaaaagcagccaaggttgtcgcaaaaccaaagactgttgcaaagccaaaagccgctacgaaacccaaaccaaaggccaaagccaagccagcggctaagcctgttaaagccggagcccgatcatcgactagaacggcaccgtcaaaggcagccaagccagtagctaaggcaaagaaggccgtccctgtgaagaagccaaagagcgttaagaagtctccggcgaagaaagctaagaagtgagaagcgtcattaatggtggacgatagaatttgaattatgtaggggattttattgtggttgtctttgtaaattagttgcttattcgtgtttagtaatataatatttagttttttaattttagatacacgagatgtatgtctctttttctttgtttttttttt

SEQ ID NO: 187333 - DNA, 1702 bp, Cannabis indica
aaaaaaaaatattattatacactttgtaattaactacttttttttctcttcaataagaaaaattatactattttattaacatgatattgaataaaattgaaaaggaaatgataattttttagtttgattagttagtggtgattttgatgcctatattgggaggttgaataaagtggtaataaataataaatacgtattattagttagttgattatagaataacacgttctttaattcttaatatgatttcctttttaaaaaattaaaataaaataagatgtactttaacggtttgacggagttttgttttttcattttaatatttacgttatttgaatattcgaatgtttttacaaaactcatgaaaagctgacacagaattttgtcagaggttaccataagcccacttacaaaacgacatttgtctaactcatccaatttatattattttttcaggtatactaaatatttttgaggaaaaaatatacgtgagaaattaaaaacattgtttagttttgcatttattttaaaaataatgtacattttttgttaaattaaaaaaaaaatcatgatgatgaggactagagaaattataagcaaataattggagtaggaggaggatctcatttaaggaattccccaatcccatgcgaagtggcaacattattgattttttatttttttgacacaaaaacattattgattatttcacctaacctttggaaatagttaggggattttaacttaatgtttatatatatataaaaaatccaaataatttattgctcagattataaaaaaattcatcagtaaaagtaaatatagacaacaacacacaaacatctgagactgtgtctgaccagttttatttgccaaagcactaaacaaaaatatacgttcatatgttttggattaaaaaataaaaagaaaaaagaaatatttcttcatataaacaatttaatttagtgtgaatagggatacaattaaaagtaatgacgcgtttcttccttataacagttattaacaataatcaactatacaaatgaaacagctaatgcataggtttttttcaactagtaaaacagctaacgtatagaatttttactagtgaaacagctaatgtattttctgtgataaatgataatcctgattttctgatttttttttttatataaaaaaaaactagtgtataataattttaattatatttgaagaaaatgaaaacagagaaagggcaataaagtaaattcagggagtgtgaagttgtacaggagagaaggggggttcctaatttttattgtattattttggcttaacttaaagcttttgtccttatgttcacttaactactaactccactttgaactttcttctctttttctcgtgaaatttttcataaatgtgctcgtgagagatcaacccaaccgattactttatttttgggggtaaaattttaaaataaataaaatggataacaactgattaccgattacaccggtttctcatagtcaacttttaaagttaattttttttttttttttttgtaaaattgaaaaaaaagtagtatatggttatgtaaatttgttaatacatcttttaggtgagctttattctaagccttaacttgtggatgtgaacgagaattggattcaaaaaagggtaatgcaataaaaagcctaaaaagggggtttcatgaaagaga

SEQ ID NO: 187334 - DNA, 628 bp, Cannabis indica
atatatagtgtagagatgatagtagtgtacgtaccataacgcgatggaaccatacgaaatcgctgaacgatatcataaactgagccataaattgcaaccatgttggggtacttaataggaatgtctttgaccaaactttccaaacctttgttgtaatccttcaccattttgttcatcttcccataacatttcttggtggggccacctatgagcactcgggcgggcacacaccccactggccctagtgaaagcagtccaatccgacgagccccgagtttgtaaagttgttcaactaacttaccaacctcagtcaacattgtttggatgaacacttctggcttctgtgatgagttatcaaattgtaagaagtagccgtagatgtcgttggatcctgactccaagaagaataacgagttttttatgctcttttcgtctgtgtggttttgttccactaccattttgaattgttgtagttgaacttggagtgaggtgactccctgcgtttcatcaaatttatgtcgttaattttctacttataatagatataaatatatatacatacatactacataattattacactatattgtattacactgtatgtatgaataatttcttcgtttcaact

SEQ ID NO: 187335 - DNA, 5188 bp, Cannabis indica
acacacacacacacatatacataggatcaaccattggtcagagaaactacagcataactagtacctcaatgtcgaatttcagattcattttcaagtttggcatcgaataaatttcagcaagtaatccaagaattcccatagtccagggattgggaggttgatatgctagactgacattgcatggttccaggacctgcaagtggcggaacattagccctacatcacctaactcagaacggcaggcatgattagtataaagtatatatttatagttatatacctttgatgtgaatggtattacagcaatcatcaagcccttctcatatgcctgtggagacaatgaacatgagcaaaataaccaaaaagaataaaacaaaacaggaggagagtaatgagggcacacagaaaggaaaatagctgacaaaattagtacctctataatcaaggatttgggatctatttcccgagcccgtaaaacttggtttcttccaattgtcaactttccaagccagcttcctaaattttttaataatgaacgctcttctgaacttgattttattagctctgaccccaaaagaacctaaattgcgcaaaaatgttaaagtccaacgcatcaaatcaaatataaaaacacaaaatgctcaatattaaacttgtcagacataaccttgcagttctcataagtggcctgaataatctctttattcaaggcctttgcatttactttgtccaggaatttcaagtacaaatcatgaaaatttggctcaatacttgccctgtaaaaatagtttcaggagatttaatgaacttttgaacataatataattgaagttcaactgctagaatcaactgatcacaaaagtaccagggctttatttcacatatcataatatgttttatactaaaacaataataagactcttggacaagaaagattcttcttctattgttttaaatgtgtaatgagctcacaaattgaagaccctaactagttttttgactaactggtatgttcgaaaaactccaaaaattaattactttgtgctaagtgatacctaaatatatttaacagagcacatgtatacatataccatgtctaaataacataatttttttacaatgcatggcatttcaaaaagtctaaccttttcataaccatgtattgtgcaaaccatggatagtgctgctctttcaatatgtcaatgaattcctttgatttagcttcaagattagcagaagaaatattattaattataaacgagatcttgtcctgaacctctgatgctggagcctgttaacagaacatgggagtttatttcagatcaagaaaacataaagtaacaaaacaaaatagactcatgatttcctttctcccaaggcagttgatgggtctgcacatctgccatacaaaggtatgcaatacatttctaacattgaaatttcaatttcttcaaagagccaaaatttattggaacatgtatatttttaacaaattatatattgaagctaaaatgcattcaatgataggagtttcaatataatcttaaggaaatggatgctgaaagctatattaggtaagttcaaaaagaatatctgtgcaacagaatatgaccctactattataataaactgtaataaaattaaatacctctataggagtatcccttttctccgcagcagcaactaatgtttcaatgttcagagctgacccaaaccctgtatgatacgatgtttaaaaaggcacccacactcaaagaaggaatacaagaaatgaaaaaagaggggaaattacttgtggaaggaactcctcttgtagaacgaacaaatccttgggtagaagaaagcattgccggagaactagttgcactatgtaactgcagtttttcagtaacataacacttaggttggacattagattactacatgaagacaagagcatgtactaaatatttttgaataatcaaagcttactttctgagcactactagcttcaccaataggagcacctggtgtttgcacgacagaagataaaggtggtttgtcattggatgaagccacagggaccttatgacgctcatcaaaagagctatcatgtctctgttgaagctgcagagaagaagagagttgctgcccagagtgcatggtaccagggacattcaactgcaactaaccaaaattgtgttaggcaatcattccatctaatgttttctaaaatgtgtttttaaatttccatttcaacaaacagtagcaatagaactgaagtgtggttgtactgcaaaacataaattaaaaaaatgatgcattgactggcatgctagcttaaaaataagatgcgtcaaaaggaatctgtctatagtgccacaagagtgttatctatattatgattatatattcataccaatattgactagacacgccttataataattaatactaaagtaatagtgatagtgaaatatgtggagcacaaaccagctagtagcatgagcttggtgatggaaacctaaaaaaattagtgcatgaagcatttctcacgttcaaaccatgtcagtaaacagaaagtcattatgctacaatgaagtaatgcacacttgagaagaaaagcatagtatctaatggaagagaaaaaaaaaaagatggcaaccatggctttcgtcctctctctacccatttagccaaattatattgcatcacacaagacaagaaataggaatcacgacttacatccatatgtcctgatgccacttgatatgggccatggtgatgagcagaagaagcctggttgcccccttcagagtctgaatgacctgatgaaatcctagctagagcttgttcaatgaaagtaactagctctaaatgagtactacgtagatgggaaatttgtaatatatggttgcagtattgcggccactctataaggcgatccacaaactgctccaaagccttggtaccaaacacaaacatctgcatgtcaagagagggaaaagagcataagcaaaaataaaataccaagtgaatgaaagaaattcaataatagatacaaacttttgaatcagcaggtttgcgcaatgcatccagaacaccgcgtagagcaatcccaagtggaagatgagttacaagttgatgcttgataacagaacctaggatatacaccaacaccagagtatacaaaatttaaatcaattcaaagacatagttgccataaaatcaatgaaattaaaatatgattggcttcatcagagtaaaccacaataagggtatgcacataatgtatatcgatatgaaagacaaagaaccaatgaaaacgaatgcaatcagcttgagtgcataattcagatacgttaatttaattgactttataagatcatgctctagagatcaaatgtaaagataagagtaattcagatatgttaatctaacagtcaattatttaggaagtattaatgctacatcttttcttcaaagaaatttgatgattgaatgcaatgcatcattacaaaagcatttgaataactaactaaataagatcatgctctagagatcaaatgtaaagataaagtaagtaaaatgccaaactgatccattattgctatttcagccactaaaaaacaatgctatctatcagcacaggaagaaattactatctataagcatcaaccttatactttaaaatcaaaatgaatgacaagaaacagtcatttaccataaacaccagaaaaattatatgaaatccataaaaatgctacaaactcaccaaaaagaatggctgcaatcttcaattgcttttcgggatactttggaaagaacatgtactcctcaaacagatttgcaatcatgcactcaaaaattaagttcttcctgtaagtttgtgcaacaatgtcatctattacttctcaagatatatacatgaacattagtaagtgatatcaacatatcaggacatctataaacaaaaagattctctaacaaatggtcacaatcaaaacataaaacatgtgccaaacaggaaaaatatctggcatcatattttcttgaagtttttgttgtttacatcaatgccgcacaacttggaatcaatgtaaaattgaaagataagtgatgattcctcctcaagaacaagcaaaaacattcataattaaaaggtttgcaatatgaagaacgcaaacaacataattatttatatgtctgcccaaggcacaataaaacacccatcacatggtcacaatactttaacatcaaagatgaaataaaataatcataatgttatgatttcaaaagcttataaacaacaaaagtcaatttttgataatatcaaaagttttaactagtatggaattaattcaatcggttcaaaaactgtacctatttacagatgattctttgaagcgggccaacatctgcaccatttcagcaatggtcaaattaccagaaaacatctgatggaagtaagagttggcttcagcttcaatgtcatctgcatatccatcagttgatgaatcagcagttccaccattttgaagtcttggattagagtcaacaattgatacatccaacctttccaattcctcagaaagttggctagaagtaatcaatccagtatgagatttaagggcctattgtcaaaaatcaaaaacaaagaaattacataattacagtgaagaataaagtagtacaaaaaagttgtatcccaattgcagtaccttcaaaaaggtactagtagcatccgcataaagattggagatggcaccagaatgttggaaaggtcgggtggaaaaatcatgtgatccaccaaattggatctcctttaagaacttgaggcactcctacaaagtttaagtacaattagctcatgatacacaatacttttttatacatataaaagaacaaaacaaaatcattatttcctcatttagtgtgcaaagagtaacccagataacagccaatcaaatcttacctcaaagaaaatatctttatacgtattcaaattaccactcagccaattttcaaggtctacaagctccttttagaagcaagggcagccaacttgatactaaatgaagaaggagtcatatctagcacaggtgacaatatctgcaagccaaaatatatgcaccaacatatatgaaggagaaaaaccataaaaatcagcatactgacgaaacaacatttaaaaaaaaaattaactagg

SEQ ID NO: 187336 - DNA, 1334 bp, Cannabis indica
ataataataaaatggtaaatagcttttttttttgaaatagatagtaaataatattgtagacattgagtattacaaaatttacacattcaacaaccaattttattaaataataaaatacataacaaatattttctaaaattctaaaataaaattcttaacacgaataaatatataatataatcaattttatcgtaacacttataaattatattattattaagttttatattaataaaaaattaatctaatacttatttataccattttaaaaatacaaaatctattttatcatttaacaaaataaaaaatttaattaataatttttacaaaactcataaaccaattacccatagtaaaaacctagaactctaaatttgataatatataattttttacttaaaaacgaggaaggatccaacattttagggaggcgagtgccaacattatcattacactcaaaaatatgagcaaatacacggtatctatatcacaacaacaagtcacaccccactaacatattattattataataaaaaaaaaatggtaaaaatttcaaaaaaaaaaaaaaaaataaaataaaagaaaagaaaaaacagagaagacgagcttacggttgattcagaggtgtaagtgctgggatttcaattttttgagacgaagacgaagaaagagacaagcgagttgtggtgtactctactagattatatgatttgtccagaagagaaagcaactgggttcatgtctttctgagctaatttcctctttatctcttactttaatggaggatttcataagaggctaaagtataataactaatgattacacaggatatgggtcatcatcaccaacacaataccagcgatggcgtttctcagcgagttaatagcccgagattctcaggtccaatgactcgccgtgcccattcgtttaagcgcaatactagtaacaactcacagaacagtaatatcatcaacaacggcggtagtagtattggcaacaatggaggtagcggtcatgttaataacggaagtgggttaagtccacatcatgagattgagctgcaactcacctcacccagatctgaaatcggcagtaacacggtttctgtagatgggtttgactcggttttggaaaggaggttgcctcactatgtgaaccagagatttcatgttgggggtgttaagggactattgaggaagcccattggatcggtggttgcggatttggggttgaaggaaaggaagaagcttgggcattggatgttcttggtgttctgtggtatgtgcttgtttcttggcgttttcaagatttgtgctactgggtggtttggatct

SEQ ID NO: 187337 - DNA, 6423 bp, Cannabis indica
tgcctcaatcaagaaatcaaaggtggatatggaaagttttgtgaaattgaaggaagaagaaatgtggtctaaattggaagagcttgaattgttggagatacatgtcaaagatatctttaaagaggcagagttgaaagtgaagagtgtatcttctgcccaaaaatatttacaagaacaaatgagtaaacaccaacaaaaagagttggaatttgacaaaaaagttgatgaatttaaacaaaatctgcaacagttggagttagaaaaatcagcatggttggctgagaaagacaaacacaaaaacaatatgtttgtaaggattgaagaacaaggtaaattgtgtgttgtttgtactagttattgagtatttgctgcctaacttaatgaagagtctaattatcattgtttgttggtctcttcagatgtggaagtaactattcaaaacctcattgaaatagaggaggttattcatgctgttactctcatttgtgaactcaaattaactcacaagttttcgcccatgccactactgcttgattacatcaaccatgctgagaatcaaacctccattgtttgtggaggagagagatcaaacaaagacaaggtatatatgatgaaacttagtctgttacaaatatagtttcttattatatatccattctttttctttgtatgtatgacagattaaagccactaagaaagaaatagctctattgaaagtagtgaagaagtgtgttcaaaattgcaatctccaatcagttttcccaagactcgaattctaccaactgggtgagcgccttatccgtttggaagggaagcttaaactatataaccatgatgaaccctccagaaaaagaaaaggccaccattcaaacgttagccaacggattaaaatcaagtatcctcagaaatatgatatagctaggttgtgctgagtgacattgcttaatgcttttaataaaaaaacagaacacaaatgacattgggtgttctataatgcttcatcaaaccatgtttgttttgcttaatcacatggtttaattactatagtgctaattaatatgaatgtaattaattatccatgaacatgatgatgactatagttctatttatttttcttattattagactgaagtatggtaatattgaaacaaggcaatggagcagcctaaaaaaaatcctaaaacagatgagaaataaaatctaatgcatcaaagtaaacacaccaaattttacttggttcattagacaaaagacaatgtgtctttgctacctaatccaaggtgatacaacagcctttaatggctgagaatctttattccaaaaccaggtgacacaacaactcaaaatgagagattcaagatcaaagaaaaataaaacagaattaaagaaaggacattagtccacctcaacaatatgaaaatccaaaagaattggaacacaaatttaggtattattccacctcagcaatatcagcctatttttgtaaatatattgataaaagttgtatggtattgtaattttacttaaaaaaaaattttgcatggttctaatgaaattgatattaataaacaaattgggatcttcaatttctatattggagattccaatgtcagtttccctcttcttcctcgtttgactttaactctcatctcatggtagttacagttgcagagccagaaaaatgagagctttcaccactacaactacaattacaagagaaggactcctcttccttctctttcttcttgtaaccaatctttctctctccgaatgttcaccccattgcaaagcctggctcgtccagtcaatcccaaccgatatgccacacctccatcgtgtacctggagtcctctctactggtaaagatcctatttttccttgtttgtttcccgagaaacttaataagaaattaaaaagttcattgctttaatatttatatatatatatatggtctggtttatggatggattaggagacgtattccaatggcttgctgggaattcaactcatcgattggacataatcgcacagtattggcagctgattgcttctcctaaaaatcctaagtcaggggattatggatactccaaaaaggatttacagagatttggtgctaagcaaggtgctgatgtttataaagctttagataaagctgctaatagaaatgttagtatcaggtatgtgatgtgaatgtgagtgtaattaattattgattaattaattaattaagtaattaataattaatgttaatttgatattttattaggttactatctcactcgggagtatatcctgagtttaccaaagaaccaacggagcttgcttcaggaagaccaaacgtaaagactgtaactttattacttgatcaatggtggggttcaggtatagttcatgctaaagtatggatttcagatcgtcgagatgtttatattggatctgcaaataatgactggaaatctttaactcaggtatacaaaacttgcttaatttgtcataacccgtcatttaatgaataggttattattgattttgcacctttcaattaagatcacttggtttgaaaataaccattttattttgtcttgaatgaaaaggagtatttttgaattgggtggctccctgaattcaaataacgtgtgtctgtggattttgtattactacagttgatacaataatttagcaagatagatagggactcattatttgcactctttcaagttcaaattgattattacatgtgtttttcttctaacatggctcgagtagttctataagtttatttggtccaaaaaaaaaagcttcttatgcaagcttcctttatagcagaatgtccatttgttgtctttaaagaaaaggcgaattgggttttcttttctcccccgaactttgacatgtaccaaattgtgcctctcgaaactattgaaattgttcgattcaaggattttagtacaattacgttcaattttactaacgtgacgcttgtctatgtacccaatcgtgtccctcgaaaattctgtctacgtcaggcacccattagtaaaatcgaacggatgtgcttgaatttaacaatctcaataattttggagagagtatttaacaactttaaaaattcggagaagaaaaacgctaattagcctaaagaaaacgagtattgtggaattgagctgtcagcgaattcgaatgactttaatctgtagtttctgtactaacaattgatagattctcattccaagttgagacttcatgacaaaatgaaggtcagtcctttttgtgtaaaaagtttaatattagcctgcactgtttctctaatttgaccttttgttataattgatactgaatttataggaaacttcgtctaactgtttgtctagatgttggattttagctaaaccatgttgaacatcaataataggtgaaagaagttggaatttatcttgttggctgttcaagaatagccaaaaaggtagaagcctattttaacaacctatggacactttcagctctcaattcttcacatcttaccagaaccatatcggatcaacagtggcagattaaccgaaaagtgccttgttggtcacatttcatcgaaacagacagcaggtgtaggtgggtgtgtattaactgttttgaaaatttaaatggaaaattagtaaccccttatgattgtcaaaagcttagtaatgttttggattgaatttgttgtgttgtgtggcagggaaccttttccaccagttgtgaaaattcctcatgtagtgggatatcccatcatatcagatcctgtcttgtttaaattaccaattcaaactcctggaaataactattcaacttctgagcttcagtccagctatctctctttctcccctccagaggtaataaagcaaatatctaaatattatttgatatacataaagttaaatattttcatgttgtacttttcattaagattggaaaatttatcctttttttttctttttttgaataaataagatttcttttctctgaactatgaccctggtaaagttttgtacccttaaattgttgcaaatatctcccttcagattcattctgctcattttttaaacgatttgtttatgtggtcgttgcagtacgagagtctatttaacaactttaaactacctgaaattcagtttattgatagttaagcatgcaaacattagctctaaaaatatatatacatattccaataagttattattatactgctatttatgcatttagtatttatctgcactctcagattaacaacacattagtgctacttcacaaaattagcagaatttaataagaggagatatttgcaacgattttgataatgaaagaatttttacaacagaaaaataagttgggaaaaaattctatttttttccatgtagaaacaaaacttataatttatgcttgaaaaataaaacactagtcttacaagtcaattaacaaaatgagtaacttccaaaattctgaaaagttccaagtaaatattcaactgtatttggagtgtttttaattttatactattttcgaatagcaggtatcatttggcaggtaccaggctgatgagcaggcatggttagaaactatcaaatctgttagtaacagagccactttgaggataagtaccatggattggcttggccaatctcaatatacaaagcaaacagtttactggtcatctctttcctctgcagtatctgaggtaaaattccactagtgtatattctgtctactcctctcatgatctcaccatagttttgttttgtttatatctataatggttgacaggttgtgttctcaaagcaagcaaaagtgaagatattggtggcatactgggatcatttcatcaacaacacagaccaatatctcaagtcactcctctactccaatgtactatgttcttcatcaaaatacaataaatgtcatgggaaagttgagatcaaatactacatggttcctggtttcaacttgacaggaccagccattagtcatgggaaaaagactggaaatgtttaccctggttataccagggtgaaccatggaaagtatgctgtaagtgatgtacgagctcatatcggaacaagcaatctagtgtgggattatttttacacaactgcaggagtgagctttggcactaataacactgcccttgtttctcaattacaacatatctttgatgctgattggaattccccatatgcaattcctattgaagagttggaagatggtctttcatgttcaagttaatgtcttactatcccagctttctttttcagcacttcacctctgcttggcccacttctaattatgtacaattattagttcaaggaaagtacagcttttaaataaagtttatctaagcaaattataagttatatataatatatatagggagtctgtgctaaagattgtcgtctctaatacgatgatcgtagaatattttaattcttatatattttatgacgatattcattgttgtaatagtggacttcctctaaatttttaaaaaattctaaatattttacagtactgaaaacatatttcaaaatgtttgctgcacgcatttataaaaacaaaacacaaaaaagagcacgcgtgcaatgcttcccttcgtgggaatcatgagcccttagcagctcttgccctaccaatttaccagctaaaatataatctcttatttctaaaatatcacccttgttattgcattttctacaaccagtagcaactagcaaaaaaagacacttcaccatataacatgaaaaatgagcttttgttgttatgttggcgcagtttttcgtcagctaaaaaatagagaaacgacatttaagaatttttttttatatggtttctcgacttctaataaagtctagtacacaagtcaatgtattcactgtgaagaacttgcaatggaggtcaaaattctcttatggttacaatttgggcagagcttaggcggagttgattgtgattaacctagaaaaggccatgcctcctatgacagtggacaaagtaaagtaatggtgtcttcactgtggaattgcagtgtcagagttgagtgagcgcacacaaacacacactggaatggtactgcttgcattgttatctttgacctaggtaagtattagaagggagtgtgtctttgtactttgcaagaggtctcccagggatgagacacaagttggagtaaaaaaatagataaaaaaaaacacctttcttttaagttgaagtttaagaaaggaagattcaaaagaagattttgtcctctttgcatgatttttcaggttttaagaatctctgttgtgtttgtggatgttgcggtcagggattcgattgctttcagataataatttggtagaaggtttaactgcgaagtttcgtgtttcttctcctcttgaggcagaggcgtttgaactg

SEQ ID NO: 187338 - DNA, 7250 bp, Cannabis indica
tggatttacaaggtgtatttttatcagggtctgaatgctattttggatcatcgagcggaggtgtttatcccagagcttggtcttacattcaagtgtccatcatcctttagaatctttgcgtgtcaaaatccttcttatcaagggtgtggcagaaagggccttcctaaatcttttctcaaccgttttactaaggtaccttttataagcttagcgttgaatttaagttgtcattaagcgcatgcttagcaattcactggttataaatgatctgtctcttgtttcaggtttatgttgatgagttggttgaagaagactacgattcaatctgtagtttacgttttccaaatatacctagttcactgcttaaaaatttgattttatttaataaacggttgtatgaggacaccatgttgcatcataaatttgctcaggaaggttctccttgggagttcaatctacgagatgtgttccgatcatgtgaaattatatatggtttgaatgccctcccctattattttttttgggataagttatttgtttctagacgataatctttgttctaagattcttgattctcattttcctttttccaattaggtgcaccggacaagtcaaaagagtattgcttccttaacactgtttaccttcaaagaatgcgcacagaagacgaccgcagacaagtgctacatctatacgaggagattttcaaagtaaagccatatataaatccttcgccacgagtccaactcaattcacaatacttgatagttggcaatacttccattgaaaggaagggtgttcagtcatctaaagtttctagtgattcactaaaagttttgccagcagttcgtcaaagtttggaagctgtggcacaatgtatgaagcatcaatggctgtgtattttagttggcccaacgtcatccggtaagacctccttgattaggttgctagcagagctcactggcaatgtactaaatgaattacatctatcatctggtacggatatctctgaaatacttggatgttttgagcaatataatgccatccggaattttcgctttgttgttagtctagtagagtgctatatgaatgaatattgcggttcaagcttggagtacttgcagaatactttaataagtgaaggggggtttatctccaaatggttttttttcttagccagtataaatcatgacgttttgtcatgctttacttctagtattgaggaagatagaaaaaggcttgccaattctcttactctgctggatgagattatagaacaactcaaattggttatggaagaaagcgctctatcactatcctggtctagcagagaacttgacagagccacaaggatagtttccaagttacgagagtgtcttcagaaaaggttgttttcagcaaaatttgaatgggtttctgggcagctagtgaaggcgatagaccgtggagagtggattgtacttgagaatgcgaattgttgtaatccaacggtacttcttttcttcttttctcttacattcatctgtaatatatattgcattatgaaatgtttttctgtacataactataataacttactaagtcatctttttctttccatggaatattctgtataggttcttgataggataaactccttggttgagccattgggatcgattacaatcaatgagtgtggtattgttgatggcaaaccagttattctccatccccaccctaactttcgtatgttcctcacggttaatccaacttacggtgaagtttctcgagctatgcgaaacagaggaattgaaatatttttgatgcagccttgttggctacccgatcaatccattggttttggttgtgatgaatttgaacttaaagatgtacacagattcctttccttgtctggtattcccactgaaagtttggtgcaagtaatggccaaatcacacctttatgctagaaaggaaggcttacgcttcaatatttcaataacatatcttgagctttcccgttgggtccagttgtttcagcaacttttaatggatggtaatcagcctatctggagccttcagttgagttgggagtatgtttatatatcatcacttggtgaggctaatgggaatattgtttgtcatgcaaaagatacttacttatctattgctggattttctgactcttccttgttggattcacctctgtgtgtgcctggaggatggccaatgcctctgaagttgagagattttgttttgtacccaagagaaagtaccgtaaagcaaaattgcatgtatctttccttcttggcagctcagtatttgtcatgcaaagtaagagaggaaggctgtgctttgtaccagaattcaactgctagtgactatggagaacctgtcctgatggatgtgaagaagctacatcaaattatgttaccttgtgatccaaatttgactacttcaagctctagcagttctgatgttgaattggccaaatcaaagttgttgtttgctgccgaatgggtaatagaacagtccaatgaggatgatctaaggttgtatcttctatggtttagaacgtttagctctcggtgccatgtcttatctgagttctctaatttagttgaaggggttatgaagcatcctatttggaagtatatggtcgactgctaccttaagtgtactccatatctaatagatgatgttgaaaagtttccaacaccaattctatcaactgagttggttgatgaggtcttgccaagtagtgaaaacacaaagttcctgtgtaatgctattaaatgtgtgggtcctttgaagcttacctatagacagctaggtgatgagtgcaaaaactttgacaacaaggtaattcgtggtttcaagccattactggaattactgcggagttttgaggaggacttcctcaagaagcttgttgatccatctttcatgcttgttgagtctccatcatttgatattcttattcaaatgttttctaatgttctggagaaccacatagatttctggaataatattgaaaaatattcaagtaatggagaaaggtcaaagaacactgaagaagacatgggaaagctgctaatttcttggcgtttgttgctgagaaatgctgcaaaattgaaaggaatttgttcagaagcatttaatcggttgctggtaagttgtgtttttcttctctttctctttctgtaatggaatgagagcttgatcagtttattttcttttccgtaggacgagagtaagaagctggaaaaggtttattcttggcgatttcattcagagaaatccttattgtgggtttatggtggtcatccaaatttgccgtcatctgctcttttatttgcgaagcagcaagagcttctgaaattttgcgagtcatgctggccaacagagacaaggtcgttaagggaaagatcattaaaaccaggtaagctatattttaagttatgtttacttttcttactatctaaaataaataatatgcttcaaagttttctgggttgatggttatttttcagtggatcatcgttggattgaaactgttgcatcatcgaattccacacttcgtttccttgtaatggaaggtagattttgttttttttaccaattttttttttggccttttagtttggtgtttaatgttctcaatctttttatgggtgaatgtttcttatcttttacagcacattgtaataattattattattttatttgtaacattttaatttctaggtgtttccatgttgtactgttatgaggaggagctccatgttgtcatgcatctggatgaaatgtctgaggtgagttcccttcatttcgtagcagtaaaagctgtgcagcttcttttgctgcaagtttcgcatttgaaaaaaaaagggtttctttcttcttttaactaacacatataggtgcaatgtatacttagtttatgcaaaagcttgggaaatggtttgaacaagcaaaatcaaatttagagaagcacttgcagcataacaagcttgatgtttctggagcaaattcatctactttttgttcattctccaatgagatattgtgtcaaaaatccggttttgatagctggcggtgcactcttccttttgttgacactacaagcttctacttggatatggagctgcttcaggagctatcatccgcccatttggctgattcaagggagttacagctggtaaaggtctacttaatgtttattttttattttctgtttcattgtttatcatatgggtagtaagtttctcatactcccatatcttttgttttatttctcttattaataatacaagtcctgctgtattgattaaaaaaataattttattagttttacctaggtggagtaatgggttcttgtgatccttaattatttgaaagctacgagacatctttgatatttttttctgatatttttatcatttcatgttgattcataatgattttttcctggtgaaatttattcctaattttaactgagtaatattgtctcttgtactcgtatttctccatgttaaatttatcatttataatctgtggtattatgagtatttccaactattttatgcatttcatcacaacttgatttagttccaagtgacacgctgacttagtatcagaatagagtacattacaattctgttggaaaattatctgcatgttgctgaaagatataaactaatttatctgtcattttagctatcttttcagtctgtgttagccatctgtcagtttataaatctaacagttattagatagttcccaagtgtggtagtcgtgttaagtggaagatggtgggcaggagctttatgcttgcattcaccccctgttaactctagaacatattgtactatttgatcttaagatgaaatatgttttaccatttttgaatcttgtagtaggttgctcaaaatgtaaattcttgtaatgttgatttcagtttattgttacctgcagcagctctttaagcaatggtgtttgtatttcatttttttaaatgttgtttttttttgtcaggattggactagcgtatctaatcgcctgaaggctaccttgaacttttcgttagtcttctcatcaaggcccccgcaaatgtttttgccacatcaaaaaatgttatcaatacttgatacatggacctcagttgatgcaggtcaatgcatttctattctaagttttcctatatccatctttatgttctaacacctgaaattgatttgcagttaatgcaaaggttgcgacctttgtgcttgagatgtggtttaggtggcatcagtttttatggatttattgcccgatttctatcaaggtatgagtagctagatgtattctgtgtctcctataggaattttattttcgttatctcattaaggggatgggaatgagttaataatttgtgtattatgatttgttgttgtgatgcaggagttttcatctcaaggaattccagttcccgattctttccaaacagaagatattccaatacccgatgcttcccagaaaaaatgtatttcgttgcctgagatgctgtttcagcctgtaatgatgaatacagttttccaaatattgtaagatattttcttaatgtaaaaatgctctctagtcaagtttagatgttggatgaagaaaatatattgttgggttaggcaatgatctagtttagaaaataacaataaaaagttaagatgaagaaaagaacctctatgtaatgtcattacaagcactgtcatgtttttgtgagaagtatagcatctgtatgaactttatgctgttagttactatatatatgttcttatttggtttcttaaatataaatgttgatattttgtttgatattctcttttggttcaggcaaagtaccacggctatcaaagattatttttcgggctctttaaagctcaaagttgcatcatgtaatctctggcgaagccttttacctggatcggacttgcctacttttcttttatctgctgttcgagatctttttgagcaggttgttatgcttttgtgtttaaaatagatttactgttccttactcttatttttttaagttttgttgtgtgttatttatttatttattttttcttttgtatagattatagttgcacaccagaaagcttttgatgctgttgttttcgaacaaataaagtctaatctctgtgatctccgaacaagtatgattgaggtaaggattcaaacatgtggatttcattcttgtggataatgccatgcagtttgaagttgaatgtgtaatggaagctattttgattctttttaatctagtgtaatctaggcatggtagctaattttgctttgattgaaaggggtataaataagtaataatgggcgtgaagtcatactaataattatccacgaggagtagattgagttgtttgatgccttgagatgtggcgttcatttcattattgacacctggtcgcaagtagatttatttttatcatctaaaactgaacgtgcaaagtagttttttaaactagagatagaccaattatagtttttatgtttattatttgtttcattttatttgtttttgtgttttgggtggaaaataatcaagttgttggctgtgttttggctaaagattgttaatgttgtcactgcatttttccgttctatttttttctttttttgaatattggaagtccccgatgtaattttctgtccatagttttgtacttctttcttttcagtgttgtaggtgtgagagtagcttttgatgtttcactttgctggtcattttggttctaattattctttagttacttaaataaattagtcaccaccaggaactagtatcattctcctgctctcttaatttatttcttattcttccttacatattaaggggttgctgctaaagtacttatgtcttggttaatgatatatgcatttcattgtactctgaagaatttactgcctttttgatttattgatatctggtctacttatttacttctatacactgtacttttctctggtgtgatagaatggaagtctgaagcttgaaaagctccagtccctcagatcccttattctgtcttcaagccataatgggctgaaaatgtcattggagaagtttattgcaccactgctcatggagctatatcgtgattgcttatccactggtgattatatttttattatctttacagtttgaaattgtggctttatggttgtcatagtattttctatttgccttgttgaaaaatgagtgcttaatccttttttttt

SEQ ID NO: 187339 - DNA, 2603 bp, Cannabis indica
cttgtaattgaacacctattataacaaaaaaaaaaaagtaattgaacacctattcaattactactggtaaagctttataatttgcattttgttctatgacattattctatttctatctgttatttcttttctgctagtattctcaataatatataatcactaattcctttttttttttccgtatgtgcactgtcctggaaaacatctgtaatggttcttggtcgatgcagtgtaagtgaggaatcttagttatgtgatttaaagtttgcagctcttgcaacaatgcttctaacttgacccttctttttttgttcattcaaattgtgcagtcttgctgggcttgcttttatgttttcatctagcatattgctacagatcttggtaggttttcatactttgacctgttttaaacttgtgatagttctggaaataaaattatttttgaaagccatgagttttgattctatattgtttatgccacatgatggaaaccacattctctgtatactctagaagagtttcaaaagtattttgtttgaatgcaatttatgcaaaatatttgtcttttttcacatattgtctaggtgtgtgactggacagtacgagtatgaatgaaatagagggtgaggaagagaaaaaatagatgaggggtgtatatgttagacttgttaatactaaggaacagctttaacaatcagctttcatgacattagcatttgtgtctatacaactattgctattaaatcatgttagtgagatgtcacagtgaaatttgtggttggtggatgtcctgaaagatgaggcgttgctttaaaataatttctttttacttgattttgttcacacagagtcattagctacttgttattatcatcattcttatttttttacgagctaaatttctgtgtgacaggcttgtgcattatacaacaattggtggccaatgttagcaggttgataaaaatacagcatatatttcatattagtgtactttttattgcattaagttgatatggatatttgattatttgtacagctctcatgtacgtgctggtacctatgccttgcttattctttggtggtgggtcctcgcaatttttgtttagcagggaaggaggggggtaagtcttcctagcttttattgcttgacttgaacaagtgtttatcacttgattttatgtcttagttttctttccccataatttttaaaatgacaccaaaaggcctgtgtcatgaccaggacttggcttatgacatttatttgtgactgaatggcattgttgaataatatgtaggtttatgttgcttgtagacattgttttcatttggtattgtaaatgagatctatattcttgtttacgcttgaaacatatttttgtctccttcaggggtttgccttgttgtttatgccctggtgttgggaatatttttttttagttttatttatgggattctaccatttttgcaccctgttttttgtcttgaaaccaacttaatgctttgttgtttacaataccttgtatattgttaatgagaccgaaattgtaccttttcactaatttcggtaaatatttttacaaacaatagggtgatttaccatatacaaagtattaaaatggcattaagtgaacaatatggtactaagttggttccaaaacaaacaacgtactaaaatgacctattccctttatttactccagctgaattgctctgtcactaactagaacttgcctattcccaatcccaagtccttaaatcataaattgttaggcactataaaaattacacaagctatccatctatgaccttcttctattagtttgaataaatgtgctctatgttcatggctttaccgtgtttgtttatctcaattattcgtatattgcaggtggattggtgctgctaaatttttgaccggagcatccagtgtagggagcatagctattcccatcattcttaggcatgctcatttaatttctacaggagcaatgctcatcgagttcgtctcattcatcatcttcgtctgtactgtcttgtgttttcaccacgctagcctcgaagatgattggtaacaaactcgaacgaagtaagttcttattttggtttcccagcaccacaaaaagagaaatcttatagtggggaaacatgtgagatactctccaacattgtacatcagttatatgtatatgattttagaatgctgtttgataaacctgtcttactaaagataaggttcctgtttaacaagctaaacacggaaagattacatgttgataatcttatttggataatgaaggctgtgacaacaaaggctttgctcccatttctgggtttcgcagtcataatcttttcattcaattacgtttttcattttgcaaaatatttttgacaacaaaatgattgtttcattcatgtccaatctagatcaccctgaaccaatcttctaaattttagtacatgtagtattttacacattataatataattacaaatgattaatttgttaaagttgttgcaaataatatttagtacatgtagttgattgccataaaaaaatagtaataataaaaatatggtatattcttttcttctttttttttttt

SEQ ID NO: 187340 - DNA, 988 bp, Cannabis indica
ttcatttgccgaaatactttgtggttaaaagaataataaacaatatgtagcattaaacttaacatcaaatctaattgagaatgaatacaatataagtggtaacgtagtaatctatttttttttttataacttatttatctattttcttttcttttttattttttaaatattttgtacaggacaaaaatttgccaaaactacaacaaattattattttgaaaataattaaaaaaatatgtatacatatattatttatatttattagattttttttgtttaattatcactggcttaaggactatttttgtgcaaatttttttattgatatatgcatagacattttttaatttaatgattgaataaatattactatcaatcattctaaattttgtaatcatattttaaataataatattatgtataatacatataatttattattttaattgtattaattagcccaattagttatatattcccacaaaaatagttgattaattgtttatatataaattctaaatcatatctaaaaaataaaatactctaacgattttggtttgtattttgtaattttggtttctttctcttcttcttgaagcaagtaccaaacaaactaatactttttttctttcaaaaaaaagtaccaaacaaactaatactactatcaaattaacgagtaagtgacctaaaatatattgttgaacaatgaatcgtataatttattagtaatatggaataatagaaaaaaaattagttttatacttctaacacaaacattgattttatgttgtgttggtaagctatagtgatgacatatgatgattacaatagatgagatatgatgatgacaacaaatgagatataaaataagatactatgatgacaattgatgagatacgatgagacaatatgtgagatacgatgatgataatagttgtagatacaatgatgacaatatgggtgatatacaatgatgacaataattttg

SEQ ID NO: 187341 - DNA, 1637 bp, Cannabis indica
tttacctttattgggggtcccgctagtgggtcttcgatgctgacttggagtcaatgtgtccaatactgaaaacgccgataatatttaccccaagcttccaaaatgttgagtatggtgggagcttgtgtcactctcttaatttggacatgtggaaattaaagaatgaaattgtgacatttcaaatgccactcaactgcaaaagttggcttccgtctatgatgatgatatgtccttgtgtcagtcatgcatgagggacagggcgcgacctttgaggagttgtcttccagaaattgcaatatctttgatggttgtttagtttttggcgcaaaaatttaaaacgagcattttcatcattgatccacaccttggttctagggtgcattaaatgtgaggatacacatagatttttggactctccaactgttggatgagatttgtgattttggaagtaagattgtgggtcgttcatctccttttcacgtggattgctgttttgggtataaataccccttgtgccttctagttatcacttttcattctttttcaaatttttaatttttcgaagcgtacaagtctctctgcaatctctagaactacgaatcgaatttgattcaaaattttctctttaatttggaaaatatcgtagatttctatcgtttactattgttgaggattaaggcaggagagttcccacatcatcggcccccaatgatcaggacttctacaacacgagaaattacaagtctagatttcaactagagatcgatttgttgatcgatctagcatctcgtcttcacaaaaggtgcgatcaactcccctagcctaatccaacgacaattagctttatatctccattatcaatatcaagttatttgtctatggattgtattttttgaatttgtcgtttcaaactatatttgcatgttttgttctggaatgaagttagggtttttgtttgtgcgattgccatcttaagtagatttaagcatcacgaaccatattaatttttgaaattccagtttaaaaattcctggagttggtcgatttatagcaaaagtgctggtaaaatttttctttcgcccaaaaccttttggttttgggttcttcgttaatttttgtcatttttctctctgtattgttcctgacttcttatctggaatgaataacttctagaagttctcgtttcaggataattagtctagttgggacctctccaagcagtttatggggaaggacccctagctccctttctatgctaggtagttagggtggctaactgcttggattttctttctttcgtacaaaaattatgcataaacaaactcatccagaggaagctaattcagatgaggaagtaatagagcgagaagacgctccaaaattaatcctaaatgaaaatccatgggagttggaccagcatgtcaacatgttcaggaattataacaatttgaggaaatacaagaccctacgagggcttgaaagggttcaggattattttgaaataggctctccattctcggggagaggtccaacaagtgcactaaaggaggcttcagtctctagaactgggctcatatcgagatgggtgcacacttgcctctgaggtgctatttcgtaaacttctacgtcgtggccag

SEQ ID NO: 187342 - DNA, 4388 bp, Cannabis indica
tattgtcttctctacatgatgtaaagttgtattttattaggggatcagtaaattgagttgctcacactgttactagacacgctcgaattatctctgattgtagtatttttgagcaggatgtttaggttgatttgaaagcttttatgtattcgagaatgcttttaattcaataaaattgagatttcatcaaaataataataataataataaaataactgatataattacgtatatattataaagtttcaaataactaattatgtatatattgagtaaattatacaagtacgtaaactaagtaatctatggagagaaagagcagcgattttaatcacacattttaatgtattttaatatttgtttttcctatttgtattgaaataaatataaatagacaaatatagtaggtaaaaacagatgcgtaatcatttgcttagttttatttacaattttgactatgttatatacgttatttaattatgggattttttcattaatactgttatagttaaaaaaatattgtgtatgttataatttaaaaaatgactattattttattgtatagataaaatatatattttatatatgaaattatcatgtttagatatattattacttttcaaagatataaatatattaatttcatagtcattattactttttttttttttaaattccaaaaacaactcaaataaagtaaatattaaaaagtggattatattgaaagagactccttgctgttagccaacgcactccaccaacaaacatcaaactcttttcttttaatgatttagtgaatgatgttaaacctcaatcatcctacttctttactgtttgtgtatctcatattcaacaagatgctaactaaattcatagcttggccaaataagctctaattttagataataattgtatttagttagaaaaaattcgttaggctatttttttctgttattgtaaacgaatcatcttaattaataataacagaatttctctcaagaaaaaaggtaaatattaaaaagattaaattaaataactaccaattatctcattttaaaataattatgtattatttttgtgaaatgttataattaaccgtaaaatattatttcacaccaagttataatacttttggtaataaacttttttcacaatttctaattgaataaaattgaaatcctcgattgaaagctatggctaaagtaacacaacaaatttgtgaaaaataaaccaaattcataatcaatatgaaaaataatagtccacattgaattctaaatcatctttgcaactatatctaatttgttcaaattgaactcttaccaagctactttagctccaaagggagccatggcccctgccaaaatattggacaaaaaaaatttataaaacaattttatgttaaaaattttactttttcaaaaacttatgtattcggcttccccttaatttcttttgttatgttttggtccccttcatcttaacttttgcctccgattcataagttatttttgaagtactaagatattatttggtaatttgaaaattgactaaagttgaaaatatagaaagaaaaaaaaatactttttaccattaatgctatttaatatagagaagtgttaatagatattggtctcaagtattataaaagttgaaatattattattggtgcccgtgcaaattaatatcggattccggattccacattttaatttaataaataatataagaaaccgctaatcattcatacacgctacatctatagtgttagtatcgatagtgttagtgttgggaaccataagtgactaatagcatggctttgtacccattttttttttttttgctttgaaagaacattgattgttcattaaagcaagtagttgggaatcacatagcatcgctttgtaccaattgttcaataaaataagcattatgcgatattttaaaattgaataagagtaatagtcaaataatacgttcagccaagatccttaataaatggtcgatagaaaaccaaccatgatttgaccaaggttttagattattcagtcatggaagaggcactgctactagtcccagaagataaaggatgttgtggtttagggaaggagataaagaaactcagttacatagcggcgccaatggttgttgtgtctgtgtctcagaacctcttgcaggttgtctccgtcatgatggctggccatctcggcgaactttccctttctggtgtcgccattgctagctctttcaccaacgtcactggttttagtctccttgtaaacttctcttaacgctcaaacttttcaaatatattgttttcattttctttattacttgtgttaattcagaaaatgataatgatcagtttttcaatgatttttcattgggttgttaaacctgtacaaaaccaattcggtttccataattcaagtaacagtagtaccagatgaagaaaagagatgctcaaaatcattgaaaatagcaaaaaaaaaaaaaagacccttgtttaatgtttgcaatgattttcagtagttaaggtatgtttaattttaattttaattttaatcttcattttcttttattgtttaatttaactcaatttcactcagttcggaatggcgggtggattggagactttatgtgggcaagcatatggagcagagcagtacaaaaagctgggatcctatacttactgctctataatttctcttatttttgtatgttttccagtatctcttctttggatgtttgtggaaaagattctgattatgatgggtcaggatcctttagtttccagtgaagctggaaaatactcaatttggctactccctgcactgcttgcctatgctatacttcaatcattgatacgctatttcctcactcaagggctgattctcccaatgcttttaagctcatgtgccactctatgtttccacgttcctctttgttgggcattggtatataagttcgaacaaggaactactggagcagcattatccattggcttctcatattggttgactgtaatattccttgtgatttacatacagtattcttcagcctgtgacaaaacccgcgtttcgttttcgcttgatgtatttcgaagcattccagaatttttccggtttggtttcccctcagctgttatgtcatggtactaatctcattttctacatacagttcggtcaattgtgctacgctgctttttttttctttagaatttgagttacaactttataacatgggacctttttcatattaatattctcttttgatagccttgagtggtggtcatttgagctacttatcctgttttcggggcttctaccaaatttgaaacttgaaacatcagtcctttctatttggtatgatctacattatcttcaattctctacgagtatggtatcttaaacctgttgttgcctcttacttcctaacgaaaatgttcatgagcagcctcacaacaatgtcattgcattatttcataccgtatggtgttggtgcagcagcaaggtttgctccagctactatttaccaaaaactattttcttatgcacttttatttctctaaactgtacttaataatattttgtagtactcgtgtttcgaatgaactcggcgccgggaatccaagaggggctaaagcagctgtcctagcagcaacaatgattgcagcagtagaagccatttccgtgagcacaattctcttcagttgccgttctgttttgggatatgcttacagcaatgagaaggagatcgtggattatgtcactcgaataactccactgctttctttctcagttatcatggacagtgtgcaagctgtgttctctggtttgttgcctatatttatgttcattgagtttacattttaggcctctttatgtagatattttatgcccattgtcaaataggggttgccagaggaactgggtcgcaacgtttggcagcttttgtcaatcttggagcgtactatttggtgggacttccacttgctttggtgttgtgttttatgctacagttaagaggaatggggctttgggctggaatattggctggtactacgactcaagcccttttctatgcactcataacatccttcactaattggcaaaagaaggtttgtagtgaaactttgtccaactccaaagttgaatatttttaatctactcagatcatcattttgacataaacaaagattgagtagaaatattgctattatatgtggttatggtgcaggcagttgaggctagagaaaggatatttgaggggactagcgttggtgagagtgtttttggctaaactatgcatactccttgtgatcaggccgacccatacgcagacgagggagacggtcttcccgttaaaaagaatatacatatatatat

SEQ ID NO: 187343 - DNA, 1520 bp, Cannabis indica
aaaatggtatttttttggccaaagagtcttatactgagcttttttatgcagcattaacaagaagccttaatggtatttgaataaattgcaatctatgcatttttaaaaaagaaatgtttagtattttgattattgaaaataattttcatattaaaaaaaattaataagtacaaccatttttttagaatcaagttttaaataaaaataaacctaatttactttaattaatcaattttaataagcatttattagaaatatgatatttatcactgagccaaatttgtagcagcattgcattagcatttgaattttaagttacgctaaaatataatcttgttttaataatttagaacggatgctctaatagtcggtatataagtaaatataatatgtgtagagatatactctagaaactggagttggcattctaatgaaattccaaatgtcagaatcactatactaaaatatacatgcgagtgtcaagactagtaagaaagaatcaacagattcggctttaaagaccaagcctacattgtatgggttgaccagtagcaagtctacaagttttcttatcaaaaaattaatgtggagttggaaataatttttaatattgcaggaaaatcataccctaaaaaccaggttgcgagaattaaacatagaaattacatttcaaaatttccccattagataatttcacataagtttatatatatataaatgtattttctaaaagggtgactcaaaagacaaaccaaccactcatttatagttgtagcagctgctagaggacaactcctagtcctaactcgaagtatttttccttgctgcatatacacgataaattgcaagtccaaaaacagcagcagcagcaccaactgcaaaaaattgtagcataaagtagtgaagtatcagctcataaataatattgtaatgggagtttgttggaaagtgcacctactccaaacagattctgagaaatatacatacccgacatacacatgagagaacggctaataagctgttggtggtacttgcggttcctcccattctcagtttcaggaatgtttaagtgaggtttctcagctacatctacaattctagtgaatatgttattcaaaaatcctgacttcacgctcacagaaataggagcttctattcccaattctcgacatatctagaacagaaaagttaaatttgcaaattatcaggattgaattatcctcaaaatgaaaattactgaggtccaatttaaatattgatttgtggaataataaattataaatattcttatgcaagtatatgtcagatgagaagggtaattttagtagcaacccatgagaagttgtataccttcattgaatcttgaatcgccattggatatggatctaggtcatccttagcagcgataagaaggcatggcacaccatagccgctttcttctccttgcctagcaacctccacaagcagttcttgcgatttttttgatgaatattcatctgaactgaagcaagaataataaa

SEQ ID NO: 187344 - DNA, 2750 bp, Cannabis indica
taaatagactcagaaatatgtgaactaaactctaaatctcagacctacaaaaggtctcatagagctgggattacacgtgtcatcatagcaatatgacataataattaaatagaaataaaaagtaaacaaaataaaaaagtttgttaagggatcaatctaagggctcagaaagttgctaattatgttcaacgaagagtatcgaattcttctcatacaagaggtgtcagaaatttaagcactcatcatcctagccttattttactaaaatgctgaaatgacaactatgtaaaaaaaaacacccaattacgaaggcaacaataattgctaaaacaaccactacaaaaggtataatcaacttgaaatcataaaaaccagaatgaaattctctcagaaatagagcgattcaatcacttcaatggtcagtataagcatggtgacctttagtattttaataaaataaacataagagatttatattagaggcctcagaattatgtgtaggaaaattctactctcagacctacaaaaggtctcataatgagctgggatacacatatcatcatagcaatataccaacatacgtaaaaactgaatatgaagtaaaagtaaagcaaatagaaaagaaagtccaagattctatcccggggttcagggaaatactaagtgttaaaaaaacaccagtccagatgatctatcctaggactcagagaaattctaagtgttaaaaaagcagtaaatctagatgataaagaacggagaaacacagcaatttgaacagcacccttagaagggataacttcaacaaagaaaattgcattcaaaataaattaaattcaaatcatggaaaacgtaagaatcaatgtcaattacctcgtaaccagagtacggaacaatcacttcaatgatcaataatagcaaggtttctatattttatgaatatcacttgcaataaacaataaaaaactcaaatcgtacacaatatgaacaaaaaataagagaacttgtttcgatggctcagatttatgtgtggaaaaattctactctcagacctacaaaaggtctcataatgagctgggatacacgtgtatcatcgtagcaacatccataaaaattgaatatgaagtaaagtaaagcaaactgtgtttaaaaaaaaataatgtagatggtagaaagcggagaaacaccaacaatttgaacagctcctggattgactcaacataaagagcaatatcattcataacaaaagaatgaaattgaaattatgaaaagccagacagcgattcaaaagaaattacgtcataaacatagtatgaatctaccacttcaatgatcaatatcatcttttcaaaacacttaatttttaaaataacataaaaatagcactaaatctgattaaattaaaatactcattaagtaacccattatagtaaaattcaaatttttttcaggaaaacataataataatagggcaatttcacaatcacaagcataaaatagctatcatacaaacaaatgcccaaaacttttgtaccatgtgccaggaaataaaaatgaaaatggggtgtgagactgatctggtgtcatggtccgtaagggagattgttgccgagtcccaaacgagagagttcagagagagtagtgagagagaactggagaatgacaatgagctcttggttcctttagctttaaagttcatataatgaaatggcagaggccaagagaggagaaatgggtcaagagagccgatgactcatgactgtgtgtgtgtgtgagagagagagaaatgttaggttaaaagttagaatagtttgtttttatagctcagggttgggatagatcagataataatgtttgtaaaccctaaaccctaatgtatgttaatggattgcggccccatttgggttgttcgacccagtaaatggtaaacctaatttggcccaataacgtaaaagggttgggagatttgatgactgaatggacttccgcctcctatggattgggttattcggtccaaatcctggtagggtttgccgggttattcggcgagtcacataaatgtgcagctctgtccatgataacaaatacatagaaagaaataacacagcaaaaattataagtttttttttaatggcataaataaataatactaggttataggttattttatttttttacatttatatagattttttatgctatttttttgctaaaaaaagataaaaatctcatatttgtaaaacaataataagtttcgccggaaaaatcgttggtaccaagaaagtcactggagaagttagtaaagccaaaaatgttgtcggaaaagtcactgtcgccgggaaagttaccttcgctggaaaaaattactaaaaaagttactataaataaatgtctctgatatgaacaaaaataaaacttgttctattacataatgaataaaaacatataacacaaaataactcaaaccgattataattgaaatataactgggttcgacgtaaaaagagggcccaatcccatttcggacgtaggctgccacccccttgtcctggaggttctccgaccggggaggggcttgcttcacgaactgttcgttctccgggggacggtccctctgtggccccagaccaagagaggcagcggcagcaagaggcccccgccttttctacagaatggagaaaggctgcgcgggtaagttgctagtgggctcagtcctgaactccagaagcagacggatgcccgaggagttctac

SEQ ID NO: 187345 - DNA, 1825 bp, Cannabis indica
aattgtgtattacgtacgcaggttcaataatgtaatcactagactacatattattcgaatatgtttcatatgtgaatccattacatgcggatcaatatatattaaaaaacttaggtttaacttgtaccagttgtgattttgtaagagctgtgatatgaaaataaccacagcattaattactaattaaatagttaatgtcactaagatattaattgcaaattttggagacgtgtctatgtaaatactactaatctaatacaactcgggtccatattgtagtctgtcaatgaatggactattaatggttaattggctcaattaattaaaaaaaattcaatggttatgtgatcctttgggataaacgacgagtctttcctatgcggcgtaatggattctgtaatttatgttaaatttataattaatatttcctcagttcgagaatctttaatatattttgcctcttgggaggcttttacaatgtcaacgtgcgccgaagttaatatctcgaaatgcaaacaatataaatagggatcagtttcctctcttctttcctacaatactaaggaaaagaacaaaaatggctctaaacattgaaggtgtaggagagccaggaagctccatgcatggagtcactggaagagagcaaacctttgctgcatcggtggcttctcccatggttccaactgataggacggccaaatttgatttgccagtggattcagaacacaaggctaaagtgtttaagctcttctctttggccaatccccacatgagaacctttcacctttcttggatttctttctttacttgtttcgtctccacattcgccgctgcacctcttgtccccatcatccgtgacaaccttaatctcaccaaggttgatattggaaacgctggtgttgcctctgtctctggaagtatcttctctaggcaagtatatcaaaacttttaacactagtatttgtttcaaatataaatatataataaatatttttttcttggtctcctgcaggcttgtgatgggagcagtatgcgatcttttgggacccagatacggatgtgcttttctcatcatgctctctgccccaacagtgttttgcatgtcgtttgtgtcctcggcaggcgggtacacggcggtgcgtttcatgattggcttttcactggcgacgttcgtgtcttgccaatattggatgagcaccatgtttaatagtaagatcatagggcttgtcaatggaaccgctgccggttggggaaacatgggcggaggagccactcagcttctcatgcctgtggtgtatgagctgattcgcaaagctggtgccacaccttttacagcttggaggattgccttcttcattcccggatggcttcatatcatcatgggtattttggtcttaactcttggacaggacttgcccgatgggaaccttggtgccttacaaaagaagggtgatgttgccaaagacaaattctccagggttggttcaatttagtttgtctttatattttcttttctatatttatattgacaaagatctattaatttcttagctaattgtatatataaatactgatgttgatggctttgtccaatgcttcaggtgttatggtatgccgtcacaaactacaggacatggatctttgtccttctctacggatactccatgggtgttgaattgtccactgataatgttattgctgaatatttctatgataggtttgtacttttctccctaacattttcttatataagttattattatagaaaatacttgtttcatctttctttcttttaatactaatcatttttaaaataataataata

SEQ ID NO: 187346 - DNA, 3286 bp, Cannabis indica
acaacaggaaaaagggtgtctctctgacctggtaatatatatacattttcatataatttaaaagctgtagagttaccatgaaaaaaacaactctttattctgatgcaggctgtttgtgctgtcttgtggttgttgctgtgagtgttgttattgctgctgctgtcattaagatatataattgctgcttcaagctatcacagttggaaagaacaaaggtttcttattcctgtaataagtctgtatttgatttcattctttagtgagatgtcaaataataagaaaaaacatcatatatataaattacaagttgtttatatattctgatctgactacaaggtactaattatgtataaaacactagaaaaatataacaatatatatatattatttccattcccatcacagtacatttacagactttcccacaatgaatttcaaataagaaatttgaaacatcagactctccccatcttctagcttgaggatcctccaagtcatgcttgaagatcctcaattacttgaaaattttcaaagtgaatgtatatcatgaaatgggactcctgcacaattgtaaaataaatgtctaaaaaaaagagtaagttgggtctgttctccaactgagaggacgttttcatatttattccctcttcaactacaccagcctctcctgcaaacttcatcagcagaaaataaaaaaaattggatcttgatttgaagttaagcattatgtattactagttgccaaggattgggtttctcccttcatcaatttcaatgaggatataatgttttggatctgatccacttggtccttcagagtaaagggtgggaagataagcataatatgctggaagataccgggaaacaaaatctttaacctgccaaattatccacaaaatacttcagtttccattgttaaggctttctaagttctaacaaccatcagataaacataaatgtttgtgtgtgtcaaaaaactatcccacctcttcatcagacattcctggttttcctgcatctctcatggcgatctctgcctgtgagttccaaaatttataggtgagaattgtgatgagtaaaatgcagataaatatagtatgtcaggacgaattccgacctgcaaacgccactgaaagacgcacgttggatctttaatcttaataactatccatgcccctatgaacttgtcccacgcatcataatatgcttcaagatttttgttcactgtctccagctgcagaatccaaattcagattatgaatcagtaatggacacagaaatagcaacagcaaaccctcaaacatttgattttcaattacctgaggatcaacagccttaactgtttccactggaagaggcttgaaaccaagcatccaaccttcaaacaggacaacctaaatcacagccaaagcacaaaagaaactttaaatcctttagaggatttcaaaagtggtaacaaaaactaatgatagtgataacacttggactgttggacaagtgcactactaacattcacatgatcatttctctagatgagtaaaattgtcatgagaataaaagaatttgatattgctctttaaactgaaatactcgtaccgaaagtggcccctcaatctcaggccatgttgaaggatcagctctgtcccccttcccactatatgcagactgcaaaagaatttttgatcagcaactttggatttcaatttgttcaagaaacaacaatcgaactctgttgcctaaccttgtcatatctcggcagcttcatctttgtacctgaataccaataataagacaaaatattagacatgcatcctttaagaaaaatactaattctatttcaatctctaagctttcatgttctgtttataatccagtttacccaagacggagtaatcaagaatatgaaccataaaagaactaatgattatatatcgatcacaagaataccagcacttcaacgaaaactgaactgtaaatttatgagaacaactcaccctctttgttcaattttttcagagctgtcaatgtttcaacagagaaaggaagatcatggctgccagcatttccacgaaactaaaatatgaaggattagattatagaaatttagtatgttatcagtgaactccgtttctccataaatagaacaaaaagaaagtgtagattactacctctagaagagcatttccaggattctcttctcttagtttagcctacattcaacacaatcttgaataagaaaataagaacacaaaatcttggaagtacaaaaatcctgagagatatatttacctggccctctgctgtcaaataaaagtcatcaatagatattgtggcagatctcctgagatttgaaaactacttcagcagtcccactatcaaatttattagaactgtacacaaaagctattataattctatgtcttacctgccagtaattttaaaaagataatcaagagcaaaaactagtgttgtctttccacaaccttgtggtgcactgaaaccaatctgcaacacagacaaactttcagcaagcatatcattaattttagcacataaagcaataataacaatgatgggactccctagcattactttgaaagtctttcaaaatatgtacaagcagaatgggacccaaaaaagcaatactcagaacaagaaaaaaggtagtactagtaagacctacaatataaaaagccttaccactaaaggaggtatatcttctccctccttatacccagacatgtgttgggaaatttgatcttcacaccataaaaacacaggtatataataatgataaaacctcactttctgaggaatattaagttcaaattcaccgagctgaaataatcgacacaggtgcaaaccataagccaaccacttatcaacagactcagctactgattcaggtgtaaaacccattttttctagcaaaggacctgagcatataaactcataaaggtcctgcacagaagatacttgtgcaggttttgtggggaacacagaatatacaatgccccgccgcctgtcattggcagcagcggcgttgaaacatgtggagcttccttgcatccatgaacatccactgcctgcaatagtccctgaaatatagaaagatcagatcatgtttttaaagaaggcaacttcttttcaatagtaacactaactattcaataatttgagcctattaaaaaatacatgtctcaagatcttgagattactcatggttgaccaatgtcattgtaaacctcacatttgaagctttcctaaaaagaaattaaaaaaaaaa

SEQ ID NO: 187347 - DNA, 3592 bp, Cannabis indica
tatgaacaagttctaaattatagtgaattttggccgtgaaataatttggaattgtgaaagtatatgatctttgataatttggaattgtgctaattcagttattgtaacaaatagtggaacttgatttacctgtcaatgtcatgactcaaaagactaatgtttttttttcctctttggtttggattcttgaattttcattctcttcacagttatggttttgcactataataatacattgggggttgcattttacagttgagtacaaattgattgtgagttacaaaaatgatgaagcttagaaatttgctataccattataatccaataagagtgggataatattaaacaggcttaaaaatacaaagtagattaattaaaatgtgctcaagtagaaccacctaaaagtagttatacttgtatggttaactcattttttgattgagaagaattttataaacacagttgaccaaaatggagaatatgaatttatgaaatttagaatgtgaagttaaatgaacacgtccaaatgaggggagaagacaagaaaattgggttgaaatttatgaacatataagagtaaagtaaattatatgttcgcccaaaatatgtatcaaaatatatacaaaatgatcaaatcttttttcttaactacatcacatttatttctaatccacaaatttatgaaattgatattttggtacaaagttcaagttcactgagcaaaaggtgtttgaaaacaaacagtttttgctcatgtctaaaatgaaactttacaagccattgaaagaatgatatctctttataatattagttctagcctcacttttcttctatattgatttttgcaagtgattattgattacacttactaagagtttaggtggtttttttttctttttcaaaatcatgtaaagcagcttccaaattctataacatctgatcaaaacaaaagaatctaacaagggaagcacactacataagatctgttgtctttcacctatctgaaatttttctaaatttcacaaatttgtggtaaacataaaattgatctttgcttaaaataaatagttcacatttgaaggaaacaaagatggcaagaatttcaacaagtacagcttctgaattagagagaccaaatattgaaagaagcacaaaagttgccaagttataactactatcactcactccctcaagctcattccacttcagctaaataatcatcgatttcagctggagtaagcactctgcaaacacaacaattcgaccgatcaataaaacccaaatcacaagatagcttgttcgataaattggaaagtctccaatgcaaaatgacaagaaagcaatacagtgattcatctagcacatttaacttcggtaactagaaaagaagtttaaaaatcaaatcttgcctgaatttcttgtcagcaccaataattccaatttcaatgtttttgccagagatttgtccttcaaatctgcaaaagcaaaatattaataaaataacaatgaaaaggaaatatcactgcaatattactagatcccactttgtagaaattccaattacacataatatacaaaaacacaggctgcacagcatcattagtatatctttcctttctatcacttcacctcaaaaactagagtgcggcatgcaataaaaaaaaggttcaaaatttcacaaaaaaactataattatttcttgaccataattaacttaaacttgaatgaatatatgatgcagcaaagttccttctgcatgtcacttaattaagtaaaacacaccacttgatatgaggacacattatatcatcaatggctaaaatattgcatatcatttaattaaagttaattacgtcctaagtgaggcaaacagacattggaaggaaccagtgtagaagtttcttaatcattgacttagtaatttttgaaagttacatacccttccttcaaagtcaagatagctgtgtggacagcatcatcaagctccatgtcatcggtatacctaagagaaaagaaacaaaagtgcttagattagaatgaaggagtaaaatgagcaagagacaatcattaacactataaagaatgattggcaaatgtaaaagcggaaaataggatgtgcatacagaatctaactcaagtacctcttctcaagaaatgttttggcatttgaaacattctttcccattgcagaggccttccatgagaaatatgaacctgatggatcgacctatagaaaagagcaccagtaaaaaaaaacaggtggaaaatctctaaaagatcagcactgaataaaaatgaaatcagaactagtggaaggacaaccacaagcaatgtagttccgaccataaagtaaaatggataacttttactttcacatataagaaacgacctaggtttttttttttttggttttcttaaagaaacgaaaattgaattagaccgaagatatatgagactttgttgtgtgttgtggttatagattttctaaaaataagtctcctttaaaaaatgaacattacctggtataattgaggaccattgtcatcaaaaccagcaacaagcaaagatactccaaacggcctaacaccactgccaagggagagaatagaatattaggattcagcaagttagaagcaagattcacaagcacctaagaaaaagatagtgtagtactatgatggtacctactaatatagttatattacaagtcacacaaattcagggcagtttacatttaattaactatctcttacaataaatctaaaatgttatacaatatataaatatatatataaatgtttgaaaagtatttgaagtaatctcattacccagattgagtgaactcttgcatcacagctgcagtttccctaacaagttgagtaacaggtatcggttccttcaaacaagatatgatatgtaaattagaaaaacgaaagtataaaatttagttagtcctacaaacaagatattaaatgtaaattagaaaaaccaaagtataaactgtagtttcatcttgattctactatgcatacataaaagtttattccaagtcattcaaagcaatccatacccaactccaacttctaacaagacagaaaatagtaaagaatttaaacaacaaaaaataaaaaaaatgttttttagttaccgagttgaaaagaaattgagcaccatattcaatgctgaacaaaaataaatattaaaacatagaaatagacagagcgatatgataccttgtataatttatgatattgtacggcctgcttcctacttttccgaaccaaaactcgaaaatcaggacccataccactgcggtagtgcaaaataaaacagtggttggaaattggaaagaataaaagggataattaaaatactaaatttgtaaagccacaaaatgctatcttgagtctagtaaaactgttaatacatcagattgaccgaagtaaggttcatataatcgctaaatttaaactcataaaacacaatgccttttgccttatggtcttcctaattggtaatataaacggcatatctatctgtcagtctgcacatccagcagtttcacatagtagggacatagttaatatagcat

SEQ ID NO: 187348 - DNA, 2646 bp, Cannabis indica
agctcgaccttgtgccacgggtgagctttgatctgaggaaacttgaattcagtgtaatttgggttcatgcaacggatttcttctcttgttggagtgccaagaatctaacaggacaaaaacgagaaaaaagtataagcaaaatattacaaaaatacagcggtattagttaacaagtaattaaggtgacttcgacactaactgtaccttaataatttctaccaactgatcaacaccactctccccagggaacagtggctgcataaaaacaagatccagcatagcagaacaagcaatcagtttagagcaaacacaacgaaggtgatagcacagagtgaatacacttattgattaaggagacataaacaaagggagatttgatggaaaaaacaaactacagtacatccacaataaacaagtttagacaccaattgaactcatatagactcacctgtcccagaagtagctcagccataacacaaccaacagaccacatgtcaatagcagtagtatactcagtagcaccaaatataagttcaggagccctgtaataccgtgagcagatatacgatatgttgggttcacctggcacctaaatacaaagtctcatcagcatttagaataacagccttaaattaaaaaaaataataaaaaaaaaacttaccaacatctttgcactcccaaaatcacatatcttaagttggtgtgtttgagaattaacctgcataatgaacaaaaaggaatctcagaagggaaaaatatcataataatacctttgcataaatatttaactaaattaacggaaccaaaacattgataagaaataatagtaaaaagacaaaaattaaaagaactcagtggtctccagataaattttatcagtatgaagtacaaaccaataatattacgctggaataaagcagacaacaaacttaatgttaccaaaccaacaacaaaagcaagaacctaccagtaaattttggggcttaatgtcacgatgacacacaccaacaacgtgatgtaggtaatttaatgcacgacaaatctacaaaacagaatcaataaaccgaatgttacaacacacatcagtataatctcatacggtaaaatagtaagtaactaataacttacctgatatgtataaagtcgcacatagatcaggggcatatgttgagttgccctaacataatgctttgaaactcgatagacagtttcagatacaaactcaaggaccaggttaagataaagctcatctttatcagttgttgaaaagaaacaatgcttcagttgaatgacattaggatggtcaagcaaacgcatgacttgaagttctcggttcttgtatctcttgtcttgtagaacctttttaattgcaactgcctcacccgtttccaagcattttgcctaagtaaaatataatgaatcatgtcagtgaagaaattgacatcaatatcaataagaaaataaatgttcactattaaaaaattatcataaagaaaacccgaaacatcaacaaacaatttggatgatggatactcagacatatttccaaatacctgaaagacaacaccaaaagagccagttccaacaacacgttctgccatataagaaattgtctgcaaaaacaatatattaagactttgtattcaaataaaatctataatacaaaagagactgcacgaaacattgaaggtatacagatcaatggaaaaattggggggaaggaggggggctaaagatggaaacatgtttttctaaaaaaatgtttacctgtttcggctgtccatttcgaccccctactgtagttgcaataatctgacctgtttccgtgccatgaccatttataacagtgggttccatatcctgcacaaggcaaaggattctctagccattcaacaactgtttatttctttactctcttttagcctttcctttttatctttctttgcttaaacttaaaaatatgtaccaactaaattataccttttcatcatggctattggctttctcgtctataattttcatttcgtgcatctctttggggagctgatcatagctagttctctcagtcatttcttcgtcttttgactcggagttggcaattgaaggtacagtagacgtgcatgcaacattttccgatgctgtagacggcacatgctgctgtagattaggaacactttcctgaatggcatttgattcaacatttacttgctccatatcttgatcaacctttgctctctttgtattacaatccgcaccctaaaagaaaatcagtaaaatttaagttgttaaatttttttagaacaggtaggttaaagaaacatcaacctatcttgtgagttaacgagggagatggttgaggcaggcagtaaagtatgagtacaaataacttcactaagttaacttacatttaaccaaaaaagtgaatctattgtaaatcaggattgttttcccagcagagcactggtgatccaaaaaccactttcaaacgtaataaacccatatctcacaaagacattggcatagaagaagaagagaataaaacacagatttaggcgataattgacacaaataaaaatcgatgccctacccacataaaaaacaatgtaccgtcttcaaatacatcatatgaatccataccatttgtta

SEQ ID NO: 187349 - DNA, 1066 bp, Cannabis indica
tgttacagcacaaaatccatctagtacaacaccaaatccatctagtacggcaccaaattcatatgctggtggatacatgaatcacgagtttccattcccgccccctatggaaggcactgttccctattatgatactcatgctcggtctaacattcagatgggtatttggccaccagcagagggaatgattccgcaagagagtagcagagtcatggctgctgctggtgcagctttccctgatgccaggattgcaactactccttcaaccggaattgatgctgcctctaactctggggttgccgctgtccctactggtggaggctttgtcacgcctattagtgcagatgctgctattcctaccagcagagatggtgctatcacacctactagtgcagatactgatgtcccttctgccaatatggatatttccggctccaccagtccctgatcctatacaccgcgaagggttagttcagaaaaagctgctgctggtaaatctctcccacagctatgctgattttacaatgcgggacaaggtcatgtgcttttataacgaggaactgtaatcgagaggggtagttcaaacgttgaggcatgtggtttgctctcacagagtcagatgttcaagtcatattgtcttagtcccctaatattgtagggttagatgtggagtatagtatcgaaaaagaaaataatggagattcgtagaaccgatctctgtaggcagcaatcatggcctataagattgcaagtgttgggtctctgttttgtgaagaaatgggcttcattgttagttgatatgtgtaggggaaggaaagctcaatggcaaatgtattgaaaaatctgttgaaaatatctttagaaatagaaaaattgatacttttttttttcatagtacagttattagttaactgttaacctctctatgcttccttccctaagtttattcctattatgttgataattttaaagttcttttggtcttaaaaaaatattcattcgttgcaagggacttgaattatagtgaaaattacgtacttttacactttaggtgagtttgaataga

SEQ ID NO: 187350 - DNA, 5429 bp, Cannabis indica
cgatatactatcaatatcaatcgaaccctaccactgaataaatcaaatgaaaaattcatttttttaactcatacactcttgaacggttgaattagtgatttcgaaataatacgaccaatactcatacaaacttatctcctatagtagctaataaatatatgcataaggaagagcatcagaggataacaaataaacaaacaaaaaatgaagaagcaaaatgtataaagtataaacatacctcatgagtcatgatatgaggttcaaagatcactctgctgttttcgtctagaggagagtttctaacaccgactgctaaagatgtaacctataaaaagaaaaaaaaaattgaaaatcaaaaggcagtgatttctaaaatagttgatcgaaagaagaaaataaatgcaaaatgttggtccttcataagaaaccacaaatagaaggaacaaaaactgtatgaatacgataaaagtaaggaaaccaactcaagtagttaagcaaagataaacttaaaatgagaaagaaagaaaaaagaagaaacaagaacaaaaacttggatgacattccgaaagtttataattctggaatcggaccagctattagaactagtgtgctgtcttgtaatggatttacgtaaacatgtaggacagttaaaacaccaaatcccgagtaaaaaaatcttaaaaggacagcatcatcatttcaatggacaacgaattgatgatgacatcaaaaccaaaaaacatcatgcaatgtctactactttctacatcagagagccgcatccacatcaactattttaaaactgctgttttgagtataaaacaaaaatgatgacagtcaattggccaagtttagcgtctcaaacagctactgaacttagatttgaaacttccgaattcttgataattatttccattctatctatgttctgcagcatccaaagctccaatgaccacaaacgtttgaactccaaattcttgataattatttccattctatctatgttctgcagcatccaaagctccaatgaccacaaacgtttgaactccaaattcttgatactcattgccattctatctatgttctgcagcatccaaagctccattaaccacaaaccttgaaattccatatttttgatacttattgctctcactataacatttgataaccttagatgcagcattacttgcttctgacaatggaggaattgtgtagcagcataaagctaaacaaattttactgcaacaatattaaatgaggtagaaacagaaacttttcaaagcttgtttctcaaaaatatattcatgaagctaccccaaacaaggaacataatcctaactgaagccaaaatgaaaccatcaaaatagctcatatgaactgatttcttaatctcctggtctcacagaaattaaaaagaaatgagacgattaaacatcatactaccttataagtagaatactaggaattgccccttaatacaattaaggaaagaacaggcatattggcctaaattaatggaagaaaagtaaaaagtgttttacatttatatatatatgcctatatatataaataaactgatgatggacagatcaaatccaaaacacatagcaaaagggtaaaaaagtaaaaacttacttgaccaagaaactcaaacttcagctccattgttgaacatgtcttgctaataaagcataaacatctattagtacaagctgttctcatcaagaatttccctccaaccaaaactggacgagtacttttctcttcaacacatcttacccaatccaaactccagaagaatagagaaggaagtttccttataagaaataacagcctgtatacctaatgaacccatttattttatttatttatttctattctattcttttttgtcttaggttactagggttcctcagctctaataattgaaacagatagaatgcagagaaaatcccagttataaagagaaataaactgatgttcccaattgatgaattataaatttgaagtccactacgttcaaatgaaaaatggaaaaagtggacttcaccatacaaatgatagctaagaagggacaaagagcaaacatgaagtacgagtttatgaggtgaaacagccaataattatttgtatcaaccaagtaaaattttgacctgaaaactataatgaagtattactacagatctgcaagctgcttagacggaatgatttactgaaccaaagctgcaggatagacgagaaaaggaaataaaattcataatatgttaatacttcacgataatccacctaccatttaacctgaacaaacaatctttctgaagcatctttctacacttatataaaccaccttcaatttctttcaattatcagcaccataacaaaagatatggtccaccattttgttactgttcaagcacagagcacactaaccagaagatattatttatattttagaaagaaaagaaaaatatctaaggcataaattactggatagacctttgaatgactatatagaaacactggtatatttcatagaaataactgaacactcagtttaaatagagtaatagcaatatatttgagtaatcttagggccaaaagctaaccaagaacctgaagtttagccagaacaagggttaccaaacagaagatagcttctgaaaactgaaaagaaaaagctactttgagtttgcgatcggaagaaaaaataattaatttaaacttactttatccttaaggctaaacaacagcactagtcttaaatccctccattacagataacggaatgaaatttgaaaaaaaattgtaagtgctgagtaggatttctgaagaaatggtaatcccaagaaattgaatttcccaatatcgaaacttaaccctattgagaattaatagagcgtacaattacgaagagatgaaatttcatacaaatcagaaaaagaatgatgatccaccacgcactctcccgaaacctcatcccggctaaaagctatccccatcccctacctaacagccttccttggctaacaaactctacttagcagatgaactgaaaaaaaaaaaaaaaacaagccaccgcatcatcttccagaaacctcatcctaaacccactaaaaccttcagtcttccttgacatggcagtgcaaactctaaattctcacctttacaggaatataagaaaatcaaaaaacttgtgaatggcaaattagttgttactatgcaattccaaaaaactaatcatgacaactaataaaaaaactaattaagaatttaagatgaacatagatttagatgtaaatgtatgaatctaaactacaaaccaagtttacaacaatttatccagcatgaattcgttttttttttttttggtcccccagctttgtgcaattaacaataaaatatgaactttactgcatcttttggcagatgataaagcatttggtttccaaagcctactaggagtagcatttgactaatgcgctgccttataatgcagtctagtctctcgattgatcatatatagatcgagcaacatttgagagccaaacttcacacagtaagctatgaaagttctaaagaacatcattatttcagaacataaatagtctccaagtgtgcaagctaagagcgaagcagagtcataaactgctcttattatagtgtacgcagacacctaactaaacgctaagtttcataggaagagacgaataaaaaaatctcatagtttaactgataccatatatactctgaaatcactttcataaataaaggatacaaatttgacaaattctttcaagcactacaccagtgagctaaacactgggctgacaaacattatattactacatggtcatactcaactaaaaaagattaatagcaacacaatatttcatctcaaaattaaaaaattattactaaaccatgatctactgttgaaaaaaatgagaatgatcaggtggcatgaaatagataggcaaatgcaaaggccaaaatatgactacgacattaaatcaaatataaaaaggaaaattcgaaagccagattagtatacataaacaactaaccaaatctcatgttatgtgacttgaaccatatctaactagaaagtatacataagaaaaaaccaaacattttcccttgatattaaaatgcatgaaactcagcagaggcaattttattaatggaacatcttccccacaaaaaaaaaattaattagaaacaaaaacagttttatttcatatgacaaaggtaaacttcaccaaaacaagcaaggaaaacatgtattaggaaagtagattagaaatggagaagtcggtgcaaataattggagtggaagacacaaagagaatataaataatgcaccatgtagctaatatgattgagatatcttaaaatacagcttaataactaaacaaaatcataggtccaccaatgtctataaaacaaccttcaaacacaaatcgaaatatctaatatgtggcagcccaagatacccggtgcagcgcgtagtgaggaaagctagttcatgtgcccttgagctcgttgcatatcatattgaccccatgaagcaggtccagctccatatggtggaaaattttcagcaccattttgcccctggaaattcaaaaaagaaaaaaattattaacacgtaaagttttggcactaaacatgaacacctgcacatcctaatcgacccagggccattgagaatgtgcgaaatagaacttacgggattcatgccatagttgacgggataatgatttcctgcatatcccattgcttcaggattgccataatttgcaggataacctacagaatcatcacatatattgccaagtcactggtttgtaaattaaaaatagataaggctacaatgaacgagaaaatgctaatgtctgtcatcaacatgtgcatagggaattaacacccagaaaaaaaacaagttcatcaaagcatctgtgtaatacacaaaccacaaattttcattaacgatcaaaccactcagctagaataaaaaattattaagaattcagcccctaatcctaatggatataaacaactaacattacgtagttaaacaaaagaactaaaccagtcaaaccaacaacttctgctgactcctgtctaacacttgcactacaatctccatcatctacatggccttgtaatgaagatgacatttatttaaggcattcctgttctcaatttacttccattcaaagctaaaccatctgaaaaacataaagcatagacacatatatgagactgtatacctggattaacaacagcagcacgtgctctcttctcagcactagcacgaagtttctccaactccctagccattgagatcaactttttctccatcacctgaccatgctcataattctcagcatatcctttcttctcatactcaatggcagctctacatg

SEQ ID NO: 187351 - DNA, 2166 bp, Cannabis indica
aaaaaaaaagcagacaaacatttaaaaattacatgatgtgtggattgctttactaagacaaatgtgagagatttgcaaaccagattcaacaatctcataactacaaccccaaaagaatgattctacaatcttacatcatctatacgtcgaagaacaccaaattcaggaccacgtttggatgggattgtaatatgatcaatcttgtgtcggtgcaggtcagtaacctgaaaatatcaaaaaggcataataagaacgtactatagcaaagattcaatttgaaaatttgccaacagaattagaaagacaacaaatttccagaaaaatatcgaataatagtaacatgtagagaaaacccttttttctccaccctagaagacagtaagatgaatgacaaaaatgtagcacaggaaacaaatgcatatggacatgagcataaatacatacatatactatacacttgcaaacatttgtataaataatggacatgagcatatgcttgtctaatttttacatttaataaagttgaaatcaaaaaataagtaaaaatatatcttcgtggtcataggcatagcctaacagttccatttctcccaaaagaggaggtcccaagttcaaatcctccctcccccaatatcaaaaacataaaagtaaatatatatgttcatataattgtgcaagagaaagagaggctcaaaccttaacaccagaaagctcttcaagtgtcttgattgagtccatcacaatgatttctacaccatcatcactgatccacactgggagaggagtgccccaaaatctacttcgactgacagcccagtctctagcattttctagccaattgtgaaagcgtttttcctgcatgaaaaagtaacccccacaaatattagccttcaagatatttgcctacttcagaattcttgaaattgaaaaaacttattagctcagcactgttaaaacttcttaaacaaaagttgaaatgaaaaataagaaaatgaagaacagtataaatagtgtattgaaactaattggaaagacttatgacatgcactagaacagtgtaaatgaagaacctgaaaaacttgagccttaacaatgcatacaagtatatccaatttactctacccactcttgagactataatttgtaatagcatttatcattctagtaccaccaaacagatatgcttaatagaattagctcatcattctaacaccaacaaacacctttgtaatttcaagccgaaattctagccaaacttaatgattaaggaattagaagttcaacacaacaaaatttccaaatgcaggtttcttccatgagaaggagaagctaaaaaattagtcatatttgggagcatttatcaaagcctaagcatacttcacagctaatcccattaaagtggtgacaaaataaacaagattaacagggtaaaaatatcaataaacaccttgataaagaagtgttctacctttacaaaatcaggaacccagtaagtctccttgttgttttctaacaatttctctttcaacaattccacacgaataaacctagaaagatgcattagaactcaattaggcagcagataatctttaagaagggaccagtgaaaacaaaatacaacgtttacattgtgaatcaaatcaagtagataaagctttaaaacgcaataactaaaatatacttatatatagaacaccattcatatacatgaaactagcttgaagccataccataatgtattcatcaaaatcatgaatatccatgtcattagtaatcaaactttgacaaactaattgaaagcccagtcatgttcctaaatattatctcaactttagtttgtttcttctacatgttatgtcggccactataagctaaattatgcgcaaaaatttcacaaaaaaaaaaaaaaactgaaaaatttacttaccagcttggaacagctctatagattagaggagttttagatctccaacaaaatggatatgaatgtgtgaatgttccagacttgatgagccttccttttgcctgaaagataaaacaactaaccatttagtttattattattgataataatcattaaaaaggaaatttgtgacaaaattcattaagtaatctgaaaggtcgcatttaagtcactgcgcagttcttttggtggcgaatcaagta

SEQ ID NO: 187352 - DNA, 860 bp, Cannabis indica
acgtgaacaagatcttacattctgaggttcatttaaattatattcatctgatcaacttgcttgtgctttgagcaaatattgtaagaacaattgccagtgcatgaagaagaagcttttgcccatgcatgtgccgggaccttttcggagtgtgttgcaatgacttagccagagaacgattgtacaaagtatcaactgcatgttcatagacagtctagaattgttcatcacaattcataccagcatagcttttgcttgtaacttttttttccttgaatcacgatccgattctcccaaaatttcattaccatagattttgtattttattgttaatatcatgtgtctgtgaagtaatattgccaacttttattattgactaatgagagctttcagattatagttagttcacctaatcacaaaaatggaaatcattaaagaaatattctgaatttgtgccaatacaagtaaagacaaccgttgtatatactatcactagttcaaatgccgcttgaatctctcccgaagatgaatttccttgtccagtcagataccactaacaccctagtcctccagcttacttgcttgctgaagtttcataaacaattcaaatgaaaaactattacctttaattatggagcagcaaagtaaaacatattagaagcagtagattattaccttgcatatacagaataccatagccactgagtactgtgacccatggaaacccagtctcctggtagttcagctgcagcttgttctccccctaaaggagcaaattgcccaaaatgcttgtaccttgtgatccaaagttggtgaaaagttaataagaaagaggggtgccgtgcatttacacactgaagtca

SEQ ID NO: 187353 - DNA, 3210 bp, Cannabis indica
cgctctattctcttcttgagcaagtcagttaagaatttctagtcctttttcatgaaggattcaatgcgtatttataaagtaatagaggtcgtacatagttaccatttccctctaattgggagtttacagaaaatacatagatttggaattatctgacaaatcccagcccatgaggcaatatgtgtatgctgatgtggagatctgaccacaatgatagctattcatacagtgtcctttgattatgggtaattaatgtgatattagttacttgatcttaaattattcagtttctctttttagacagtattattctctgtccatgatcttagaaaaatataccttattctgtgtggagcagtaaatgggaaactgggactggcttccagataaacattgagaaccctttccaggtacacggagttgacattcttccgtatgctaactaggcttggtggaagctcatctagcaaggcatgtagttgttctcccaaaaggctagataacagttatgtttggcccagtttatattatttaggaccaatgatggactttaagcttttatttggaatccacgtgtcccttgcaaaaacacagataaattttacccccaagcttctagaaagctgtgaattgtggaggcttgctttagtctatacaagtggacaggtggaggctaaagttgaaacccttacaaattctaaatactttctgtgaatggaagacaactttccattttttgaccttcaagtttaacgtgacattattttatttgctcgcgaagcatctgttcacttgataaagcatgtgcagcgaagcaattgaattgataactatttacttcggtgagagtcttgaggggaatttcatcatttaatttacctcggttctaggtacaacattaaatggctgactgatgggcttccaagactttagatatgttttgtgttttgggaggagtaaattggaccgttgatctctacttcacatgaatcattcctcgaaggtataaataccttgtaacgccacctttcaccccttttactcaaaatttcaaattttgttgctccaaacacagatcctctgagagcaaaaattgtgaactaaaaaatttggagcacgatatcgattattgcatccaccttcttcttcgaattagggctcaagaataccctgatgctccaaccccggtaattacaactccatcatcagatgaaattgaaaaacctagatataaattttgagctcgattctcttatcgaccatgccaacgccattgcaataagacttgatcgccttgaacatcctttggttggagatttttctctaaggccatcattcgacgttaactatgctctcttaggccatactttttcccaagtccagaaccatcacccagttcattactaggtaaattatttttcttttttgatttttgaaccttgttgcgtgtttgagattagtgctcgatataaaaattaggtgtgatttactcgttgttcgagaattaggactttaggcctttgactagaatattgttgttgatagaagtattaaattctagatactatcttgaatagctttaaactagtagaagtcagattcctttgtttcattattatgagaaaagtctatttatctacacaaatgctggaaaacaattttgttcctttgtcccaagcccttatggttttagataatgtataagctttcttgtctttcacttcttgtccccgattcaactatctggaataattgttctttttgagaatattatttctggagaatgaatctagtgggaacctcttcaagcaatgatggaggaggattcccctatgcctctactatcttagttggtatgggtaactaattgcttgataatttttcagaactcaatatgcctaaaagagttcagcgagaggaagtagacatgatgatagtcttgaattcatctccgtgggagatggatcaatacactaataagtttcaaacttacgacaatctctggaaatacgagacacagacagggcttgagaatgttccaagactatcctggaatagattgttcgtcttaggagaatggcctaaccaatgtgtagaaggaggctttggtatctggagctggggtcacacaaaaatgggtgcccgtctccctttgaggttctacttcgtggagttttgtgcagtagccggagtagctccataacaattcattccacaagtgtatcgtctacttgccagatggtacatcttatgcttatagaagaagaagcctatttctactctagaagagattttgtacttctacatgtaaacaaattaaacaaaatattaatgttcaatatcacgtgcaagatacatgtaaaattaactagaatttttttttaaatatatgaaagcaaagtttcttaaaaatattgctcttcaacgcatacaaccaaaactaagcacacttctcaatcactaatccatgcacaatagcttgaaccttcttggaagattggaaaattttcttatacactttcaatgtatgcaactcacttcattctactaaatgaatagaaatagacagcaagcctattctaatcaacattgaagtagatcatcacaggaaatcaaatttcttgcattcaactgcagtagcaaaataacatcatgaaagataaaaatatttataaaataacatataaacaacactaatacaacgctatatcaacataatcattgaaagcatttacaaaataacatataaataacttataaacaacgttaacacaacactatatcaaaaaaatcattaaaaatctataaataaaattgaccaattcataaaactaaaatgaacaaaaaaaataacaagaataacaatatgaaaagttcagcttaaagaagaagaaaaaaatataattgaatatgttctctttctttatgttagtgaaaattcaattctttcgggcatttcaccaacatatggcatgtgtattttttatatactacacacacacacacaacttcagagcattttcttgtacactctcaatgtgttcaacttacttcattctacaaaagatatagaaattatcacaaagtctattctaatcaactttgaagtacttcaacactaggaataaagatttttcctttctactgcagtagcaaaatagtatgtataaacaacttataaacaacccataaacaacactgtatcaaatt

SEQ ID NO: 187354 - DNA, 2151 bp, Cannabis indica
tcagtgctagttgaattgaaattaactctgaaaacacaaaataaagttgtgtttagtattaaaagaatcagatcaagtcacttataatctaaatgactgaatctgtaagagtaatatgaataaaaaattattacaacttaagataaacattaacaaaataactttaaaattacttataacactaaaatcaatgatgatataaaaaaatgtatatatttgaataataataactagtcagtcacattagcttagccctatcccaataaacattcgttaaacttatatgttttaaaagaatttgaacacgatagaaacaacaattaaaaacattgaaaacatgagcattaattccatctctgaggtgtacaagatgtgacagctacaaaaacgccctcaatatcttctaatgaatgtattttccatgccaaacaaacaatctagtgagcaaaactaattagaaatgccccataaaaataaataaataaataaataagagcttaatttgccagaaaccaaaactcaaatctcaaacaataaatgtattaccaatccctctctagtaacatttactctatgaaccctctacatttcaaagaaaatacaaaccttaagagacataattttgttgattaaaaattcacaagaaaaagcagaagatgttgagcttctgattaaatgcttgtagttcttacagatcaggtaatcagcaaaagcaatcatacattaaaaaaaacagagacttattacttgtcaacatgtgtcaccttaaggagcacgataaaatatgcttctcatccaaacagtaaaagattaaccaataaaaatcacatttacaaatctattcaaataattaggtcacgtataaaaacccgaatcaccattaaaattagaattaccagaaacttcaaagtctggatagagccacaaggaaggatcccaatactaaatcttcaactgcgatttccagtaattgctatactaggcctgaaacagacaaaaaaaacatattataatcaaacgataaataagcactagcaaacaataaaaataaaagcaaattcgagacctaaccgagataatccccaaattcaaaactaaaattgcttcgattctcataaaaatcttccatgaaacccaaaaaacagtaaagcagccacgatttcgtccaagggaactaccaaaccctagaagatagaagagacgagcaagaagtaaaaaaaaactagtccgggttcacgctctagctgctctagctaaagctagggcgttctttataacattaatataaacgaccaatttatagaatataagcaaaattaaagccctctaagagtgtatgattaacatcagaaatcataaatatggaaacaaatcaatgcaataatattacaccaagagaaataattatgattcttatatacttcacctttatcaacgacgaatatcaaaaccctagccttgataacgccgaacacagataacttccacaaacacacaaacacacacactctctctctctaaatttctctcactactcaacctctcccaaaagctaggttttcattcctctctctccttcacaaaaccctcgctctctttcctcagagcttttttctttttcttatttcttttttatttattttattttttttttcaaaccagagcaaagagagagaaagagactcaaaacgtttcttcttcgcgtggagctaattttttgtttttgtttaattttgagttctcttgtttctctctggttccgtttttagttgctttgaaaccacgtgcgaagcgtgcgattagccgtgtgtcgggtcctggtcggggtccgggtccgggtggatggatatgaatatgacccagatacaagaatgggtggggaccgcctcgcctcttcgtttttatttattattattattatgtgaaaaaataaggtggggaaggttaaaaggacaaaggttgcaccagactacaaaaactgtcaattttcattctggtgtaccttttgtggggtcttcttataattagatagattagattagagattgagagagaaaacggagtctgtgactctgtgcccaaaacaagaggagcatgtccttgtccttgtcaatttcttctactcacgtgaaactacacgtgcctatttta

SEQ ID NO: 187355 - DNA, 1455 bp, Cannabis indica
ttttttttccttgtatctaattttaatcaacagatcgaacaaaggaaattacgcgttatatatagtaagatattataaataaataaaaaattacatgaacgtatgtatatattatataattatacatatatagatatagctagctaaaagagcatttatagaacacacttgatatagctagccttaaattaagtaaatatatgcaggtaaagccgcactacgaacaagtggttcttctatgcataaagtacacatatatattgttcctctattaattatttttgatataatgatcatcatatatataaatatataacttgacgaagatatgatgatcatggcaaagagagagaataaagattatcatcatggaccgcgtcaatcattgaagagtacatgagctagctagctatatagtgtagtactagaaaaagaaactaattaagagtaagaaaaagaaaaaggggttaattaaaattaataattaattaaagggtacgtaggtacttttaattattagttgtgagaaggaggatgtgtctttggaggtgaataatccaagttaaagcctggttgtttttcaccacgtttcttgtgaggcacccgccatgaaactgaaacacccgacttcttattataatcttcatcatcatcactaccttttcctttcttcttcttcattagctctttcggtctaatttccataacatctttagttttactgatcatgtgatcatcactagtacttattatttgatgatgatcagcttccgtatttgatgaggttgatttctctttctgctctactactactgactgatccttctgcagatttgaaatgaatatataataatatgagaaaagttgatctctacatataaatatatggaaagatatatatatatatatatatatatatttatgtacctacctggtgattagtagagaactggtcatgatcatttgatttcttgttgaagacatcaccaagaagcatcctagcattacattcatgaaaaggaaggcatagaaggaatagagcaagaatacaagagcaagtgattgacataattatttatatatatatatatatgtatatatatatggatactattaatatggggagaactatatatagattgccttttgttgtgatcagtattcgtggttagaaatgatgatatatgtaataatgtgggatagctgatgagaaaacttattgatgagcagcattaaatgcaaggatatcactactcatggatttaattaagaagatttcctagtagaacatggatttgtatgggcaatgagaagtaggaaagcaaaatgaaaatatgggtgggctcacttttgttcccttattacctcaatctatgactataacattttccttgttgctgggtcccattacacagagatctttgaaaaggaaaatacaaatattggagatatgta

SEQ ID NO: 187356 - DNA, 2192 bp, Cannabis indica
ctattttctttctttaaggttattcggccacttaaagtttatcttactgcatgctaattagtcatttaacaaattatatggcgattaataagattttcacatctaactttttaagatgaacaacatgaaacgttataggattcgaatcagaaatattgggagacaaagtaaataataatatataatttttatattaaaagaaaaccaataaaaaatataaaaaaaaaaaaaaaaaagaggaaggagccaaggccccctcactatgatctttctctctgtttttgttttcccatatttttgctgtgaaattcgtaagcgtacctaagaataagttatctacttttgtaatatctcatttacctaaattacaagattaacgatttttataggggacattccatgcatacagctaagctatatattacgatacataattatagtgtgtataaatatatatgcctttcttgtcgcaaatatgacaaacacctcgtgtctcaagcatatatatatataagcattaacttaagtgtgtgtgtgtgtgtgcacattaattttgaccagttcgtttcctccatctttagtgccatggaaaattttaataagtaggaccctattttttaaattatttggtagctaaaaaaggataatgtttttatgttttcagattaattggatatagacacattgatcttatcatatatatttaatttgattgatatatacagtatactcaaatgtgatttaaaggtgctagaaataatgagattaataaactgtagccgcagatgagatcaatcatgaatacagccatatatttgttgtattttcattttatatatatagtagactcgatttattacaaaaaaatacaatcaacctaattaagagagaaaataaaaagtatacaagaaaagaaattaaggagagaataatttacatactaagaaaaattttaaaaaaaaatacatgagtttatatattcaaaaagcacaaacagaaaggtaaggaaataatatgcatatatatactacttgatgtattgaaaagtctatataaacatgaaacaaataaaagatgagggaactcttcttcttcttcttttttacataaagatgttctgtttaaatatgttattttgagatacagagttctttttgagaggttgaatgttgtgttcaaatgcaaggatttttttggagagagtggaatatgtatgtccttcaagtacacacctttttttagagaggcggagaggtgaaagtgctatatatatggttgttgttgaaaaataacagtacacattcattgcttttttatacgttaagatactttccaaagacttcaacagaaaagaatttacaattgagtaaagacacttggatgcaatgtttatatacttacagaagaaaacaaaaaatatatatagagcaaagataggtggatgcattgtttatttagttgaaacactagacatagatcacagctgccacctatttggtaaggaaaaataggtacttgacatctcacgaatacgtaccaattttgtatcacatattgttgtttatcaatatcaacattctaattcttgttaggtatcaatgataatctaattcttctcaatatgaataatagtaagataaggtacaatacatacttttatcaaaagaaaaagtacaataaataaaatacaaaatactaaaaaagaatacagattttgatttttctttatatatgaataactatcatacttttaacttttgttgctggtcatcgactaagtaaataatttatccacaaatttgtatagagtagatataggaaatctagtattatcttttaaaaaataattatcatttttatttgagaatatattaatttgatccttgtgttaaatgcaaataagcccttatgttttttgaattgatagttcagacttcaagtttcgtaaaatatatcaaattaataccctaaacccaatttttgggacaatttttgagcaaactaatacattaagctcaattttccaacggccaacgaggatcagaactttggattaagtgatattgatagtgtaagatatataattgatattagaattaataggcttagtaattgtgtatatacgaatgagaaaatgatctagagatagagaaagagaaggagaaggtagagaaaacaaattaaactttaaa

SEQ ID NO: 187357 - DNA, 2527 bp, Cannabis indica
ttgtgatattcaaatgcttcattctcttttctttgaaggggaataaaaagagagagaaagcaaaaaaaaaaaaggttgatgtagctgcaggaacttattgctgtgaatcactaagaaagacagtggttgcattcattaatatactgtcaaaattaaacaggcagaagccggacagatgaatggatctatttagtatatatttttggatcacgagaactgtgcaatgtattcatattttgttatcgaggagtcaaggactatcttgcaaacataaaactatttaaaagttcatgcatcagaatgtccatgatagtgatacatccttcctgaacccaccacagcacagttgcaggtcttaacacttccttctttttctccagtatgccttttataaccaggccatcacataaaaagatagctaaaggttattttgcagtcttcctatattcattaaactccaaagccagagtatatgactattatactgtgcttgtctcattcaatatcattaaaatgagcaaagtttatcatgtggacctatcaattattattgatgacaaatcaagcaatggattgaaagaaatcacattcaagtatacgcaggagtcgaaaaaacaatagaagacatccactaaatttggcattagaagacttgaagagcatcaataaactgagatatcatttcaaagcaagctaaaaaagatggaaccttttcaggatgcgcaggcggtatacgcaatggaatctccaattccaaaggaggaccaactggtttctccttgatcttgtctcaatgttttcctcttcagactcgtaccgagcatcttcatcaggcactacatcctctggtcttggacttttctcatagctcccttcttcttcctcttcttcttcttcttccatgggcaatctctgaagcagaaaaagcatttatatcatcttctgaatcctaacccaaactcaggcagaatctacagataaagatcatatgagcataatgtttcctaatattgaaaactcactctagaatcatgatccagggcattttgaatagcatactcttctacttcctcgtcatcagaatcaccaaatacattacggacagcagcagagttttcaacgtgaatctgatccttctcctcttcagggaatctaatgtcaagaagtcagttttttcgaaccataaacaaggctgctgcttaatcaaattgtatacaataagcagatcgaattcttaaatcaattcttctcctcaatacaaaagttgccatagtagtgcagaaacaaattcaaacaacaatatagagtatacatataagagctgagaatgagagaggagaagagggaggctttaccctggactttgagcctgctcaacctcatcatcttcattgtcagggtagtgattttcttctgatccactttcaatcacatttcgtctccgacttgttaactcttctttctcgtcactatcactatatctaccttcactttcatctctgtggacaccaggctctacctcttgggaactttgatctctttcaccctcactttcaccaggatcaggttctgcatcacgcaactctccttcactttcaatttctacctccccttgcccctctacctcgccttcaccttcaggctctactcccccttctccttcatccttaaattgtataaaaaaataaatgttaagagagagaaccatcaacaatgtgtctaagtagagaaactaagtcatctagttttaggaaattatttcacagtaattcaccgaacaaaatttttggggcacacatacaaaaagcattgattcattgcaagcaaaatgaaaacactgatcaaaatataagtatgatccctcttaaacttgattatcattcaccacaatgtctcaccaaaaagtggggatgaaatttcattattaatgaaatggaatggtctctttaacataagcaaacatatatattctttagcaatgatgtatgtgtcgtaatataaagctcatgataaattcaacacaaccgaaggtgagatagtaattaaatatcaaacccaattccacaaattaacaattaacagacgagttcctagaatttccttaataaacttaaacacggtagacccaggagatagttttattgcaaaaacaaaccctcactcaaagagcttagtgggataatcatgtaatcagagctatacgttaaaatgcaagatagatatgatcatgttacaacaaacaagctaattaactttaatagttaaaacatatatcgctatacatccacttgtaatattacataccacgcacctaccaataaaaaagttccgaaaaagaatatatatatattttcaggaaaaactaaactttaacaaaaccctaacctatcagaaaaaagattcccagaccgtaaaaccaatgcatgcataccaattaccaaaccatagcgaacaaaaagaccgaagaactcgattgttgacctaaattatgtagtcgaaaaaggtagcttaagattccaataagctg

SEQ ID NO: 187358 - DNA, 4199 bp, Cannabis indica
cacaaactcttgtcctaataccaatagagtctaacaccacaacttttcattctaatcttttagtcaatctctgtgctcgaaaacgcatgtcgaaatattttttttttttcatggcagtatttcttatgcttacaatattatttctataaaatttttacctttttttaatattatcaaaaatgcgtttgaagttattttaatgttaaactgaattattagacttatattttcagtaatgtaaactattcggaattttttaaaaattaatataaataacactgtaactataacaaatataccgctatgaaacaaaatactctaacatataatttcagacgtgaatgttaactaagaagttgtaattagcacgcctctatgataggaatatggcagttctctcaagtaaaaagacagaaatacccctagatctaggtttagattagattagagcaacatggaagtgttgataatagtacatatatgttgggttttcaaggcccaaaagttgtggagaatgtccagacttcaaccacagcataaaattcaactatgtaagtttgttttgtgtcctaaaaaataaagtattggttttttttttaaaaaaaaaaaaagtttacaaattttaattaattaaacattaaagaagactgaagtgaaagaccccacgagtgggttttttttttttttttctttctgggtgttctggtttatagtagcttcaattcaaggtccccccaccctgcatctttctctctcttctttctctctctaaaagaagaagaagaaagacaacagtcaatcccaaagcaaactaaccccacatacccaacactatcaattttaagtctttgcttacttactttacttatgtccaaaaaaaatgaaaaaagaacacatttttatttcattaatataaaaacacaacctttctctcactctctcttcttattaactctttcaaagtttcaatctttctctatatctctatgaccccaatttttcaatttttttaataaataaaaaaaaaccctaaaaccccccctttttttttttattaaaaaataaaatatatatcatatcccaatatacccacaacacacacacacacaaacccaaaaataaaattaaaaagaaaaaaaaacaaaaaaattaaacccttccccaccaaaatggacttagcagatttgcaaagcaataacaagaacaacaagcttcatcagcaaaaacagtcatcaaattcttcttcttcttcttcttctccttcttcttcttcttctcatcatcaatttgtggtcccttttgatggcagatcttcttccaattcacctttcatgggctccatttcaatccaagctggtctttcccatagccatggccatacaaattcatcaacaacaacaacaacaacaacaacttcctctctttcaacttcttcttcttcttcttcttcaacgacaacaacagttgatgcttcactagccatagcaaccagatccgaatctcttcctcttaaaaaccagttagtggttgcgccggcggcgccggcgccggtgaaaagatcgactaaagatagacatactaaggtggatggaagaggtaggaggataagaatgcctgccacgtgtgcggcacgtgttttccaactcactagagaattgggtcataaatctgatggcgaaaccatcgagtggctgctccagcaagccgaacctgctatcattgcggccactggtaccggaacgattccggctaatttttcgagtttgaatatttctttgaggagcagtgggtctactctctctgctcctcattctaagtctgctcctcattcgtttcatagtgctcttgctcttgctgctcatcattacgatgatggtggcggttttgcccattcgggtttaatgggttttcaccaccatcaacagcaacaacaccaccatcaacaaccgtctcccccggttccgcttatgacggcggatcaaattgccgaagcgttacccgggggaggagatagcggtggtggtggtggtggtgattcgagtgagaattatatgagaaagaggtttagagaagatttgtttaaagaaaatagtgactctactactaatcaaggcggaggaggcggaggcggatcgccttcttctaatagtaataagagttttaagagcggtgatggtggtggtggtggtgatagcggtggtgggttgcaattgccaaagcaaacaacaaaatcaagatgggtcaggatcttctgggttattaagaccttctaatattttaccggctactgccatgtgggcagtagcgccagctcaagctagtggagctggcagcaccttttggatgctgccagtctcggctggagctggagtgtctccagttccagtagctgctgctgctgctgttacggtcagtcagcagcagcagcagtctgaacatcatcaccagatgtggacgtttccgactcaaccggtggttactcatggttcggggattaatacattgcaagcgccgttgcattttatgccacaccggtttaatcttccgcctcatcacgggaacatggagtttcgaggaggaggcggaggtggaggagtgagtagtcctcttcaacttggctctatgctaatgcaaccgcaacagcaacagcagcagcaccaaccttcgcaacatctagggcttggtgtttcggaatcgaatttgggaatgttggctgctctaaatgcttactctagaggtggtttgaacatgaattcagatcatcaaaatcatccattagatcatcatcaacaacaacatcatcaacatcatcaaaatcaacaacaacatcatcaacaacagcctcaaactactgatagtggagatgaagacccaaataattcaagttaaaaactttggggttagttcttgattattgatttaattaagtttacttttatgtttgtatgtaaatagatatttgattggtttttatttattttacattataggagtaagaaagatgtggttgaagattgctcatgggtttgtttttgaagatttgtaagtgttaaatttgtgatattttgagtgttttgtctttttttgaaaaaattattagtttttttcttaatgggttactaattgttattgtagctttgttgattttggtcattttttttagagattatttgctttgggaagagattgtattgattatgtaatttgattagttttggtcctaatgggactgaagaaaaagcagagagtgagatttgtatagaaggatattatatgatatgatatctattttgtgtttattattattataattaagaaaaaaatttaattttataaacaagccttcataaaaagaagaaaatataataatatttaagctcagaaaattatgatattggcatgcataaaagtgtaaaagttattttttttttttttcatcttatttatggagaaatgtaaagaatttcttgcattgttgtaacaagtgtttaaaattcagaaaagtagaaagaacaactcactacacttggcaagatataaataaatatacagatgagattgtattttattgtttgttaacttaagtttcttttaatgtgaaggactttttttagggcttaatttgtataggaacgaaaagaacaaaataatagttgtttgattttattttatttttaattttggggattttggatctataataattaaaaggaatttttgaattttttattttcttttcactaaccaataaaatgtttgatttgatgttgtagatatttgttacagtaaaatgaaaggtaccccataataataataataataataattatgaattatggttatagattatgtatatgtgtaatacttatttctctttccacttaattatctttaaaacattctttgctaatataatacttgataacttaaagaattgtttcagcttgtaaatcaagttatatctttataccatgtttaataatgtcttcaaaacatttatttatataaaattttcacttttaaattccaaaaatctttgatgatgaatgaaatgaaaaataagtggaaagaggacttcaatttaggacttgcaagattccattgtttttggtaaaattgtatgtttgtatatataaaatatgtatgtgtcatataatcttaatattatatttataccttctagatttagaaaaaaaaaa

SEQ ID NO: 187359 - DNA, 4844 bp, Cannabis indica
gtaacatgactgtgaagcatcagctccggaggtaaaagcatatgataattattctatcaatatatttttctaattcaatgtctaatgatattgatattgtgtcttgtatatattatgtgcggactagttctctgtataaactgaagggtaattaggattttttatctaataattgagattgttggattaaaggatttttgctaaattttgttcaatttgactagaggtgtaactaggcaattgttcatatatcaaatcgtggctctctaacttctatccttgtcggttgtcttttactaaaattaaacagaattggaaggaagtccttgaatccaacaatctcaatagttcattaaaaattttaatggcctaaaaagttcagggcactaatttggtacatgacatgtcaaaattcggggaaaaaaaattctaattagccataaaataatgatgggtctttcaactttgtttacttgaattggatagtccagttgtgtatgtggatttgcattttaagctgtatttgggtataaagagaaatagttcatcaaatgaaacaggaaagtggcaagtgttagttagataggcatgatgagtatttttaatgttagctcaagtgtttatagttgggaaagtatttaacacttagttaatcacaatactaacttctttagctatggatcctctaataacatttggtgacagtatgtgtatgattaagagttggattttttgatttatttttggaactcaggagaggaattgggtggcatcttctaaaggcttcagaagaactaatttctcagatgagttcgactagggatgtgtacttacactgcagaatgattgatgaagctccctttaacatgtacataaaagcaggttaccatgttgtaaagacagataccattttgattttattgatgttacaacgtcgcaagcacttgatgtgcaaaaagcttccagttgtaacaatctccgaagaatcatccgatgaggaatgttgatgaattaagcatgtttgcctgaggtattctaagctactcgcgcaaattgtttccttacaaaagaatccatattccttaatctcttgttaagaggcctttgattaatattcatactttattccacttctaagtaactcttaccccattacttctttactgttgatttccaagatcttcatgtcagtttcatctatgaaagattgtctctagtgtaaccccaacctacattttttgctgcttgtatccaggtgaaggatgtagttgaatgagatttttgacaaatatggggttggctattcgagtggcaggtcgaattggcatccagtaattgttgcttgtatctattataaaggtgggaacctgctctgttgcaggtattatcctcatgcaaactagtcctcatatacaatattttacttccaatacaattacaaattcacaatgcattcatgatttactttagttttttttctttttacatacaaaataatcgatttttaccatttaaacatatgatattcacggcactagaaatacaaatcattccccctcacattgcagaattttcaaacttaattcagaaacacctataactacaatcccattcccatagcctattgtatctagttacaattactcaattgcattatctatgaacctcaccaaattctgtgtcataatcttaaaatacttgggatgagcctccaacaagtaatcggtatcaatgaaatgatcgagcatattattattatgatataaacagtttaactcggtattattacagttaagctcaatagagctttctaaaagtatacgtaaccccacccaagccttttgaatttgtatagattatcagctggagttcttttacacattcttccatggagggcctttcactgctttcaactcgaacacatctcgatgccagattcgcaaacattgctatagactccatggtgtatgaacttcgactcagctctggatctattaccttcctcagtttctttctatcattcaatatatgccttacctggaatatgcatcaataactttcattgctcaaattctagtttcttgatagccaaatttcaaagagtgaaaaagtaaatagactttttcttttctaacctgtagaacaaggttttggtcgttcggtcccaggttcagatccacagcccgacgtccagtcaataactccagaagaaccacaccaaatgcataaacatcactttgtaaagtgagcttccctgtctgtcatcaaagcaattaactttttcactgttttggttttcatttgcattagtaaagataaataagtaagtctttgcatttacatgatttaaattctgggcataaagtatggtatttgcttttaacattgtgcattagtacatagtgatgagaacatttgatttttgagtctgagcctggggccacatgatcaggattgcttgatttggggttttagggaaaggttatcttatattttcaaacattcattcattccacaaaggacatgtttcacttacaattgaaactaaacagttgcttataaatgcataccgatgtatattcgggatcgaaatagccaaatgtaccaagcaccctagctgtgacatagatttcttggccctctggcataaacttggcaagaccaaaatcagaaatctgcaatgaaaaaaagaatgtgaactttatctcttttcaagttttgattagaccacacaaatcaccaactgatattgttattacctttgcttcaaaattggtatccaaaagaatgttggtggatttgaaatctctatgtacaattggcattccaatagctgtacttgaatggagataagctaatccctttgctgctccaattgccactcttagccttttaggccaatccattttcgcttcccctattcctagacaagtagaaaaaccttatttacttaacattatcatatattcaatagtattttttgacttgaaaaacttaccattcaagtgatcttgcagattcccatttttcatatattcatatacaagaaaccggtccttcccatctgcacagtagcccaccaaagtaaccagatttgggtgatcaagtctgctcagaatatcgacttctacacgaaattccagttctccctcggcttctttaaatggtgctagctccattttcttgattgctacaaccttttttgtgtccaaaacagtaagaaatcaatatatgtatcaccaaatacaaacattcttatacttattttgtttggtatatgaaaaattattatgtatctttgggaagatttttcatttatgttttttttcaccatacctctcctgatggcaaagtgcctcggtatactcggccgaaacccccttttccaagaaaattttcctccctgaatgaacctgttgccacttccatctctctcaatgtgaaaactgatgatccatggtgtcgtttggtggctcgtggcgtttgttcttcaatctgccaatgctccgcaggtttataaacccctgaaaaacgagtcataaacattaaaactcgaaactacgaagcctaccttagaagaagaatagaaaaagaagaagggaatatacaagggtctgaatgatcatgggatttgcttctccggcgcttgttccaggccgaaaccaaaccgaaaggcataatgggtttccctccaatgagatgagaatactaatcctatgttgtttttaataaatgaaataacagatcttatgatcatatgaaatagactcttggatagagaaagttagctgcatgacacccttcagagaaaaccattttaactttattacacgttcgagttaaaaggtcttgttcaagccaaaaactaaagaaaaaagagaaaagaatgataaactagtattttatttttaggtgtatgagaatttgatctgataagaaaatacactattctcaaaagggtacgtatagaataagtgaaggtttgattagaagaatttactcaactactacctcttcaacaactatagaattttaaagatatgggaagagatatggggttgaagagcttgaaatgtacttgaagaaaaagaaaaagcaatagaaaggaaagttggtatgtctttgacaaggaagtagaagctgtaacctcaccccccaaattctagtttcttttacagatttcttagcaatgaaaggtagccgttgagagggagttttcatctgaatattattatttcatttatttagtagtgttcttttttttatactaaatacccttctctctgtaagataaagtaattattatagtcattgtttgaaaatgacaagatggtcaataatttcatcaccatccatatggacctacagctttttgtttttgtattttgtttttttgtgtaaaggataccaatttattattttcaagcaatcttttggcaaaaagaatcaatttagatgccctaagctagcttttttctaagttaataggagtgtttagagccagtactagctttataaaaattgaatttgtagggagtgttttttggctacataaattgttaagggttgtttaaacaaggggttaggtccatattggattcaagtaaggctcattatgctgctggtttacctaattaagcctcatgccaaatgttggtatttgattttatattccttaatctcaatgatgggatagaagaccacacattgaaatgggacatagaaattcttgagggcaatttggtcattttctagtctacttattaaaaacatattgtgtattttgtcaagttactcattcttaaagtttcctcttttccattttgccttgaactaagagaaaa

SEQ ID NO: 187360 - DNA, 4261 bp, Cannabis indica
gaagttaaacataagctaatagcaaagcttggagcttacttcctgttgaatgacatcatcgcataggtgaagaagtgtacccttcccgctatctagttgtttgtcatacatcgactgagtaattaagttctgataagcagccatatttgcctgaaaactacagaaaaagattcagagaaatagctgaatcagtaacctatgggttcactgaagaattacattatcagagagacagatccatcatgcaatcacagcttaagggtccctcgtgatcaccacacgagtgaatccaactgagaggaatatcgtaatagagatacttcgggaatctcaattgaatagtaaatcaatgagcaacatagagcacaacaatccatctcccacccaatgcacatctggtgccaaaagcttggcattcgatcaactttgattttattatcataaaaattttgaaacaaaatccacactttgtagtgctcaatcaattacaaatacatttttggacacaaaatcaaatatgtcaatgcccagctaaacaaaaacaaaaaaagccaaattgacactctaaatagtcatatacacagcagaattaattagttaaactgttcaaagaaacattttctgaggggatccgcccaaatgatgacccataatcatgcataatacacacattggttaaagtagtacaaacgtgacgcatccaattactaaaaaaattctgaagagaacacttacgtgaagtatgtcttagcaatgtaaccaatcacaccagaaataacagcaaacatgacgaagagatcagcattaggcgtttcgattgagctaacaagggcaacctggtaagaaataaatggtttaaataagtcagatgaatagaagaaacaagaagaaaaagaggaatgcttgatacaaacttcagtgccatctaaaataaaagctgaccagtccaaccacagcagatattaggaacttgacccagtccatcggagttaaacctggatttttcttctctggctgcaaaagaaaaaaagtaccaacaccatttcatatggttaagacaagattgagaaagaaagacaactagaaaggaatttggggcccttaatgggttctgattagaggctaattaaaggagggaggtgactcacaagaactatctccaaatcagccattggaatgtttttaaaatgcttcacaaatattcctcgttctgtttttcccttgggacttgatcgcctagagagtcatcattcttatcaaaaaactatcatggtataattcttgtaaactagtttccgactgtaaaatgcagcaatctataaataaacccagaacaaaggtataaaagtccaacactcacaaaggtattatccattaactttccaactggttttacagtcacattttttaggaacccgagaaaaattatctaatatcagttctcaaccatgcataggtttaatcacaaagcaggcagtacctgtaaacaacaattatcctatcgaaggttggttcttggattgttgtcttgctcagcaatttgcctacactagaggatacagcacaaagaaagtcataacacagttatcagaagtacaacacaatcaacttatatcatatccaaagaatcaagagtaaagaaagaataattcaactgcttagaacagcaacagactaagactgtccattaatataactatggtataagataagaatgtaaaaccttaattccatattttcaagcctcttcctttcaacaaagaggtcttcttgatctgcatctgggattatctcgtcatccttctttggatctctcttatgtttcccacctggctttcttgagaaaattttatttagcctgcaagaagaagaataaaccaggaggagattatgttacagaaccaagtatacctcatttactctgaaattcagaccaatagtccaatttagcttgtttctcttattaaaatatacttttaaattcagttatattttttttcaatagtccaaatttatgataaattagcattatagcccccgataaaagaaaaaggtggctacatccctccgattatgtcaacagcagttgtaccccttatatcaagaagtcaaatgtactagggcattgtatacaactaatgctctcatatgtactagaaactgtataaaacattatcaagaattaaaacatactggaaattgtatatgacttatcctatccaatgcaaaatcagttgcacaaagtcatgaccagatgaactggactacattgaaattaatgcagttactatatgaatttggaaatatagacaatatttaccttgttattcgtaaaagatatgaccaaaatctcccaataatcatatccactttctccatgaaaaagtaatcagatgtttgatcaattccaatgccacgtctaaagattacatactgaaataaaaacataatatataagattttgcaatattatctttctttgtttggtttaacgataaaatgaacagccagagagatgcctgttcaagtggacagcacatagctatcaaaatcttcttcatcccccttctccttccgaacccaagaagggaaaacacacacacagacacacacacacatatacacatacactatccaaatcaagtaaaagataactatgactccttacaaagttatagtaccttatcagaaaaatcaggaaggtcttcctgaggatggtcctgaaaatatttctttagaagcttcttgtcaagctaaattcagaaaaagcaatatagtcagcaatacatcatggactgaatttgaatccaccacccaactctctttaatttaaagtaggaattaacgtgcaaaaccacaaaacatactttagaatcatcaacagtgataggaagattgagaagatattgaccagaaagtgccacttcaatctcatcatcagtagcaatcttgaaattactcttctccatcacctacatccaaagtttaaaattttaacaactctgtcaaagcatcagataacaatgtagataacaatgatgatgatgatgatgaaatggagggaataacctgaaatagatatgaaaggaaattttgttcaagaagatcaatttcatcttcagagagattttgttgctgcaatttctgagctccatgtacaggatcaaagagtgcatacaattgctgtaatgcaaaccaaaaacccctcaaaatattgcaataataataataaaataaagaacaaggaattaaaaagcaacacacacagagttcgatttttcattactatttctgtatcaaaaacaaagagagatgaagagcattatataccatcaaatcctcgaattgaagaaggtaccacgcacgaatggtgtactcaattctcttagacagcttcaaaaactcagcccggtcattactatgttctacacaatgccatattcaaaaattcaatcaatcaatccaaccattcacaatgcataccgattcaaacattcaaaagaaaacagagagaaaataaaaataaaacctatgaggttagccaaggtcatgatcaatttaggcttcagaatcggtataacggactcccgctctaatcgaatcacttctttcttatgatgctccggttgcagttgcgacggcgacggcgacggcgacggcgatgtctcctcctccattttcagaaaaatcgaatcgaattggggatagagtgagtgagtgagtctctctctttctctttaagaagattctacacaaagatgaatatctctgtatttggtttaagcatattattattcattcttcgaaagaaagaaatgaaaattaattaattaattaattaacttagttaaactcaattaaagatttggattaatgggtgattaattagtgttttattcgaaagtcgtttaagttaaacattttaatttctagttatagtagtttttaaatgctttgtaacgttgtaaaaagggaaggacaaagcatattattatattacacaaatgaaaacaaaaagacagatgagttccccaccatctgagctctaatgtcggcaatagctttgattttatttattttgtttcgaatttgataatgacaatgaaagtagaataataatatttctaaatgtgtggagagaaaaataaataaatgtcaagagaaaataattcattttttatggttcacttaaattagtgttgtaaatatggatagggtttttttgacaaggtaaaaagtacaactcgacacaaaaaatatg

SEQ ID NO: 187361 - DNA, 1110 bp, Cannabis indica
agttctaagtctgggtccatggtcgggtccgtgtccaagtccccaaccctgaaccttttctcaatattataatacaagctaatacaaatcatttgtaatttcttaaataacatgattcgcattatattaaaatttatgatcgtagtaattaatataatacaaaatttgttctttaatacaatatgactcttatagagcctaccaaacatatagctattcagataaacacattcttagcatattatgtagatattttgaggtttggtataaaattactcttcttgtctcccgctctctctccatttcttgatgtaattgaatgacaccagaaagcaagactgagattgaaaggtcaaatattgtatctgtttaatgcactcactcattcatcaaacttgtaagagaagcactaaagataaggaagaaaagagtcccgcattaaacagaatgggcaagtcataccaaatgtaaatgcaagagaaacactacaaacattaacttcgaaaatttccatggtcaatgacaattatttgtagctagaaactcaaagctattataggcgaactacttgacatttcccaggatcaatataatagagacatgaatttgctatcatgctagagaacaaatacaaagggaattctctttagagtcatatattgccggatcaaggagaagtataaatgaatcagaaagtaatgtcttagtcctaagaagaaaaataacggaaaacaaaaaaagcagttaactcatctcttttgtgcttttctacgcctagattgtgccttctgccatttccttcttgaaaccagtttgctttttggtttcagttttaattcaggtgagaacttgtaattgggatctctcattcgtgcttgaatatccttgaaaaactgcaaattcaatctcttaggcctccctgtctaagctctgcatactctggtccagagactatattttcaaatgcacctattagaatatctaaatcactcatgacctcccacacattggtgtaaacgcccatctggccctttcttcaattttttcaatgcatctcactgcaagttttctagcttgcttcccacggtgcagctcctctggttcctgctc

SEQ ID NO: 187362 - DNA, 2705 bp, Cannabis indica
gatagaaaaatattaaaattagtattctattttcccttccaacaagaatcaaaccccattaaaaaaaatcaaaataattaaaataaaaaaaatgattaagaagtcttactcttacatgcatagatcaaaagagaaaactcaagcttttcttgaagatctttattctgagtagccattaatttctcttctaaccaaagccttgaatccaaaccacttcttgttctaaacataaacacagcaaatccagatgatgatgaagatgatgaattgaagaaccaatcatgaacatcccaaagtaaatcaaccaataacccatcaacaaaaatggtttgattccctctaaaattccattgaagtctcttaactctaatcacaactttcttatcaatactcaccacaagaacagggtgttctccactacacttgattaaaacctcatgagaaacccctgtttcagaaaactgagcttttgtagagtaaagagtgttaccagagcaatgttcatggcgagagattagagatgttttggccatttgggttttgtttttgagctttttggaaacaaaatcttcacccaaatcgcctaaaatgagtccgatttctgaatcgaatgttgccactatataaaacccttcaatgggttctggtccgttttcgaatttggagttggaaagatcccaataaagttcgatttttgagccatgggaatcgaagattttgctaccctttttcttgcgaaacaaacgagagtttatgttgagtttcattgtggctaatgggtcttcaccgaatgatactgttaagccttgtactgagttgtttcgacaccatgtggtttttacaatgatgtgtttttttggggggtttgagagaatcactctgtggattgaaacgacggcgttttgaatggagggaattgaagaagctggtgttgttgttatacatgttgatgctgttgagtagtttgaacatgatgatgatgataatgggtttgatacagtcactgagttttcgctgaaacatgatacaatgtctctcattttgagttttgggatcgaaaggaagggttttgtgatgtggggtttgtttgtttttggattttgagttttgggttaagggagatttgtgatttggacatgaaattttttagagaagatgagaggtttaaaaatctcttcttttccctttttgagactaaaatgaagggttttgagaagtttgtttttggattttggattttgggtaatgagatatttgagatttggacatgaattttgagagattatgagctttaaaaatctcttctttctctgttttcttttccctttttgagactaaaatgaaggattttgagaagtgggttttgtttgtttttggattttggcttttgggcaaatgagaaatttgagatttggacatgaaattttcagagaagatgagagaggtttaaaaatctcttctttcaatctctctctcactcactcgttttcttttcctttttgagactaaaatgaaggattttgagaagtgggttttgtttgttttggattatggattttgggcaatgagaaatttgaggtttggacatgaattttgagagaagatgaagtttaaaaatctcttttttgagaccaaaagcaagtactttcagagatggggtttttgtgttttggcttttgaagaaagaaaaattaaaacttggacataaattgaatgagagagatttggtttaatttgattaaggaaaagaaaatttcaggtatgagattttaatagagggattctctctattaaaaatggagtatatagaaatggaaaatagatttgaaaccttcttcaagttaggctaccttttttttgtgtgacagttcatataagacatttaaaaataattaattaaataaataaattaaagaaggtggttttggtcttttgagacttggtcagtctagaaaaacaccattactactattagtgatataattgatgataatggggggtttttcaattgttatgtttaattagtttgattaatttatgtaactgaaaatttggaatttattacaaaatatttaataaattcaattcaattgaatggaatggaatagtttttgtcagtgaatctaagacagaaaaatggtaacttaaaaatagtcaaattttggctttttgaaatttgagaatgatgtcatgaattaaaattggaatatttaaattgatgttatttgtaatcaaaattggaatattattctaaaaagaaaaaaatatattaaaatattaatggcgtaattaagtagtaatagtaatataataattgctatacatacatagaatagaaaaagaatataaatattaatggtataattaagatataataaataacaataactaatttagctcattctattttagttaacttatgcttttttaatgttttatataaagttacgaaataagtcttaatactattttttggtgaaatatttttatgaacgttacataattacatttgctaatatctttaatataatcttttcaaataaatatctctaatataattaaaattaatttatcaaattttattatattgtcgtgttaatttccaaaaataaattatgatcaataggtttaattgtatttaggatattaaagtacacaaagttattaccaaaaagagagtggaggatttattttaaagtttctta

SEQ ID NO: 187363 - DNA, 4463 bp, Cannabis indica
tttctcttctgttgttttgtttgccattttgttatattttatgttcatgtgtctgaattcttaattttgttaaaaaaaaaaatacaggttatagttttaagtgcttctgcaaacaagttggctaatcttaaacaacaagcatcagcatatgcatctttgatcatggaagagcttgatcctgaccatcttggttatatcgaggtgaatcgttgttcatgtatcatattgatgttattaagtatcgagtctgtgttagttttttcattttttttttcgattcatctttctcagtatgttgtttccaatttttgacagatgtggcagctagaaactctactcaggggaatggtgaactcgaaccccgaagagactagcaaactttcgaagaaaactcaaactctcacaagagccatgattcccagaagatacagaacaccattgagcaagttcttgtccacaactgaggaactcatctatgaaaattggaagagaatttgggttattggtttgtggttaaccataaaccttgtcctcttcgtttggaaatactatcaatacaagaacaaaggagcttatcaaatcatgggtagatgtctttgccttgccaaaggggctgctgagactctcaagttcaatatggctctcattcttgtcccagtttgtaggagaactctcacaaaactaagatcatcatttcttagtaaattatttccttttgatgataacatcaatttccacaaattgattgcacttgcaatagcttcaatgacatttgtacatgtcataatgcatttgacctgtgattttccaagactgatttcatgtcccaaacaaaagtttatgaaaattttgggacaagatttcaactttaatcagccaacatacttggatttactcaaaagtattccaggcataactgggattctaatgatccttctaatggccttttcctttactctagcaacacactcatttaggagaagtgtcatcaaattgccatggcaattccaccatttggctggcttcaattccttctggtatgcacatcatttgctggttcttgtgtatgtactccttatcatacatggctactttctatatctcactcatgattggcacaagaagacggtatgtattttatattctcgataatacttatctgataccctgtaattaattttatattttgttaaaacacaaggtactaaacgagtatattattcataaacaacacttgaaatgatgatgaaattattatgtgtgtgtgcagacatggatgtatatcatggtcccggtcttattctatgcaaccgaaaggacttattcaatcatcgacgaaagcaaccaccgagtaaacgttattaaggtcagtagaatcattatagcaccaccataaggtttcatacagctacaggtgtaattcaatatcgagtcttacttattttactttaataatgattatataaaaccgctactcatagagtttcactttcacctcataataacaatgctctttttcattgtgatttgtctacttatgaagtttttcatcaaatttatctcctcagatgtattccttgaacattgcaggcaataatatacacagggaatgtactagctttatacatgagcaaacctccaggattcaagtacaaaagtgggatgtacctttttgtcaagtgtccagatatatcaagttttgaatggtacataaattatatatatgtctagaaaaattgattatcatgtcatgaactaaatttaactcagagaaatggtattttcaggcatcctttctccattacctctgctcctggagatgactacttgagtgtccatataaggacattaggagattggactacagagcttaaaaacagatttgcacaggtgatatatccatattaagttttgttattccctaaatcagattatttgtttggaatatacctcaagataatgtttggttgagttgaatgtgaattggaatggaatcaccattcttaaacatataagattcatttgtttggtttttgcatattatacattggaaaggaatgagtgctctagtatttagtggaataagaatttgttatcctttccaaaagaagaataaagtaggaatatttttaagctaattatggtttattccactcgaatttttcatgctattaaaaactttcccaaactattgagattgttgaatttaagaacttatgttcaattctactaaaggacaatcgtcatgttaagcatctgttagtaaaatttaacggaagttcttgaatccaatcatttcaatagttaagaaaaaaattgtaacagtcaaacaagtccattaattaccattcttgttcttattcttatttcattccacttaatcaaacaccatcttaatgaaatgcaggcatgtcaaccagaaaatacgcaagcaaggagaggaaacctcgttcgaatggagaccaaagcaatctcagactacaaatgtccacaaccagagtgagcaccaagattctcagactaaaaacactcatactaaacttgtccattttttctatatggtaccttaccaaacatgtccactttttcttatgttaggtacccaaaaatcctcatcaagggaccttatggagcaccagctcagaatttcaagaagtatgacattctcttgctcataggtcttggaatcggagcgacgcctttcatcagcattcttaaagatcttttgaacaacattaggacaaatgatccagaatatgtgagtcatgaaaggctaatcaatcagatatagtatcttgttatgttggaaatatggtatttgacttgaaaatgtttgaattactctaatgcagggatcatcaccaggtggtatttcactagattcaagtaaaaaatgtcctaaaagagcttacttctattgggttacaagggaacaaggatcctttgaatggtttaaaggtgtcatggatgatatagccgagtacgaccaagatgtatgtttcgaaaactcataacacacttatttatgacgtgtttggttagaagtaatgaaatgaaatagaataatcaagaagaataggaatgaggatgatatttttatttctattatcatcttcgttcctattcttttgttttcattctacccaattaaatctattcttaatttttgtaaaagaataatagaaatagaaatgagaatgagaatagaaataggaatagaatgaaatgaaaatttaaaatatataaaaaaaaattgataaaaaaatcattaagtttttactcatgttacatttaaatgatttttccttttatttcaaaatgaaataatcattctactaaaatagtgaaaagggtattctattagaatgacattctaatactgtaaaatgcagccaaataaaagaatgaaatgaaaataatttcctttccattccatttcattacctccaaccaaaagtcaccataaattattaacataataattttttttttctataatcataataagtaattttacaacttttggtgggtctcacctcaaattaatttttctatctacttttctttctaaccaaacaaacatttgtcttttttcacttctctctacattttattccaaacttttcttttctctcccttttctcatctaccaaacataggtagtagttttagaactcttcaactcatgtcaatttctatgtggtctttaaaaatatttgcagcgtatcatagaaatgcacaactacttgacaagtgtatatgaagaaggagatgcaaggtctgctcttattgccatggttcaacagctacaacatgctaagaatggagttgatgttgtctcagaaagcagggtaattaatcattattaaacctcaaaacaaatactaattaattaataatcattaccattattatgtattatcttcagtttttaacatgtcacatttaaaacagatcaaaacacattttgcaagaccgaattggcgaaaagtgttttcggatttggcaactaagcatgaagcctctcgaattggtaagcaaaacaattttagttaaaagaacattttggttaattttattctaagaaatcttggaggttggattttagtgaaaaaaaaaaaagaattctcatgtttggtatgaaaagaaaattcgtatagaaaaaaacttgattcaacaaattttttttcataccaaacatgaattttttttttttcttttctcaccgaaattcaacttccaaacataattttaaagaacatgaaaataagtttgttgttgtgtttttgatgttgttattttcaggtgttttctattgtggaagtgctacacttaccaaaccattgaagaaactttgccaagagtttagcttaaattcatcaactcgtttccactttcacaaggagaatttctagattataattatacataattaacactcaaatacttttgttaaacaagaa

SEQ ID NO: 187364 - DNA, 954 bp, Cannabis indica
catcagtacgatgaccactctgagtttcaagaagcctcgcctggaaatcgtctgttgctgctctgtcggattcaatgaactccccaacttttgcacctatcaccactgagttctgagcaaccaaaaaggggtagaagtccatggatttggacccaaactgctgctttactcatacacacattttgccaccttccatcctctggccagtcccttatattcagaagctggttggaaatcatccatggccgtctccgaagaacctccttcttgtccagttcattatcgaagaagaaaccccaaatgcctttctcaagagttttaatcttccatgatccttggaaaaaagaccacacctctgacatggtatcattttgattctattcctggagaagctacgattccccatcatcttaactatgacccctgatttagctacctcagcacttatctcgaaatcagcctctagttccaacgtagcttcctcaaggaactgtaatcgcaaagcttcaacatcatccatcatcgcagaacttccttctcctgtctcagccataatagatgttcgaagaaaaccaagaaatacaacgccgtgtatcagttagggaaaacccacatctcattcagagaaaacattcttgatatagtctttattaacactaacagagtaatattgtacctaacagagtaatattgatatctctatattattaacgcactctttttgaagcagtcttttttctaaaaaagtttatatgtattatgttttatcagtgatttttctggcaactaccttactggtaacatacctgacttcttggggaatatggcttcgctttactccttgtaagtgcataatatatatatatatataaatactaggtaaatattaaatagaatgcatgtatacttatttatatatttagtttaattcatttaaataatttatatttcaat

SEQ ID NO: 187365 - DNA, 2292 bp, Cannabis indica
ttttttttttatatttacaaatttaatttctatttcttaaccatttctactcaagagaattgaaaaaccaactcattttacagcaaccaaatgtgggaaactctctctttctcctcccctccaaaattaagaaacatatacatggtattaccaaaatatcttcacatacaaaaacttgtaaaagttaacaaaacgacaaaagaagtcactttcttactcagctagctaatccctcttactaaacctttattcaaacaatttatttaataatgttagcccacagaccgaatattgggtcccatactaattattatgaaatatggttaattgacctctaattggtgggtggtcaataataggagtgctttgaaaaaattcaattagtaaattaacccatattcagtttcagcaaaaaaaaaaataattaagaaataacccatatgtagttggagtaactcatcttccaggaaaattcgtgtaaaatgattgatgaaaagttatatttgttaaataattcatgagattataaaactacacttacacactgagtggtcataaataatttcgaaaatttacactgaacaatcatacattgtttaatttcaaattacttttttctttatttcacttcctaatttttaatttatttagcaaatttgttaatatccaaattaaatttatctgataatttcattttttgaccgttaaaaaaaaagggagttccactatacttatcagaaatggcgccggctcatctgagaggagggttgaatatgatgtttcaactggcaacgacgctcggaatcttcacagcaaacatggtgaactacggcacacaaaatctccacgattggggctggaggctctctctagggttagcagcagtaccggcattcatgatgaccgtcggaggaatcttcctaccggaaaccccaaacagcttggtggagcgaaaatccaaagacaaaggacgagaagtgctggagaggattcgagggacctctaacgtggacgctgagtttcaagacatcgtagacgcgagcgagattgccaattcgattaagaatccgttccggaatatatttgagaagaggaatcgacctcagttggttatggccatcttcttacccatgtttcagatcttgacggggattaactcgatcctgttctatgctccggttctgtttcagactatggggttcggtggagaagcttcgctgtatgcttcggccatcactggagctgttcttgcttcttctacgttgatttcaatggcgaccgttgatcgattgggacgtagggttttgctcatcagtggcggaataatgatggtcgtttgtcaggtacttatcaaaaccaaaactgtttttttttttttaactgaaaattcatgatgatgatgacgaaagaggtatcccataaatacatacaaataataaaaaaaattacaatttattaaattttatttagagaaaataaattttttgttatgttgtacacgtcttaatttattttgtattttttattatctgttattttaatgttatttaaatattatttttatgtaatttttttattatttttgtatttatagaaaacggtaaaaataatttaaaaaattaaaataatataaaaatataattttttttcaacaaatagtatcttatgtaattattcattttataaatactaaaataataataaaaataattacaaaaattgggtattattaatattttaaggatttttttttcttttttaataaaaataccccactatttttttctcaacaacaatgttgcttttatgtgatgccagagttatcaaatacagtcaaaattgaaaattgactgtggtgagggagtaatctttcgtttttatagtttgtcgtttttcatttgatctctcagggtcaatatcacaatctatgtagtttacaatcaacgttgttttatgggattggagttgttcatttgtgttgggtgttgttgtcactttccaattactttctttcatcagtcattattgttttggatattgtagttactagttactagttactggacctgaaaatccaaactcatcccaagtttatttccatgcccaaattctgaaaattgggtattatccctctcaatttcatagtcatacatctcaatatatattgacatgtttttatgctatttatgaataggtgatagtggcgataatcttaagaatgaagttcggagacaaccaagaactctcaaagggttactccatattggtcgtgattgtgatatgtctatttgt

SEQ ID NO: 187366 - DNA, 709 bp, Cannabis indica
gaacttgcgatgtgcctcctgaagcaatgatgacatgctactcatgaccattttaaatgctactcattatcttccctcatttttggcaaaacaatttgatttcttattcgactctgatgccattaattgcaggatgtcatacagacattcaagtgatgtaactgtccttttggttttgtccacatgccaactgcccctagtcgttggatcacacgatttttaatttttgagtgaggaccgttggatgactaacaattcacgttgcctccgctagtttataaaactcctcattcttcttctttatagcttttactctcacatttctcaaaatctccaaaccagtcgaaattccaggcagcccagacttccttctactctttctctgatgttgccaagctcagttttactggcgtttcgtatcaatatttgcaactgctcgattttcttctatttgtaagttactaacttcaagagctttttctttcccttgctttatttctgtaactttattttgtgatatgctggcatgactgtgttgttgatatgcatgactgtgttgttgatactatgtgtgtaattgggggagttttcccaagtcttgttcaatgtttatttttaggcaagagatttccatgttagggctagtagacttcgccccttttgttttctttcctatcatctgcaccatatctagactttcactaactaa

SEQ ID NO: 187367 - DNA, 3265 bp, Cannabis indica
ttttttttttttttgctttttggaccgttgggctagatggaccctaaggcagtgcttagcccgccttagcttaggcctgaccctttaaagcatcgaaatttgtcaacattggctactataattttctatttcttgttttacattataagattcactaattttgacaatttttcaaaattatgtaacaaaatgatcagtacaatgtaaacattctctttagttaatttcatacaataccagttaatttgccaaattaatgaattttaccatcacaactcaaattacttgtagtaatacattgacaaacttgcttagctataataaattaaagtaaattaatggtagaaaaaaaattatatatataattaaaatgtacataaacaagctatatatagactacaagtgattaattatcacatcagaaaatcaaatgagtaaaaacaaaacccaaaaaaacagatcacccttttttttttaagagatattacacagaaaagaaaatcttggctactgtttttgatgaaacaatcgattgattcgtaaagaaaattcgccattgctggcggttttataaggtgcttgaggaagatcgagttgatgatcgcgtgcttgaactggaatgatctttccttaataaggcttctagattttgaaagcatttcaatggcctaacctgtacatgtttaatgtatatattgcttaaaaaaagactaaaatcgcaaccaaatattgaaaatttcggtttgtacataccttccaacgccttttatgaacgacagtgttgtgtatggattcgagctttcttataatttctctaaatgttggtctctttgctggcttttcattccaacaggcctcgattaacctataatataagcatgaagaacttataagctgaattggaaaacaaaagaaaatggagaaaagagttgaaagagcttttgagttgtactcactctttaatcccatgtgcataaagcttagctggagccttaaaaggtgggcgatcacttgcagaatatagtttaggaacttcggtatcttgttttgctgaaaatggtatacagccttcaatcatctgcaatagagatattatagatatatatatatatacattagtaaggcttgacataacaaaataaaagatcaccatcaaatatagatattaagaggaaaaaaagatattacctcttgtagaattaaagcaaatgagaagacatcaacttttgtatcatattcttcattttgaaaaacctctggagccacatatcgacctgtgttgacaaatcaacacattcagagttacaaacaaaatatagcttaatcaaaatcaaatgtcaaatcgtgtatgaagcaatactcacaggaagtttcttgacatgtcaaaggcttgtcctccttaactgttagcaatttgctgactccaaagtctgctacttttaggtgcccagaatcatcgcgtaatatgtttctgttatctcacatgttaacaaaatttaaaatgagaatgaggatttggacactaattgtagttgtttattttgtaacatttactatgaatcttagaattttcaaatagatgcaaattcagtggcaataaagtccaataaaagaacttacgaaggctcaagatcacggtgaataattggttctggcttattctcgtgcaaataactcattcccctgcaaaatacaaaaacagataattaattttcatcatagtagaatatctatatgaaaaatcacataaaagccatccatgcggctaaaccttaaagggttttcatttcatatagcactgaatttagatatccctaatatgtatacaaaatacacaggcatgtctctatatcatctactcaaaatgtaggtgatcaagatatactacttgaccactctattcatgtctctaaaagtcactgtaggtgtattaattaagcctcatggaagagaaatgaatatcagtatgtattacttatgaatcaattacataattgagaatttaagtgcattttagaagagtaagagacctcgcaatatccagtgcaaatctcaaagctaaagcgggttttaatgctcctcttctgttcaaaaatgctctaaggtcaccctgcatcaaaagacagaaaataagggtccgaattacaaagccaatcttaatcaatctaaccaatgcatagttatctaagtattagacaatattggagttttcatgccaacctgtgctaaaacagtatagagtaaagaaattcatacaaaatcagttaagttatgcaattcagaaagtaaatggaagcccagagttagccatcaaaattatgaaatagattaatatattaatataggtgaaagagactagccgcactcacaaataacaaaggagtgaattaaactatatttgaggggggaccagtgaaatcaaatatttattaatgatatgagtgtcaagaaaatgatattcaatgctctgttcttcttgtgagaaaataaggtgatttatcaatctatttcactgtaattagattagctacttcattccattagactctataacaataaaaatatagagatgagaaaaaccttgggtaaatactctgtcacaatcatcattggactactttgagtcacagcaccaagaaattgaactacatttggatgccttatcttctgatacaatgcaagttcatctctaaatgcccgtctgccaacagaaaagggggttagtttcaataacccattacattcaaaactgaaaaacaattaacaagaatcttcaagatataaaaaactcacactttatcatcatctgtaatgactccctcctcaagctttttcacagcaacctcaattccgcgccacgatgccattcgaaaggttccctgagaaatccagcacaaaggtttgaattttaattaacatttttcattctataaaacatcaataatacaagtatgtaaatgttaccttatcaatctgaacactgtttgtgaaatcaagctcctttggatcaatttcatattcaggaacctcacgagcatgattaacatgcatagaagacatctaaaaaaaacacaaatcaatacacaaaaacatttacataatacaaaactatcaagattaaaagaactttacttaccaaaggcttagcaccacgtttctccaaaagcttaattacttcatcgtgtttataatgaattgcatcagcaataggctgttgttaccattgtttcaaccatcaattattaactttactcaacaaaaataa

SEQ ID NO: 187368 - DNA, 4361 bp, Cannabis indica
tgaaaattataatttaaattactatatatttttgtaattgagtttaaaagataaaaaaaactgccacgtagaatggtaattgactttaaagatgacgtatatattattgtctgctactcccgcaaactgatgcatagtaggagaagagaatagataagaaaaagaagcatgacttccaaaaacgactacgtttcgtacggccctctcccaccaaacccttactccgccaccccacaaaacgtcgtcgttctcccatattaccgcccacctccgcgtaaccacacaaaccaccttctccgccaatgcctctgctatgccgccgccttcctctttttctccgccgccgcttacttcctctacccctccgacccaactctccaactcgcccgagtccacctcaatcgcgtccgagtcaactcatccccttatctcaccctcgatctctccttctccctcacggtgaaggtctacaatagggatttcttctccctcaactacgactctctcgtggtctccgtcggttaccgggggagagagttagggtttgtgaggtccgcaggtggccgaattagagctaggggatcgtcctacgtgaacgctacgctagatctcaacggtttcgaggtcattcacgacgttttttacttgctcgaagatttggcgagaggtgtcattcctttcgatactgataccaagatcgagggaaatcttgggcttcttctctttaatattcctttgaaggtaagtttgcttccttttcttctacaaatagttctgagaacaatttttttctttattaaacaaaaactatttctggtcatgtttggcattttactggtcctctgttaaatagcggtaatataagaaatggccccattggggcttttccaatgtgtttagaaagaagagtaatgacatgtgcaccaaaagtaatgaattgaaaaatgtgtgctgcgtaattagatattagatgagaagctctgatatgaatgtggggaaagggatgacttgactgcagtgataaaggtgcacgatatgaagcttgtgatcactgatcagtgcccgtatggatggagtaataggtttaggtttgtgaaagattaagagagatttagtaaccacatggggttgtaaaattatgagatattggtattggcttcaattttcagaaagtgtgtgagttttgaatgctagtgaataactctttagatccaggactgatgctttcttaagttcaatcataatcattctgttttaggaatatctcaacaaagaaccaaattgtgtaaactatattggaatattggtttataattatttggtacttcgatttgttcttgtactgaatgtacagtccgaaacacatcttatttgcttgttagaggattttaaactgtgttgtttattttttgccaggctcgagcatcttgtgaagtctatgtaaacactagcaaccaaactgtagttcgcaaagattgctaccctgaggtaagaacatcttttctttcttttttggtattttcttttgattcagttagttggtgttctgtatgaatctcacttctagatgcaatgcaaaaaatctgtttttgtgatatcccattaagttctttgcactccattccattcatagagaaggagtttgttctgagttacatttaattagcttcacgctttcccaagttttcaaaatattttattgctccaaattaagttggaatttttttggatacaaccaattaatataatgtatgtacaattccatgtataggaaattagttgccactatttctcaaatctccattttacaccagtgttttctttttggggggccacacgccttcttttcctctaatacatacaagggactgttccttctcttgcatttactctgaaacacaagatgctttgaagtttgaagtactttttaatctgacatttttttgtctttaaaactacacttgggactggattaatacaatgtttatgccttaattcttggatggaggtgctttatgattttccttttatttgcatcttgtacattactcatatgattaaataatgagttatcctaattcaatctatctagtttgattgctaaacccaccaacttgtcctattgttttcacagtgatggtatagagaacctagaataacttcaatggaacatcataaatacaaggtgggcgcacagcttagagagtctggaggtgactgttgtatgtatgacgattgtggttaacccatgggctattcttccactaatcagttaggttggtcattaatgttaattctatactacagattcagaagtaaagaagttttttttttcatttgtaaatttgttttcttctgaatcattgtgtacttatttgggatatttctacaaacacgaagtttatctctactctgtacgtaaaaaaaattctatacgatgaatgaaatgatattatataaattggatccttttcgtttactgacaagttttggaggataaaacttcagttgattgcatatgcatctaattttagaaatgtaatctattgtctggttgaagaatgagctcactaataaatgaatggtttttcaagactttgttagacttgctacattggtaatatagtcgttaatggctatttatgctctctagtaaaaggttgagtttagtactgctaatctggtgtcatgtaatgatcacaatgggtttaccgatttagcaattgcgtggtgtagatatatacatttttaattggatatatattgtaaattttcactgtttagtattgatttgcatatggaattattgtcagttcgagttggatagcttagtagtaaatagatttgaaatgctagttgtgcttggtactgtatctagaaaagttggggagttataggtaaatgataatgattccatttcgctctttccaaagtaacttgctatatataaagtgattttacttgtctaggtgcaaccccactttgctggtggcttatgaatgaatcacaattaaatacacttttttttgtcttttattttcataaaggactctttgcctttgttcgttttaaacgtgttatttatagcagcataagctgcgtgatctaggtttgcataacgtgacgatttctggatttagttgagtattgctaagtaagggcgcctttgagaaagcatttttttttatttatggcaatttagtattaagtttcactttatttaatttaaaatataatatatcatatttaatatatattatatattttttgaacagatcatatcggaaaaaatatctttttgagaaagggttgtatctaaatctaattttatttttagaagaaaacccttttagagcatgagcaaaggggtcagtattaatcaacggcatcagccataacaatattttcattacactaaaataacatttagaattatgatcataacgctcaccaaagaagaggttacaaatttgaatcccctcttccaatgtaagaaaaaaaaaagcaaaataaaacaaaacttgaagtgatattaggcaacataatcatcaaacaaaaattgtataacacgattaagtaatatcgcagtataaaaaataaaaatagaattacttcaaattcacaactaatgaaagaaaggaaattagaaaaatataacatttttttttattatgagaaaaaaaatagacctaagattatttaaatgaatgatcaaccttataattaaaaaattggtaaaattgtatgacaatccagattttattattattatccaggttttatttatttgtttgattactttgtaattcaaaactccgaatacctttactgccaaagaagaagaaaaaaacactccggaaacaagcaatatcctaagagcatctttaattcacaatatgaaataaagcattaacgaatatgcctaatttagcagctttaacttctatttcataataaaagatgacaattaaagaaaaagtacagatgaagtagctagtttctcttttcttataatcttttcttttccttcccttctatttcgtttatttaattataagaaatatattacatgtttgatgaaagagtttttgtacacgtacgacaacttattacgatcgaaaacaacagtagacctaattagctagctttaataacttgttttctaacagttctaccagcccagctatactcagcctgatgttgcctacaccgaaacgaccccggatgttgggtgggcgagcacaagcagtactgcttcacgcgggggccactgctttctcccgctacctcagcagcctcggctgaggccacgcccactatggtggcctccaaagcatgccatcttcgttgcaatgttaagt

SEQ ID NO: 187369 - DNA, 1404 bp, Cannabis indica
atataaagtaagttaagaaaataaaaatatattccttataacaatatgaaccttttccattattttttttaatttgtgtgggcctcactagtttttccgattccaaaatttagtaaacaaataaataagaatcaatcccatataattgattctcattcccttttaataaacatgccattagttgataaggttttatatagcatcatttttcttctttttaagtgtaacaaaatgaaaaaaaaaaaaagggataatagaaacatatagaatattagttattatcttacccaaaattacgccaaaataggattgtaccaaaaatattggaaaccaaaacgataagatgcccttttcttttttccattcaaagcaaaaaggcacccattttttttttcctttctcacagtcctaatgtgcttgcttaaataactttacgtgagtttggacggtagatatataacccacgagagacaacttagatgtatatctaacacattaatttgtggtagtatggaccatccaaaataagcacaagagttagttgttctcttggccccatttatagtatagcattattaaatgttgcatcaattaatgccacgtggcctaatcacaaccggttgttaagtggggaaaaagaagaagcgaaatctataagatatatatatatatatatatatattcgttttggaccctttattgtatgtgggttgggttaagttagatgtaacaaaaaaaaaagtataaccatgttttgattcgatgcacgaagcaatggatcatgatatcaaggatttttctttgatatttttcttttgaaaaaattaaaattgatgattatagtctaaaaaatcttgtgagactatgaataatggttgtgaaatttatgtgttaactaactttaaaatgtggacaaggaggcatgcaaattatggactgagtatttgactttcaacttttcacttcgaacataattaatagcaatctttgatttttattaatgtattaacttcgtattaaaaatggtcccatgtcttaatattgcattgcatgcattaacaagactccacttgcatatataataattgttccctttttatttattaatttaaacaaaaaaaaaaaaaagtagggacatgaaagcaacattaattgtttaacgaggtaaaagtactactcagacaaattgaaaaaaaaaaaaaaaacttaacgtagacagcatgcgaatataattaagggaaattatttgtttatatatcctaataaaaaacccagagaatcaatattattttacttagaataaacatttcagtctgtcgaagcacctgaataatcttgattaatgtactatttttatatataatatgttgtttaatttgcatacacaaaatctgtcagtgattg

SEQ ID NO: 187370 - DNA, 4371 bp, Cannabis indica
gtactaattcacttgatttcttcatttaccgatcccaacgatggtaaggacttaagaaccattctccaaagttgaattttcttgtttttgatgggaagttttaagcagagaatgaacagaaaatttggtcaacgtactttcgattgtaatcttgtatccttatattgcatgttttcggtggatttggagtttaaaacatatttttgatcagctaaaaaaaaaaaaaaagagagttttttaatttcctttattgcatatgtaaaatagaatatttgaaaaataaatgatgaaagtaatgagtgacgcaaatgaagcaatacagatatttcagtttttataaacaccaaaaatcactagcaatgtgggacaaaggttgatttctagttttgagcataataaaaaggtccccctatgttaataactctctataaaatactatgtattggatacagggttttgttaaatcttcagtggtcactatagttgttactagttttattactaatgaaaatttggtgacgtagagggggctttgctaaattgctatcatttgcatgaagttgatctttattgttgcttcattttaagttttgttaaaattatatggaatttgtgtatacatttgagaaaaaagatgaacttaaattccaacattgaagggtccttcctttctgtacagacatttgctagatagtttagactaaccttttcgctaattcgaattgtgtcattttagttgcggttctccaatcactgaaggtagcttggaaaaatttacctcgtagctggtcagaatctcaagatccctgtggagtaaaatgggatggggtgagctgtgaagattcaagagtgactggattgtgagtttgtttttagtaccctttttttctgtgatttttttagtactcttttgaaataatatatgttaacaagatcactgttctgatcgattaatcacttgattaaagtcttctttataatgatctgcaaaaattgtgacttctttataatgatctgctaaaatttgcaggatgttgtcatccatgggactcaaagggagatttgaagctgatattgggagccttactgaattaagaaccttgtgagttcattcttattctcattcagattatcttattcttatatctttcagtgttgattcttactaaagaccaagtttaattaaagattgtgctcattgagatttcaatgtaattgcagggacttatcctctaacccagagcttacaggtcctctctctccccggttaggcgatttgaaaagcttgaatattctgtaagaactaataaccaagtaattttcatttaaattcccaccatttgaaaatttgtttacgttgtttaatggtatttcttctgtaaatattttagaatcctacaaggctgcggcttcaatggtcaaattccagatgaattaggaaaccttaaggagctatccttcttgtaagaaacaccataataaatatacctaaataatttgtgcattattgttcttggtttgatctcttgacatcttcattgaaaaattgttcttgacagagctctaaattcaaataaattcgttggtaacatacctgcctctttgggtaagcttacaaacgttcattggctggacttggcagacaatgagttgactggaactctccctatttcaacctctactaccccaggattggacaaacttcttaaggctcaacacttgtgagtaataatatagttcccttatgtatttaaggcattaaagatatcatatgctattaaatttctatttttcttaagggattacatttcagttttgatgatgtgatttaatattgcataaactttatctaaacggcagccattttaacaagaacaagctttccggtaccattccagaaggactttttagctctgagatggaactgatacatgtgtaagtttgttaccgttcatatcttggtcatcgttagttaatgtttgttttacttatctaacttcatctgattgttcgtcgacagattgtttgatggaaaccaatttactggacctataccctcaacaataggacaggttaccactcttgaggttctgtaagtaacatctctcttgacttaccttcttttctcaccatttatatttcatacttttacttgtttctaacttattgacacagccaaattgataaaagtatcttctctaatttgtctacagccggcttgatagaaatgatctatcaggggaagtgccatcaaatatatccaaccttataaatatcaatgaattgtgagtgcaacaaaattatcaaagagtataggatgtgttggttatgaacagatacaaatatttgactagtgcttaattatttggtaccttgtatgtttttcgacaggcatttggcgtttaacaaattgaacggctcttttccagacttaaccaaaatggttaaactaaactatttgtaagccaatagtcatatccagttttatgttcgtacaatctattacattgtaatttcaatctattaaagatcttttacttgttttctgcagggacctgagtaacaacacatttgatgcaacagaatccccaggttggttctcatcattatcagccatcacaactatgtaagttatttgtataggttactcagattgttcatccatcctttattcaaaagtcctttaattgtaaattcatgtactttatcttgaactgcagcatcattgaaaacggaccgctacaagggcaaattccagaggagcttttcagctctccacagttgcagcaagtgtaagtacagatatgaggacttaaagcttgatgacatttagagatatttgttgaaatagtttaactcacacttatgctcaacttttggcaggaaactgaaaaataatagattcaatggcacattgaacatgggctacagcatcagcgcacaagtgaatcttgttgacttggaaaacaatgatattcaattagtgacagttggattatacaatcaaacattattgtaagataatttattgtcattcatttttcttttcaaatgaaactaatcagctcttacaatcataatttctaaatatatgtttttttatagactccaagggaatccagtgtgtcagacttctagtagtgcagattactgcaagtttcagcagcaaacaacagagagctattctacaagcttagttacttgtggaactaaatcctgccctatgaataaagatctcaatcctcagagttgtcaatgtcaatatccttatgaaggaaaattagtttttagaggaccttccttcaggcaattgtctgatgacaataagttccatgacctagagaggagcctttggacaaaacttggccttaatcctggtgcagtgtcccttcgaaacccctttttcgatgttgatgattatcttcagattcggctgggactctttccatctacaggggagcgttttaatatatctgagattcagagatttgggtttcaattgagtaaccaaacttacaagccaccagaagaatttggaccatattttttcattgctgatccttatccctttgaaggtaattgaggttaaatattaagtaggaataattattttgttgttatattagttgaactaacaacaaagaaacacattatgtatttcagaagataaaggaaattcaataagcaccggagcaattgctgggatagcatctgcctgtgcagttttggttctaggccttgtagccctaggagtatatgctgttcaacagaaaaaacgcgccaaaaaggccattggattaagtagaccttttggtaataaaataaataaataaataaattgtatatagccattgttcatctttatcatctaaaacttcactttagtttacatagacatggcttgaaactacttagcatacataactaattcttcactttgttccagcttcttgggcaccaagtgggcaagatagtggaggtgcaccacaactcaagggagcgcgatggttttcgtatgatgaacttaagaagtgcaccagtaattttacctcaagtaatgagcttggatctggcggctatggcaaggtaaaagttcaagcttcgtggctttgatcaacacgtttgattttcctcaagttgctgccttttcattttttttttttgttgtttctctcaacaggtttacaggggcagcttcctgatggacaagtagtggctatcaaacgagcacagcagggatcaatgcaggtggacttgaattcaagactgaaattgagctgctctctcgagttcatcacaaaaaacctgtcggtcttcttggctttctgttttggagcaaggagagcaaaatgttgggtctatgagtatatg

SEQ ID NO: 187371 - DNA, 3601 bp, Cannabis indica
actgtaaaaaagaactaacatagtagaaaactattaatcacgataaaatattttattactaattagtaataattttattactatttattaaaatgtaaaataagtaaaaacgtaaatattaaattcactaataataatattatatcttaccatctttttagcatttttctattaaatattattaaaagaaacaagtgtacgattaattatttttattattagcaggtatataaattacaaccacgttggattaagttgaacaagagatttgagagagagagagctgggttcaaatgctttaaatttaagcaccatgatattcatagtagtactagtagaagtagtatcgtagtgttgcattgattcagatttcagatccagtacgtgggtccccatattttctccccatatagacgcacagcaacgcaagcaactcatcaccctaacctggtttgatttctctctttgcagacctaacacgtctccactcctaattacgcttccccaatatcccatcacactaactatatatatatatcaccacttctcagttctcattggtgttaaattctgtgatttctcttctcttctgatcaatctcgatattcgcttttcatttattttttatatatatttggattctttctttgccgtgcgtcggtgaacgtgtaagagaattaaagtgagagaaagaaatacagagagagagagagagaagtgtagtcatttaatgggccgaggaagaagaggacgtgaagaccttattccctaattacccttcaaacattgggattcatccccaaaaaattttaaaagcccattaccattaacgacgtcgtgtccctcctcaactctcccataatttcgtctccttatatatatacatatattttttcgtggaagtaaattgattaagtagtgatatgggaaattgtcaagcggcagaggcggcgacggtggtgattcatcatccggcgaataacaaaatcgaccggatttactggtcggtgagtgctcaagaagtcatgacatccaacccaggtcattacgtggctctcgtcttcacttcaccgaccttgaaatctgacaacggttcgccattgaagcagctcaagcttcttcgacccgaagataccttgttgatcggtcaggtttatcgtttaatcagttttgaaggtgattaatttattttttatcaattgaaacttcgagctaagctaacttattatatattccagaattttgtcgttgttttatttatttaattttgttttggaacagatgtgttgaaggagtttgcagcgaagaagagcgtgaaactaggaaagctgttgaaggagagaggaggagttgggcttgggcttgggccggaaaccaggaagagagattcgggtactggcccgattccgaacaacacgaactcactcaaggtaaaattaattattacaatttaacttttcgtttttgggagtacgtactcgtattgtttgttgggctgggcaaattcgtcatttcggtatgaaaatctttgtcaaatatgttattttttcttttccttttaaattgttattttcttgcacgcacagatagtgacttggtattttgccattttcttaatcatttatcttaacataggtcacaaattaacgaaagagaaaaattaaatagaatattttacttaaataaacatttaatccgtagctttcttgtataaagaaaatctctgaatatatactgctatcatttcaatttgtcttctgtatatggaataatctgaacttagtttgaagttggagccacgattctcgaggccatgtcttttttcggaaaacaccggttttcatttgtaaaaaagttgactcaaataattaaagcctaaggaaaaattaaaaagccattgtagtactgacaaagtttaaaaccaaaaaaaagttggtaatattgaaatttgcagattttgtttttgtctttttaacaagagtatgttgtatgtataaattttgctttaatcgaaggagtttggtataagcacgagtagtcattgtctcaccacgcaagtgcgtgcatgttttccaatctccatagtgtttttattaagtttttggtctttttattttggcttttgtattagtcggaacctgagattcatcgcatgggaagaaacgacgtcgtcgtgggtagtagtagtagtggcagaggatcagttgggaggcactacggagttagtggtggggggcaatggagaccagctttgcagagcatttcagaggttattggaacttgagaaatcatccacattaaaatccctcccttctcatctgtccccttcaaacgacacctctctctttgtcgttcgtgttcatcgaatctctttctctctctctttgtaataataaaaacaagccatatagcattaatagtttacttatttccatgatgttatgaatgaatgattagtcatctcaactaactgctgctagcttagctagatcgtttctaatttctatatatatgtacttagataattattaatcctatgtatgtgtaatactcaattaggtcgtgtttactataaatattgtaatttattatatatacttggtatgacttaattttaacgttatattattctcaattattttagtaggttcaactgatcagggtcgtaagagagagtaataaggttgttgttgttgttgaggttaggttgtggtccttttactactttatatatatattaagctagcttgtcagttcattattaatcgaactgaaaagtattacatcagctatatatagcttaacaagaaagattttggaaccaagaacaagtaatgacctggtatggttggagtttaaaagctttacttggtatacacactattatatttttaaacagtctttaatttattcattgaattttttcagtattattcactccaaaatccaaaagtgggaactgaaaatctgaaagatgccatctataattttatgtcactatgacatttacagtatctgtggttttgtttgtgtgtattgaaccgaagctttcaattatggggttttcggtttcatagtcaagtgggtttattattctgttggattcggtggttatcatttattgaaatactacaacaagatctgtcctattattttttcggtgatatggatggcatcatacaatattatcgggtacaaaattaagacctaatttgaggctgccacattagtaatatagtacttaaaactttttagttaattgatatttttttcaacttgatcactaatctataaggaagaaaaatgtatatgaagctaaatgatttgtggtagagagtttaacaagtgggatttttacaatattcacgataagaacaaagcatgcacagtccaacgccaatgaattttgactatatttcatgttttttaacctagtgcttttcccacttgtgttactctgtctctcattagatttttattggatttttgttgttgaataattggctaatgattcaagaattactttatcccatattttaatgcacctatatataggagctaaaagcttgctactacgagctctttcttttttttttctttt

SEQ ID NO: 187372 - DNA, 1888 bp, Cannabis indica
ttttcagcaagttacaaaaattccatgtaaaactgttttggcccctatttcattatttgcatttttggaaatacacaagttaaatatgtgattggggaataaacttatagtgatggatcactcacttacatttcacctatcaacttattgtcttctatgttttcagtaggttccaagttctctaattctcaagaaagaaattttaccttggtcccaaactctaattgcccaattggtctaattgaaacattcacgtcacaacgaagtgaaccttcttgcatattgccattactaacaccaagatatcgaaccaaacgctgtaactctgcagcatattctgcggcctcaataccagttctcatatcaggttcggaaacaatctcaagcaatggaaccccggctctgttcaaatcaacctgcaggtagaaacaatattgaaaagatagaacaagagtgcttcagtgcaaaattttggctaaactggttccatgtaaatttactagctcacaattaaaatgttcatacaaattgatcaacttcctgacaaagcagaaaattcgagtttcagtcatttgaatgatctaaactacttctaattaaaaaaccaaagttccacaatgaaggacaatttttattccctcttctctagagtgcctattgccaaactgcctcttgagtttatatatactaacactagaacagtagataattcagaagtaaacagttcagtcttcagtaagaaatatagaaatatgtagtgcaagaggggaatagtaataacctgagagtagcttccactttctgaatgaagcaatttccctgcatcttcttccatgtgaactcttgtaatgccaaacttcctatgcccaccaccatactccaatggaagatccaaatcaatgtatcctccagttgcaattggtatatcaaactgagatatttggtacccttttggcaggtctggatagaagtactgtttcctgtcaaacttggagtttaaagacaacttacaattaagggcaagccccactttcaatgcacactcaataaccttcgagttcaggacaggcaaagcaccaggaagacccatgcaaactgggcaaacgctggtgtttggtggagaaccatagttgtatggacaactgcaaaaggctttggtgagagtagagagctggacatgagtttctatccctataactgcttcatagtctttggagattttatcaatggctctagcattaggatgagatgaaactttgatttgagcaggaggcttctcttgtgtggctgattgggcctgtgtgcttttcattgtgcaaaacaagatcctattttttcttctgaacaatgctgttgttgtatggtagcagaaagggagcatttgaatgctcctgaaaatagcggaagtcatattcaattgtttgtatataatactaagttgtacaagtcctctgcaaagccattaacacaagacataagaaagctcggttttatgaaattcaaggctgaattcaatacaaatgagtaaaaaaacgaaagcccacataatacaattaatcaaagcacaaaactttaaaccatttagcccacacagaattgcttcacatttaatgcaaaggtaacttatttgtcactatgagaataattccaattcaaattgcttagaaacaccataaattagattttatttggagggaagtttctcaatgtcaccaaaaacttcatcaaacaagtaataaataccgtgtgaatatgtaattcgcataaaagaagcagaaatttctattctggaggtgtatgcaatcccatcgaaccaaaatcaaacaaatatggaagtttctttcgcttcaaatggaagaagattaagaacaaaatctcggaaccatct

SEQ ID NO: 187373 - DNA, 2679 bp, Cannabis indica
aactgttagctgcttaattttcccacatataagtttattactgtttcaggtaatgtcttctttggaaaagatgggaaaaagcttcaagagttctgaggaggctgtagtgttcgtacaaaatcaactttcggatgaggatttagaattagacatgccatccacgagatcttctacaacctacagagataaagctaaggttcatctcgaacagtctccagcaacatcaacgccttcggcaacttgtcatgctcttgatccttcagaactcattatatcctgtttagctaccatactcatggtgaaggtataaatacagatctttctcattatattgatatagaagctttttatggaaagttcaagttccaactctagttgatgattttgattttggttgacctttgtaaacaaaatgcagagatgcacagaacggccaatcccaccggctgaaattgcccgggtgctagactatgccctcacaactgtgcaaccgcgttgttcacagaaccgttttgcttatgaggaaatacagatgttaatgggcattattagaactaagatatttgcacttgtgcctacataagtcgtgctaaattcccctattatttttctatctgcaccatataacataattactactaggtttactgcagcaattatttgtttcttcccttttcttctaatgttttctaataatgttgtacagtatattagtgccagtatataagaataagttgagttaacagttttaccacgctttgatgttatttttattgcattgtataactaaattcatcaatagttaaacaagaaagttgtttaaaaacaaagctaaaaagccataattctaaatcaaattgtcaaataacattattatgagggctgtttccttacatgatagctcctaattctcaattgagaaaaaactctccagtgaagctattcgtcgaaattcacccaataaaattagacttttatatgatactataaacccaataattccaatcaaaatttaaacttcttcttgggtttttttatcaccttacacgcttgatccaccacctgccacacaatagatttgggttgaaaagatccaaaagttaagcaaacaaaagtgaattaaaaaagaaaaagaaaatacaattagtattaagttactcaccttctcctttttgtttttgttttttctcttctttttctttttcttttgtttctttggttcagaactctcttcttccaaacaatcctacatattatgtaacttttcattattaaataaaacacaacacttttaacagctactcagttagaagagctactcagttagaagatgaaagtaaaaaagcacctcagtctcagtgtcaccaaatgaatctacatgtttaataattcttcctgagcttgaagtacctgatttcatagataaggggacaaaaagaagaaatattaagcttatcaatataggtccttaattgacacattaaggaagtaaacagaggatttataaagaaatttaatgataggttacttcttcaattcactgaacccattaatatataatatatatatataaatatacttatattctcacttaaaagtcatgccaaaatgagggtaaagttattttttttttttacttgtgtataataataagaaaaaagttctaataaagcagtaacattggtttatttatttgtattttatatcacatttatttgctttaacaatattttaatagcaatattttgaaaacacattcagaaaaatacagtaacacaataacattagcatttttttttttgaaggaacaataacaatagcaaattaaagttaaaattttggtccttaaaaaaaatggtcaagaaattcaattaattaggaaaaggaataaaaaagttgaaaacttacttgcaagaacagtctcctgggcatttttgacggcgcgctcgagaagatctgggttaatggatgccaacccattgggatcttgaagctttctctccagaaacttagccaaggccgctgccttattcgtcgtcaatggtccaccaggatgagccaacctattccacttttttttattattatttcgtttttgagaaataataactagatactgaaatcaattgaaaaaccctaaagaaaaaaaaagggggtttatatgaaacctggtttgaggacgagaagaagaagaagaaggtggtaatgatgggggaagaggtgcgaatttgctacctctaagagctttcttttcttcttcgctcaactcttggatttcttctctttctttcttcttcattctctcatcaccgctcccaattttgaaattagggttatgtatatagaagactaaacgacgtcgtgtttggaggaccacattctttttttttaagacgtggtgatcaaaatcaattaattagacttggtagaaataaaaataatctgtttcgttgtagttttttttttttttgttttttttttttttttttttttttgaaaaataagtgtttataaattaaaataagagttagacctcattacatataatgttgtttcatataaaagaaagttcaaccatacctgtaatatttttagcaaaagttcacttagttacattatgagtcgcaaaattacaaaatttagaaataaatgaaaaattacaacttaacaaaaaattaa

SEQ ID NO: 187374 - DNA, 4515 bp, Cannabis indica
aattttaaagttcttttggtcttaaaaaaatattcattcgttttgcaagggacttgaataatagtgaaaattacgtacttttacacttaaagggagttcgaatagagatgagttgtatttgaaaagttatgaatcgattgataagttcaataccaatatcttgattttgaaacaacaatgctaccgtgttcgataaattctttttgacatcatctcatttcgagactcacgggccatgatttctacttgttgcataccttgatcaactcgtgtccttctagttattgttactgaaattatttttcatatattttttgaacttttttttatgaatttttcttacaaaatattttctttaagaaaaaaacgatatatttgtaaaatttgtcaaaaaaaaaaaacaataaaaatgaaaaatttccaagaaaattatgctgaaaagataaaagcacttttccttaatatttcatagtatgttttctttctcaaatttaaaactataattacttcaaaaaaaaaatgtacacacattttcaagtaaacagtacatgagatcactagtctaaagtctaaacaaaaataatgaaattattggatttatttatttatttttccctaaaatttaagctctaattagaggatcaagtttagtttaatttttttacacctaatatacaaaacaacaatataaatataaaaaaacataaaaataatacaattatacaagggatatctacttggaattggactaagttatctactactatatttggaattagacataaaaataggtttaaagttttttgaacacgcatgcataatagattaaaacatcaagaattttatttttgatattgtaaactatttataacaaatatcattataaaaaaaaatgataaaaaatattttagcatatgattttgagagtttaaattgattaagaaattttaataggaaattataattaacagttctcctaaataattaaatattttgtttttgaggaattaaatatttaattcataaatttttggagcagcagccagcagggttttagtggcatttcattgcagttcagctcatatcttcaaaagcagagcaatcgagctagggttttaacagaagagagagaaagagatgctgttcatagtgggactgggtttgggtgacgagagagacataactctcagaggcttagaggcagtgaagcaatgcgacaaggtctacatcgaagcttatacttctcttctctctttcggtatttcttcggatggcctttctacactggtacacatcctttctcttcctctttctcccccaatttcattactttcttttccatccatatttaaagctaacaactttatcaattttttattgctcaggaaaaactttatggaagaccagtgattcttgccgatagagaaatggttgaggaaaaagccgacgaaatactctctgctgctcgtgtttctgatgtggcttttcttgttgttggcgacccttttgggtatgttccttcaattttctgttttccttttcatttctgatttttttttttttgatttgatgaatgtatgtatgtatgtgttttgctgattttggcctttttcaaattccatggatatgatgataaatattcttacttagatcagtataaggtcctttgaaagttgttatgattgtatttgtagctctttgttttaattcatattagtcatattttgcaagtagtactgaattggataaaaagaaaatttcatacagacttacagttttgatagatattcatgaagattaagttatccaattgtaggattaggtgttcggattaattttgtcattattttctttaatttgatctaatcttactttccaaacactgacataaatatacatgtgatactttattcaatttacttcagtttattcttcctcatttaacatctggtttactatgcagagcgacaactcacaccgatcttgttgttcgggcaaagaaattgggtattgttgtgaaagtaatacacaatgcttcagtgatgaatgccattggaatttgtgggttgcagctctaccgttatggagagacggtgtcaatcccattctttactgaaacatggagaccagacagcttctatgagaaaattcagagtaaccggaatcttggtctacatactctctgcttattaggtgaggtgagagatgagtttttctgaaaatctgatatgagctgcaaaatgtcagattcttattaacacaatcatttctttaaacttttgttttcacagatattcgggtgaaggaaccctctctggaatctctatgcaggtatgtttccaagtgactgaccattttttattctttttgataaatttttacaaaatggctgtttagacactctcgatgtcctatcaaacacacccttagcactttgtcgaaaatactgtttgaatcggaagactaactaattgcttttctctgttgcttatttaattttagagggaagaaacagtatgaaccacctagatacatgtcgataaatactgccattgagcagctcctggaagttgagcaagcaaaagtagactctggtaaggataactactattactatcactcattcatatttaaacttccaatttcaaataactgaatcacagttggtttgttaatttttacattaaatgttggtgtattgttgtgttgcagtatacaatgaagacacagagtgtgttggttttgctagaattggaagtgaagatcaaatcgttgtggctggtacaatgaagcaacttcagtcgatagatttcggggctcctcttcattgtcttgttataacaggcaatacacatccattggaagaagaaatgttggatttctacagagttggaaaagagaatttggaacaagtagatgacagggcttcataatttttctcctttgtttcgatcctttgatataatattcatgtgctttcgttggttgtgaaagccgcattttagtaaggttgtattcagaattcatctatattatgagtattgctataaaacacattaaggtgttcaataccacgtactattatgatcccatgagtttttaatattcttttgagcatttgcttttgtcattcattaaaaaagaaaaaaatggctttccctttttttaaaaaaaaaaccccctttttgaatggaacaaccaaattcggtaaatccacttagtttagtgtttttgggtgttcaatttgtataaaaattagtgaagatctttattgttcttgatagataccataggtttcatatgggttgggtattctctaaaaaatttcttcatttcttcactcagaatcctcttatataatctgggttgtgcaaatataacttgggttcattgttaattctaataactaaactattatctggttaaggttaagtgattaagaaggataaattattgttgaaatgtatatctcataccctttagatgaatagtagatataaatgagagcaaaggagctagagacctttttttttttgaaagaaccttgttccagtagattaattgagaaagatgggatctacagggaatcccgccccgaaacaagttcggttcttaaagaccgattatgaatctgatcatcaaccatcaacacggcacaaccggagttcccgtccttaccggcaccatcaaccaccatctaccttaggaggatagataatatggataggagaaaacaatgtgagagtgaaatatgatcgttttgggcggttagtttgatcatctaattattgaactaaaatgtgattaatgatgattttcttcgagtttgactaaatgtgattaatgatggagtgctcatttaaataattacattagcttactgaaatatcatttataagtatctaagtattttaaagataaaatacattaaagaataaaataataaatttatccctactcgatgtaagctgtccatatatttagattgaaccaatgaatacttcatagcgtatctgtatttagtatgtaaagtgttttatgtaattaattaagagtgtaatttcgaatctataatgaaatagggtggaattaataaattaggaaattaactttaaatgtaaaaatattgagtcaaatataaaaataattaatgactatttcatattaatttttaaaaaaaaataatcatgattcttgtcaattttgtaacattgactagatacaagtaactttgtctaatcaacctcaataatagctatatttacataaaataatatatataaaagagaacatatatagtgtttttgataaatttaatcacaccaaacagaagagataaacatacaaatacatttgtttttatgaaattgaagatacatattatatatatatcgttatttatttgcatagcataagagataggacatgagattttaattatgtagttgtcatcctgatctattttccagcatcttcagcccaagataactgcatgcacaatcacataaatatata

SEQ ID NO: 187375 - DNA, 12515 bp, Cannabis indica
aatgtcattggtttgctcattttgcagctgatgctgtggaaagttcacctgatcaagaaattgttggtgaaaagtcgctagggagagaattagaaataccatggtttccgtctattacaaatggccgcatatcagtgcatcgtaaagaagtagtacgtgaaagaaagcaaaagtgggtttataaatgcacccaggttggtcgttttaatacattagttaaaatgtgtgctgataaagtaggatcggacattgctgttgagatttttggtaagttgggacgagaaactggtgtaaaagaatacatttcattgattaagatctgcatagagaaggctaggagcaccactgacgaagaggttgctctagaacagatccatagggtttttcgtttttttaaatcaatgacggaaaaaggttttccactagaagaggaaacttatggtccctttctagcttatttaattgacatggctatggttgaagaatttcatttcttttgtgaagttatcacagatgcaaattgtatttcattttctaagttaggctattatgagatgttgctatggatcaaagtcaataatgaaaaaaaaatccaagagctgtgtcattacattgtcagcaaggaaggtcaagccaagtctagcttacaaggtttgtgtttctgctttctaggctagctttttgttttttggttcaaggttgactttacttctatggaaaggcaccagtctctgcaattaggttttttagttacgtatttatattttctgacaaagtattagtacatatttcctttactaattgatctataataaaatacttgatagatccttcatatgatatttcctttactgatccaggattgagctatacttctgtagatgacattgttggaaattatggtgtcgtgtttgagtctgttgtgtatcgtttagtttattgaaatatttactcctgcctgacagatttctttgaataattgatttagggcttggggttgccttttggcttcataatgtaaagtgctttaaaggaattctattctctagtttattaagagagtgaggttatatatttaatgtttgccatattgtttgtttatgtatgtatcacattttattgctgtgatacctgtggttttcccacagccttgtatatccattctgatttatgaaacagttttgtttaaacaaactgttccaatagtgatacatgttatcctttacttttaaattctgtcgtgcatttgggtcctttcttgctattgttgccttttttagataccttactggctttaacttgtgatgcagaaaattacttgttagcactatatgaaggagggcgagatgcggagcttttgcagctattaaaaattgtagacattacacaattctcttcagtggactgtgtagatattatctttaaatcattgggaaagctacaactggagttgcttgcggagaagttctttcttgcacttaaaactcacggtatgatcatgagctggaattttcctatcaacccttgtatcaattcatccctttagaattccttccttcttagatggaaacacaagcaattgctgaacttacttccgggcacgccatgaacttatgtcatgtggtttcatatttgtaggcatctgaggttttttcttcctgaaaactaaaattattaattcctcaaggggttttaccaacttcctaataattaactcactttctatatgcaccaagccttgtattttgtctcatcagatatgagcgcaggatgtacatgtctcattttgctgttttcttcaaccccccaccaattatgacttctaatacaagaaaaaaagtgaaactctagaattgcatttaaatgtatgtcaaccatgacttaatatttttttatagatctgaggcttaggttggtttcttaggtcttgggtactttgctattaatatatgtagtcatgtcggtcaaattgcagattctggacaagaaaattttacacatttgctctacagttatgctgttggcgatccaaatttagcggtaaggatcttcttatgaatgctgctagtatttactaattcccttgagcccacctgtgtaagaggcacttctgcttttcatgcagtttgcttctgtaccaaataatgcattctcttcatatgtattgaatattttgaacttctcttgtcttagatggtgatgtcttggggttttgaaagataaacaggctgaattagatagaatagtgaatttttctctcaacttttggaggacaagtattctaaagaataggttggaacattaaagagacttttatttctacagctgtgcatttatttatttatacatagcatacttttattcttaatgcaaattttgatgtacaaatatgatagaacaacattggtattttttatacagcaagaagttccatccctgacgacaagattgaaaatatcgcattgttaaactcttttatgttcacagccaaagaaacccaaacattaaccttatcccatgaaaaggcactaccctattcacaatctttagaagctcttttgtttctcttcacgaccaacatataactgcacttgctacattccaaatctttttctgggcttttactgtaacttttgaagtttccttaggcagtagggccagtaattggaaccttaaaaggctcgcaaattataacattactcgagtcaagatgctgaacaattaagcaaataagatgcaatgtatcatgtatgcagaagtatgacctatgctgaacatttaaaaagatgctgaagtatgctttactaataaatcttgagtgatattcgtgatgtcttaacactaccctggaaactctgattaagattagttcttcctattaatgtggctgtcaacgtatttgtgtataatgtggtattgtaatattgtgacacaagactatgctattttacgtttaattactttttgttgggcattgaaggttgaagatgtcatcttaacgttcaaaaacttgcactctaaattagaggtgacaccttccagtgcatcttatgaaaagcttgtcaaatactgctgcgatttacgcaaggtaagattaatctattgacttgactaaatacaattacaagatatttcttctaaaatatagctccccattttattttattttgtcaggtatgttgaaaatagtaatctctttgcttactcaattaatgattatgttttgtaaacttttccctagtttggagattgatttgagattactcaatgtgttaaaagtttttttaatataggtgcatgctgctcttggtttagttgatgaaatgtgtgaaggaggtttgactgtctccacggaggcaataaacaaccttttgcttgcttgtggactaagccacaatttcaacctggtaaactttttgtttattattttcatatgtatactgaatactcatattttttccaaatgaaatacttttagtcttttgtttctgaaaagttgtgaaactgaaaattttcaattggaagaactttctcacttttcatgaccattgtatctaattgtaatttgtagtagctacttggaaaacttcatgtgaaaggcacttgtaccccaaaactacagttggtcgaagccctggttaaaacactgattataatacctttgaaaacaatgtcctctctctcacccttatatatatcttctgtagaaagggatccaaaaagaagaataaattaaaaaacatagacaagaaaaaataaaataaaaaataatgacaatgattggctattttggaactgaagatctacattttgttgacctcgtcatattgccaatttgtccttagtcatgtttgtttgatctttctttttggatttcattcgtaaagttctcagtggaaatgtctgtctttataattatggatttgcattagttgtattgctttaatataatgttgactttttcttgtgttctgctttcttctctaggttcatcgagtgtattctctaatctgtcatcacaacttacaatcaaatgctgaaacttttaggatgatgataagtttgtgcgtgagaatgaaagatgtaaacacttgcctctgtttctgttgccttgcaattatttagcccaaagtgttgggttttgaggtaatttagttttgtagatggctggtgcatacaacctactcggcgatttggagaaaatgaaaatggtgcccactgtcaacatgtataatgttataatggcaggctatttccgcgaggtattatttttgattcatcatatgtttttgttggatgagcgtacatgcttatatgtatttttaaacttacgaacatatgcaatatgcatatggtagaaactaacccagaaactcaaatgaataatctaatctctgtgtttatttattgatatcaaagatgatttacaaatggttccaagttattcgggacaaattggcatgtccacaagagttttgctcttactctttatacaaaataattagatgaaaaagattgaaaggcctaagctagtatttatacactcctataggctataggatagagaaataatgtacagaacaaattgacataacacacttggtgactaaggaaactaattacgaaagaattccaggtctgcaaccaacatcaattaactaattcatatgttaattgctttagttttattccttctattgtaggttaagcgtattgtaggcataatgacatttaagaaataaaagtgatatgtatatatattatgtaatttgatttttcacatacatgcttattttgcaacaacagtccaaagtggtcacacttcttaaaaatagagattgaaaaattgaaccctaaattctactagtgttgaagatagccactctcccccttccgctttccttacccgtcttataggtttcaaattctaaactacaatgctttagttgtccttgagttctatgataagacatagagggtagggtattttggggggcactgatgggtactatacacttgacatgtttctagctattcacgtggttggggacaaaatttagtgttgagaatgattatgtagagtgtgctgagagaagttagttacatggcattttgggtattagctattaggtgattgggtgtaaatatcgagagtggacttgacaaaggtcatggaaaatatgtattttgaagttgagagcatttgctctttggggagagattccaagtgtcttgaatatatggttttgcagttttatttttatcttcttgcaatataagtccatttggtctgcttgaagtgcacatcctttgatacttttctttctttcattctgcagaaaaactttagcggggctttgatggttctcaagcaaatggaagaatcaaaagtcaaaccggattccaaaactttaagctatttaataagcaattgtgtttctgaagaagatattaataaggtataaattctttttgtaattagtaaagattgaaacgattcaaattgcacacacttctttacacacaatgacgtgtgaataatcccaaccacaattaaaagtgatgtgatccccactttaaaatgatcccttttgagactttctatcattactcaattgaaatagtcatgatgtagtgaatgatattttttggaacatgttttgcaatgaaaatagtgcgtggtctagacttttatggctctttccacctaatttttggcaatcatattttgtcttgagaaaagtgataagctttttcttagttagaaattttcttatcttagaacagaagttgtagtagataatatgctgaagccatttttttttcttaggaatgatcgaatgatttttgtagtaaaggacattatcatgcaagtgaagctgtggtggtggtatcttgcttgaagttccttttcgtaatttcttaaggaaagggtcatcggcccgtgaccatgttaatcaaagttggatctagggttgtcatgagagggcatcgccatcgaccaccctattacttgcaccacttttgctatcaatgtcaaaattgattcccatcaatgtggagacccacttctgatattcagagccaataacccgttgttccagtaagtatttttaactttgctagtctgcttgtgccagaaacttgcgccccaataagtaaggacgccatttagctaccgcatagactatgaccatcaactcctcatagatagattattttctagcttacaatcccaaaacctagttgaactatgcaattggcttttgatctctgagaaaaaaaacacccaatccaaagcctgaagcatctgtttctataaagggtttggaaaaatgggaagggggagtaccagaacggtagtcatggcggttttgagtgtttgaaaggctttctccactttcaaatttccaaccaaaatattttttgagttgatttatcgaaggctgagccactctagcatagttggctacaaattttctatagtatcttgtgagaccaaaaaatcctttttactccaatttttttgatgtacgctaagcttgcatggcccaaaaacttttaggatcagcagctaccccgtcttcagaaataatgtgcccaaatatgaaatctttcattggctgaaatcacacttcttttggttgacaactagctgatagtgcgccgctaaggtattcaacacaaggtctaagtgttggatgtgttcctctagcaaaatcattctatttttagtattattcttgtgtagttgtaaatcaactattgtaatttattgattccctatttttagggtatagtttagaattttagtctgtcattattatttgatgttatttcccttttaagagatccttgtacatgttaaatacatggttttgtatgagaaataatatacaagaaattaccttctttgttgacttggtatcagagccaacgcacaaccctaaaccctaatcgtagcctgcttttctctaattccattccaccatgtctgatagcagcgagtcaaacaccacaaaaatcaatccctctgtgaccactattgttccagccaaatctaccactgttgaatcccactcgtccaaattactactattcgcttgaatggtgacaacattctgagatggtatcaatcggttaagatgtatatgagaggttgaggacagatggggtatttgaatggtgagaagaaggctccagcaaaggcagatccaacctacaacacttagaatgctgaaaattctataattatggcatggcttgttaattccatggaggatatcaactcgaacaatatgtgctatcctacaacaaaggaactatgagacaatgttatcgagatgtattctgttctcaaaaaccactctcaagtattcgaattgaaccttaaacttagagaaataaagcaaggggaggacaatttacgaagtattttaattcagtgaagcatatatggcaagaattggatctcttcgatacatataaatggaaatctgtgaaagatggtaaacaccataagaaaacaattgagaaaacccagatttataaattcttgtctgatctcattgttgagtttgatgaggtaagggggagaattattggaaggcagcccttatcttctattggtgaagttttttagaggttagaagagaggagaataggagtgttatgctgggaaaaaggttattgacactactattgaaggatcaacccttgctgttggaggaggctacagtaagaacacttcacaactgccaaaactttatgagaaaccccatgtttggtgtgatttctgtaataaacctcgccatactcgagaaacatgctggagaatccatggaaaaccaacaaattggaagagcaaggctgaaagaaatagctgcacccctactgcaaatgaagtcgaggctagtcttttcactaaggagcagatggctcaacgtcatgcattgttgaaatccacttcgtcctcatttggtattcttgttcctatctgttgcacaatcagatgaagaaataaatgctttaaattgtttctttccaacttatgcttctcgggtaattgacttcagagtttctgatcatatgacaaattcttttaatttgttttgactcctatataccttgttcaggtgataaaaaagttaggattgttgatggtaatttctcagctattgtaggaaaaggtcttataagattatctaaaggaatagatcgtaaatctgttcttcatgttcctaatctaacctgcaatcttctatctgtgagtaaataatcaagggattctaattgttgtgtaatcttccatgaatcttgttgtcttttccaggaccagagttcggggaagacaattgacagtgctaggatgattaatggggccccaataatttggaagataatatttctaagaataaaattgctcaatagcttagtagcatcagttcttctgtttatgatcaaataatgatttggcaatataagctaggtcatcttattttttcttatttaaaacatttgtttcccactttgtttataaagttggatcctttgtcttttcaatgtgagagttgtttattggccaaaagccaactcaaatcttatattataattgtttatcattcttccaaacctattttatcttttcatagtgatgtttggggaccatctaaagtcaccattaattttggaaaaaaatggtttgtaacttttatagaagaccatacttgtctttgttgggttttgttgacggtaagaacttgtcaatggaatgttaaaaaccaaatgcaatattcagaacttggaattgaaaacaatcaaataaaactctcccactctctccagaaaatcattgttctattgattttttttccaaaaaagtcccctttacaaatacattaaaggacctatttataatgggtctcgtacaattttgaattacatgtggtcccctagtttaaggatgcaaggttgctttcatattaggaagatcagcatgtcagatggtctgacgtttctggcactttgaataggacataagctctccctaccatttgtacttcgagtgaagtaggctttgtctccattatccgtacttgctgtgtggttgctatcttatctgtggcgcccttgctcaaatgaccttggtcccattgatcgatgtgccctgacaccacttgataggaatatcttagcactttagtacaaatagtagcaaagaaagaaatagtaaagataaaggagcaagtggattgctgggtattcgagagacccagctctctcccaagagctaaagctcacataacttaaatgattcacacccacaaccctttctaatacactgttatatactatctcaatacactgttatatactagaaaattggaaagaagtccgatggtaacttgaaatccgctgcctgaatgaagccactgcaatcacctcttcttcaatgtcttgtgctatctccatggctttatctacctttcttggtcgctgcactcttagttttgttcgaattgtagacagtaggccatacataaaagtcccaagttgcacttccaaggaaatgttgtctaggggagctagtaatctaatgaaaatttcttatattctaggaccgaaccttcctgtttcactgccaagaactaatcatatagtgatcccgtttcagtgtcgtggaaatggcataataccaagcgtttcatctcttcccaactcagagtggctcgtatcttattctcatattgataccatagaagggcatctcccaaaaatgaaataaacgctgcctctatcttctctccctcatcataattgtaacaaagcaaattattgcgctgctcgcattatccagccagctgggtttctccatcaaaggtgggcatttccagttcttgattcactgctcatgatgctgattgacccccaaatgatatctttccgtcattgaattccccgcgtgcctggtccctctcaaatccgctcccgtggctgctatttgagattctttgtcacggtcagatgtggaaatcctgacatggtcttaattttcttgagtgtcttcttgccttttgcagcactttcttggaggttcttgatgttttccttgtcgttgttgattatcaaagaagagctgaagttgttgctgccattaccaacccatgtcttggatggattctctcatggctgtcatgtctcctttcaaagattcaatgtcgccttccatcatggtagttgcatctgtcttcgtaggctccatatccacgctcactgaaccaatttgataaagcttttattagttagaatcttccttattagaacacaagcagtagcataaataaacttgatctttattaatgaaaaacaccaaaatttacacaattgcaagctttcgagaggcttgctctctcctattcccaataatctaagagaaatggggctctccacagtgagtgtaatctctaattattccataaccccaatgaaaactattctcatctatattctttttttttctttgaaagcaatgaacaatttcattgaaaatataatcatatatatagtcttaggtacacttaatcccagtccactaagctacaattacaatagtacccttcattgaaagaccctaagtggaggtttatcaaaaaggtaaaattttacccttctttcaaatataagtggtttatagttcaatctggaataaaaacacaataaactgcataataaataaaagatgtttagaagcttcagttgttacaaagccatattatacttggtagtctctaaatgttttgcaaacaaatttttatttgaaaaatattttctttgttattgtgtattacagaatagttttgaatttactttcgaacaacatttgtgccttcatgtcaattgttacagaagttattctgtgttaatgtttgtggaaaattaagccaccgtttgattcgagtttgatcttaagaggtgctgatctgtatatttgcttatagtactgtgaacaactgaagcattctggaatccaagttacaagggatgtatacatggcgctcataaatgcatatgcaacttgtggacaatttgaaaaggcaaaacaggtattgcgtagcaattttcttgtattgattaccaatttggtattgtatatgagtaacaggatatctttttaaatgttgggtaccattgaacaatgattttaacatcgttttgtttccttacaatggtaataactacttggttaaagaatttattcggctatactctatcaaataatatacatatgctaatgaccaatgtacaatgtaagctcctttgattgcattgtgtttaatctaatatgaatttagtattaaattcttcctgttcctgccactttgagtagcatcttcctcgagtttttgtgatataaactttacatgaagataagtagacaatgtaagctcctttggtttctagctctttcttgcactcataactattaatgtatgttgtgatattagagttaccttattattttgtagatagcctcagaaaaatgggttccagcaaatcacttgacagaagttaagggtgtgcttgtccaagcacttgcatcacatgggcgaatctccgatgccctcaatatgtatgacaagatgaaacaagctggatgcagtttaggtcccaaagctgttataagtcttattgtgagattctagttaatgttttgtatattttgttttctttttatagcatattgctacaagagatttttggaggtactagtatcttgagactggcttaatattttccacctttcgaccatttgatagcttctcttccatttgttaggagcattatgaatctgatggagggtcaagtacattaattcagttactagaggaattgaatgatcctgaatattggtttgatggttgctgccgagtcattttatattgtgttcgatacaaaaatttaaggtccattgatttcaaactctgtttcaatatatatatatatatatatatagatagatatacacacatattgcttaaaaatatttatatgtatatatatatgtatatataatgatactagctgacacagtttcttttccagtgctgcagttgatttgcttatgcaactcaagcataaagcctgttatgatgatgatatgcttctagaagctttccttgatgaggtttgattttattgtcatcttttattgtagctttgattgtttcactaaggtactagttcatgtgtttaccaaatgcctctcaagttatgtccatatacttcagtcttttcctctttgatcatgaaattgcacaaaactatagatcatgaaattgaacagtgtaatgatttgtaggaagtattacattgaacagtgtaatgatatagtaccaatgtgcaggtgttttgcctaattggagacttggagtctacacatttacagataggtctggaattacttaaagttgtcaaggaaaatcttggtctctcgcctccacgaaaatgtctagatt

SEQ ID NO: 187376 - DNA, 1644 bp, Cannabis indica
ccccccattccatatatgctggtcccagcccaaaatggctacctttccatacaacaaagaaaaataaaagaactgagggcccaacatgacttttatatcattattactcaatataaaggtaccttttgtttatcttaaatcataacaaaacaaaaagagaattgttatgttagttaggattcatctttattagtttcatgcttacctaagagtttgaacctcatttgaatcaggggattcacgtaattcttttaggtaaattgggtaagaatggtagcacaagtcagcaaaatctcgaactactgtgcagcttcctttgatggtttcccatgttccatcctaagttgtaacaggaagaaagtagaaaatcataatcagagagatctaaatagagcagggaattcaaataaaatgaccaaaaattcaaagggtgcacttaccactacaaagtgtacaaatttctttgtttcattttcatgtctgaaggcttcaaaagttgaaacccacggtgtgaaaaatccatagccaagtcccacaagaacactcccagctatgctcaaacccagccaaagaccaaataaggctggcaaacccaacaagattgcaactttaagtggtgtatcaagtctgttaatactgaaattgccataactaagttagatcaaaaacccagatagaaaaatatctaatatggctgaaaatatcttcaaaagagaattaaggtatttaaaggtagttactttactaaggtgtaaactgtccacacaacatgggctgggaacaaaccaagaatgaccccaacattccctgttatcaatatcaaaccaacaataggtcccacaagtaaacctgcaaaagaagtcaacaaagctccatgaaattctcaagaaccaacctttatttttttttttttcacctttcatgaagtttcagcaataacccttttgagaactgtgaaaatccagctgacccagataacccaaaaaaagaaaaataaatcaattgtgaagaaaaaagaaacctttgagggcaccaagaaagagggcagaacaaaatgcaaaaaccagatagctgaaattgaaccaatctccaggtaataaatccataccataaagattttagagagagaaaagaattaaaatggaaatagattatgtgaatttagagtcaatggcggtggtgatcatccttatagaagaagccagtttgaacgtttgtgtattttaatgtatttcttaggaaactaagtatttattaatgttaattatttatgagaggaataggtgaattgttgaaccgaagcttgcttgttctacaagaagacgaaaaaagatgagtacacaattggccaaaaactcaaatccacccataccaacaattttggaacataaaaaccaaatcttccccagatgagaaaataataaataaataaataaaaatccctaaaaataataaaataaaatgagtctggatgcaccgcgtgttggtaaaaggtaatctagatttttttttttcttctaaaagtggtattatagaaaatggatgaaaataatgtgttagacatttttgttaaaattttaagaattaagaaagcaaatagtgatcccaaacaaaagaaaatcaaattattttttgctaactaaa

SEQ ID NO: 187377 - DNA, 1123 bp, Cannabis indica
ttctctatacccaacagcagaactgaagagacattataaccagaaacaataacgaaaattcatctcatggttcaccttataagtgttttccaactagcaatatactttaaagtttcatagtaattactccttccatcaatgtaaggagaaatttaatataagtttaagagctgcaaaagacaactaaatatatttagtatatgatgcatacctgaaattcctaaaccaaattaacctcaaaacttgacagactggagaggtctagttgcatctcatggtcatgggtggacagatcaagttgcatttcatgttcgtgggtggacagatcaagctgcatctcatggtcatgggcagagagatcaagttgcatttcatgatcctgagttgtaataacaaccggagatgctttacaagggagagttggagtatagctcaactggtaatttacaagtgttgagccaaagatgtgaaatttttcagcactgctgcaagcaacttctgcgtccgaagacttcttaaaaactaccctagcacgactgctttccctatcaacttctgtctccatttctttgagtggtccaaatctcctaaacattttgttcaggttactttctgatggcatagattttacctcagagaagttcattatgagttctgctggtgcgttctcgctaacgtagccagcaggtctctctggtgtcaagccaagctcaccattagagtatcgcttcctagagtatgttctacggccttcttgaggaggtttttctgactgtgtagcagcaagttgattatcttttttcctgcctctacggagaggttgctcttctgaaccattttgaatgactctgtctgtccaataggtgtcattcatatcatcaaattcaaaagtttcaggagaccctttcttccttttaccagtgactttgtcaattgacacatgctcactcccaaaatactggcctgtaatcactactgaattccttaagtcagtgaagaagttaataataacacttgaaagattgaattccttcaagggatcttgtgcaacagactgaagttgagacagtaattcatctagtgaagagtactctgctggttcagctgcccttcctgcatcagc

SEQ ID NO: 187378 - DNA, 3965 bp, Cannabis indica
ataataataataaaaaagtacatggtaatgaaaaggataaattaaagttatcttcacagcaaaacactgacttagttgattcctcatcaccaacttaaaagaactctcacaaagtgatcaaactttgcacacacacacacactctctctcctaatcctaatcttacccgtacaacccattcatctaccttgtaatgaccataaggacacattcatttccacaattgtcatctcataactctaatgagccgcgcgtatacttcacgcaccgtcgtcctgtatgctatggggtccccttggatattttggtaaagggaaatagaaataaacgaaccacctgatcgaaaagacattcctgtatagtccacctacagcagtggcgcgtggtaaccaacgctctacctgaaaccgtgagttaaataagaatctaatagatcttgcaacactcactctctcaagtataagaccctcaaatcccggaaaataattaaattaaattttagttttttttttaaaaaaataaaatgaaagaaaatgcaaaaattgagaaatctctctccttctctttctctctctatctatattcagttcccataaaaatcataagaaaagcatcagcaaacagtactcataataaaagctgaaaaggaagaaaaaaaacaagatccacctcgaacctctcttcacaacctccataccctccaacaatcctcttccctaattccaccatcgccaccaccaccaccaccgccaccattaattctctcatccccctccttccaccaaattctagggagagaaaattgtaagtactaccggatgatttccatattcaacccaacaaagtacgaaagaacaaaaaacattttgttgtttttcttcttatctttgcctttttgattttcttttctcttctcttctctatagttgtcccataagacaaactgtactgataatcctataagagagagaggagagagaagggaattgggtgagtgagcagggttgagatttgacatacaatgagagaagacgactccaattggttcaacagatgggcagaggagctcccttccccagaggaactcatgcctttatctcaaaccctaatcacccctgatctcgctttggcctttgatatcagaaactccaataccgccgctgccgtcgtcgccgccgccaacaacggtggaagcccacctcgagcccatacccaccaggggccgcctcctcctccgttgtccagtagtcaactccagccaccctcttcgactcagcccaactcgtccgaatttggggactccgccgatttgggctctggggcagcaggagaggagccggcgcgtaccctcaagcgtccccgcctggtgtggaccccgcagcttcataagaggttcgtcgacgccgtggcccacctggggatcaagaatgccgttcccaagaccataatgcagctcatgagcgttgacgggctgacccgagaaaacgttgccagtcatttacaaaagtatcgcctctacctcaagcgcatgcagggtttatccggtagtggcggtggcggcggagccggcggtggaggattggctgcctccccggatcccgccacggaccacctattcgcaagctcaccggttcccgcccacttcttgcatcctagccgatccaattcggatcatttcttgccattcgtacccgtgcttcatcaccagcagcacatggcagtggctgccgctgctgccgcggtccacccgcagctgcagacgcagtatcaccgccaagttgggcatttcggttctccaccgacgaatggaggtgggcaatttgagcatcccttccttgctagacagtcccagcagccagttcataggatggggcagccggtgcataaccctgtgccgggctatgtagaggacttggagtcagccaatgcaacaggagggaggaaggttcttactcttttcccaactggggatgattgaaatgaaaagctggggtaaattacttctgctactgttgaattattgctcagtttagttcacttctatttggttttaggctcttgtgaaatctgtgtcaacttggtacttgttttactagaaattcgggtttaggggatttagtcttcattgtcgtcctagttggtcttagtaatcttttggatgagatctgagtttcattcccagatccaataaagtgagttctttcttttcttactttcactataccaatgccagtttgggtatgtctacaaaaatctttccatgggtgattaggattaatcataattagtgtctgcctttatgggcttctacttgtgtaattaaattgttggtagcagtctataacatacgagttcttgtctgcttctcgtggctgaagaatttggagatgatgtcactcaagcggcaatgatgcttccaaaaactcttctatggcggctatggtgaatggtgataactgagaagagaatatagtcgtgataattggtcaactgggtccatctggaaatttcattatcatcctcatgttatgttattatgggaattggatggttcttctttcatattcagagtcttctgtgttgggaaaggtctttcaaattggtgctaatgataggagtggctgaaacctgaagcaaaacaaaacacaatgactaattttgagcttgcagatgaggataaataaagctggcaagtcttttccttcttccttttattgttgtcttgacaacaaaacaagggtacttatgaaaaccctatatggcactcttgtaactgtgtttcttggtatatataatccaggagtatgttctgttttcataagttgtgccttgtgttttgttcttagtttagaactatgtagagatgagttgtacttgttgtacattgtgtgactctttttaatagacataaaccccgcgatagatgggatgtgttaaaatgattctgatttcattatatttgttggacatatctaaatgctacatgaacatgaaagtagctttattttctgtaagcgcttaattagtacttcgataatgacaaatcacttatatccttgtaaagattgattagtcccctttctatggatgttctcatagtgatttgaagtaagttttcaggcttagatgcgtgaatggcattgactggcatctcaaaatctagcaccagagtatagttttaatctttgttcaacgatacaaagtactatctgtccgtaacattagtgtaaatctacattagtgtatttacttgtaactatgtcagacgatatttcattaatagttcttcaaaggtcaatctgagagataccttgtaagaggtacatacatggtataagaatctttatatcttagtcgtattttatttattgtcttattttagactttgcctcacctgtcttcttatattaattatgcctaaccatgttcagcatctgaataattttgttagtggcaatgggtgtattgggtatgaagtaatcaagtaatgtgtgagaattttcaaagtacaagttttccaatcaaattccactaaaatttccttcatcataaccaatttatatcttcttactgcatattttgttttaagccaaaaaaaaaagtcaacaaccatttggaaagaactaaaaagagggagagtaagaagaatgtagcctaaagagacctgttagaatcccaagtgaaaatgacccttttgcatcagacacacatgaaagtttatagcaaatcttttaacaactcttctggtgaagtcacctgctgaggttctgttctcattgacttgtgtgtggttttaactgtggaggtaactttgaaaatcacattttaagctaagccatctttatatgaaattttccaatgtttgaagagacatgcaccttcttcccttgtttttttttttttttttcagttttagaaatgttatgaatccgatcatcaaattagatatgatttacaaagtttat

SEQ ID NO: 187379 - DNA, 3594 bp, Cannabis indica
gaaaaaaaaatatataggtaaaatatagataaaagattaaacatttgagccttaaaatcagataatcaagctctgataccaattattaaatataattgaacatcaaacaataattaaatattaataacaacattatcttatttaaggcatcaaatgcaatatatataataaagattaattttaccttgtaataattacaatgattatcaaacttctcttggtgctcatcccatcccttcaatctacccatcaaagaaaagagaaacaaaatgtgcaaggggtttctatgaacacaactcttctacattcttcacctatcttagccacacacattcctctccctttactaaataaaagggcacatccctttttaatgaggaattatgggtcaaaaaatgggcctacatgcccaatgtgagagtattaattgtcttggcccaatggactgaccaaagacgtttttggagcgtgtttatgggcccaagcgtacgttatgtccatcccattgtgacccgatggtaatatcatacattaccaattatatagttatcattatatgttaatactgacactaagtgagtaacacttaattatgttagtccacataaaatattctaacccggagttcctggtgaatggtgatcatcaatcatcatttatataattaatatcaaactgatcaatgtataagaaaaaagaaatatcaaacataccaaaaaatacatgcatacacacattatacatataaatatacataagtttctagagaaaaataaaacaatccagagagattaaagggttatcaatgtcctctagtaacacagagtcaaattcttggtcactgatcatggcatctccgttaatttttgtaccgcatggatgattaatggtgttattatttaatgacagatctcgattcctcaaactagatcgtatcggtcgatcaccactggagatgtcttttggactagttgatggtctactagtagtactcctctccttccttgagtaatacgatgtcgtcgtttgatcagaataattacctaaagcattcatcacacgcctggaagaatcgagagaataattaggagccgtacgcttcgagtgagtactcaatttatagttatctcctctaggaccaggattagtaccgatgaatctccgactcggagaaggagatctcgaggcggttagtcttctactactgctaataattggaccagaaggtttcgatttctcaggaatatctcggcggaagctcttctgtctcgtgagatgatgatagtcattggcgacactactcggcgaactcgatcggagtcgcttctgagagaccgagctcttcttaagcgctgccggaggaacattttcaggcgaaagaaacgacgtcgttttgttgctatagtttgaagtactggtctgcttgattgagttgatacggattatgtggggattttccttgtagcacgaccacaagaagtcgtttgagaaagacctgtctttagaggacgatgacgcagttgagctagagctgcagctgttgctgatggtgctggtgctacgacatgtcgttttggttgaaaagggacatgtggtgaaggaagaaagagaggagttagtagaaagagtatgagatgttgaaggagatggtggagagggtaagaatttgtttgggattttgtatagaggactattttgttgtttggtattaatagtggttgttggggtttgtgagattatgaccagcttgtcttggattagatccaatttctttgcaccatcttcttccgacgttgccgggttctcagaattatgagagttttgtggtatgcatttgctaatgcaagaacccatttgttaaaaacttttggttagttattagtatgaagagcgagggacgattatataatagtgttcaagtagtttatggtttgtgtaatttatatatgtacatattattcttcaacaagttaagttggtttgagtggaaaatgttttgaaatagagtgggagaataataaaatataacaaatgggaaaagtgggtggaatatgagggagttttgctttatgtatttaccttttaatttgttttttattctgtgcttagctttttgttttgaagatagttttgaattaggttgccgggtttgaaatccgttggacaacggttatgtgtgatacttttgattggcgcaactttcatcatgtctctccagctttttctttttgaaaaattatttacataaatggcaaagattgaatatcgcctctcctcaaaattgagctaatagaattgtttgccgtcattgtgctcgattacaattgatacactatccgaccactcttctttattttgaaattaaaaatgagaacaataataatttaaaataaaatactgaagaatggaaaagttttgggatataatgcgccttttgctaacccatgactgtaatatgtcacttctgcagtttatgaacttcagacattcaacaaaagaaattgttactaatttgatatagaattttttattttttccacattttcaataattcaactccaaattaatatcgcattaaatatgccttgaaagactttgctcttaaaattaaaaagaatcatgtctaatgaggacaaattttgtcagtaaaaggtgtgtatttcgtcgataatgaataccaatagctacatgtcgttagtaaaaaatcgttagtaatacctcgtcggtgatagggtattattactgacgacatttaaagtcgtcagtgataaaaataattaccatcgttggctaaaagaaacaatttttttatttctttttaatccgtacgtctatcaatgatgagaaagttgccattgatttatttattttaaaaaagttataaataaaaaaaataatttttattaaatattaatttttcactaatcaatttatattaaatatttttttaattaaacaatattcaaaataattaaattaaaagtgaaatctaacaccaaactaaatatttttatatcaaatatcaaaagtcaaatataacaatatccttaaataaagataatacttactaaagtaaatattcataaaccataaataaacataaaagtaatagttcatataactaaaataaaaatactaaaagaaatttgttgttgcgtcgtcatcatcatcattagcatctctcggaatctacggttgaggaacatccgacacgacatctgtgggtagtatggaggcatgtgcgaacttgtcatcatctgagcaatctgttgcccatgtggtgccggcatatgtgatgtctgctgcccatattgttgcccttgcggtgtcggtatcatctaaaaagtctgcgacatctgtgatatttgctgtgtcggtatcacttgtggcattcaagactgtgagacttgagacgtctgaggcgattgcgtcatcatttgcatcattacttgtgggctatttggcgacggcgactgtgacatcatctgcatgaatgtctaaaacatctgaaattgttgaaccatttgttcagggagttgctaattaaggctactgtaacgtttgctgtaacaattgttgaaatgaaagtggagc

SEQ ID NO: 187380 - DNA, 4017 bp, Cannabis indica
attccaacatccccactcttcttctccagacataccaaccctcataacttctttctctctctctctctctttctttctctctgcaattcctagaaagaaaaaaaaacccactttctcaccatccaaacaccaaaagcaaagtaagaggaaacgatgatggttgagaaagaggatctgggtttgagcttgagtttgagttttcctaaccagaatcgtcactcggttacgaagagtactgttactcataataataataataatgatcataataataagcttaataatctcttgctctcctcgtttgttccgtctttgtcaacttcttcttcttcgccttcttctggtttcaatgttaatcctcatcagaaaccttcttggaatgcgacctttccttcttctgcaggtgtggatcattattttattttaacgaaacaaaatgatatatgtgttacaactgttcttttgctttggattctagatctgcatgtgttattttagctaaatgcagatctgctaaactttcccgagaaacaaacatccttttaactttttctttttcacgcctaatactatattatttgtttctcttttcgttatttttttcctttccccttttcctctttacaaaagcatacgtatctttcagatctaagcctttgtaaaatttcaatctaagcctttgtaaaatttcattttttttttactttttgattggtgtatacatgtatataatatatttggtattaacacagatctttttagactacaacatcactgagtcaaatctcattaaaattgttccgaaatttttgtttagatccgaattctgagtcgtgccgagttgagactcgaacttttctccgtggaatcgacgtgaaccggttgccgtcgacggtggatgtcgaagacgaagccggtgtttcatcaccgaacagtacggtctctagcgttagcggtaaacggagcgagagagaagcaattaatgtcgacgataacgagatggagagagattcttctcgaggtatcagcgacgaagaagacggtgagacctcgagaaagaagctcagactctccaaggaccagtcagccattctcgaagagagtttcaaagagcacaacactctgaatccagtaagtacacggaaaatacaacacaattcacgtcactccattagattttcctcactgtatatattttctcgcgaaccaaacaaaaaattgaccagaactattttctctattatttgcagaagcaaaagggtgcgttggccaagcagttaggcctcaggccaagacaagtagaagtctggttccagaaccgtagggcaaggtgtggttaatttttcgaaatttataggggtagttttggaaatcgtgtaatattttcaaaaaatattacagctttacctttgaaaacagctttatttacctggtcttgtttttatgcgtggttgcagaactaagttgaagcaaaccgaggttgattgtgagtttttgaagaggtgctgtgagaatctgacggaggagaataggcggttgcagaaggaagttcaggagctgagagcactgaaattatctcctcaattctacatgcaaatgaccccaccaaccactctcaccatgtgtccctcgtgtgagcgtgtggctgtcccaccctcgtcctcctccgccgcctccgagtcccggggccatcaccaagcgattgtcccggttcaccctcggcccgtacccgtcggaccttggggggctgcagcagccactccgattcaacatcggccgttcgatgccctccaccacagaagttgagagagagagatatcgtaacgttaggggcagtttggtcatttttgaatatccaaaagtccttgtttaaatatttaaataatttaaaaaagtaaaaaaaaaaagaaaaaatttggtgtcgcataagtatgtacggaagttccatatgtaaaagtgcacccattaacaatggttgaaattccaatggtggagtctgagatatggttgttgggaaatatgatttggtgggtcttcaagttttgtattattcgatggcacccatcatcctcttttgttgggaggtttgtctcctatgtttagaatttagattagttcttatgaaaaggaaaaaaaaaaagaagacttttactaatactagtcttaagtgctaatatgatacttctagcttcaaatctttgaacccaaagaaaaaaagagaaaaatgtacccttttagatggttatggaagcggaacctttgcttgtaaagtttattattctaaatttgattaatttctacttttttaacatttgttaatttttggaatttgtccatcttttaaaaaatagtcgatattgtttagtggtttagattattaagagtatcggatcatatactatatttatctatggtatctctctgtttgaatcttttgtttggtaggataaaaatttgaaacacttgtggggatcttttcgattttaaatattgggtttatttggcttgtgggtccggatttggaacaccaatagtgggattatactttaagttgaatagaggaaagaaaattaggattatagtagagttgaatattgaaatgaaaactaggaacatgatggacccagaagaaagttttaatgtgtagacaagttcctagttctatggaattttttagtctttgacaatcccctaatcatcgcttaatgttattgttttaaaatcatagtttttataatcatgtaagtcaaactttacattcttttaacacttaatttttgtttccaaatattatattgctttgtgctttatgttaatatatatctccccttcaattttggtgaaaattaggtgagtgttatatggtttgagacaattgtttctctaatggttgtgaatgtgaattaaagttattgttgatgctataaaaagaaaagggatgctatgctcatcattcacaaagtagtaaagtagccaataaattttatcattttagactaatagtgttttgcttagcaataccatgctttgaaaggcaaatattattgctaaacttttcattttctatcatgctattgctaaacttgtcattttcttctttctcctcaaatctttatttttaattttttaggggattctcattctatctttattcaacacttaagttggggaaatccattattattagatgcttgtaattacagtactttgatgaaaatgaaaagagacccccaacttggtctttccctttgaaaagaatattctggcagatttttttcatctttcccagcaaatatgtatagatgagacactcattagtttgtagccaccaaagagtgggtcctcattattattattatggtataatatctcagatagaaaaatgtaagtgattgggtttctctgtaaagtaatgcatgattccatttatatggtcctgcatacctgattttctgcttcagaatttattgttgtgtttcagttttgaataatacaataatcaaaaattcaacgaaaaagtaaagaaaaaagattaatggtcatactcatagggctcatattcttaggagagtcatttgttcttctaacatttcatagtactgtttccaaaaataaaaaaggtaaataaattgtttttagcttactacgaagctgtttgtgtaagaacaaacaattatattttgtcgaaacatataggcagcacaatttcttactttttaaacaaattttatgatttttattcatttcaaagaaaatttctttgataatgtgtttattgttatctcataatatgttgaaaactcaactcttaggcccaaaaaaaaaaagttggaaactcaacaattgtgggaaaaatttaagaactataacacaacagcaattgttatcaaataataaaatgatcaaacaatgagaagacaaaacagaaatgacagagatcgattttatactgattccaccaaaagatctttacctaaatccagttgtgacttgtgagcacaaactctctctctctct

SEQ ID NO: 187381 - DNA, 4451 bp, Cannabis indica
ttgttgttgctgctgctgctgctatttctcctttgcgagaattcagatgatggttaatggaagagttttagtttttcatagataatgggcttacttagagtcatcattacttgggattttttattttcctactaatgaaatgtaagtaacgtgtaacatttgaaatcctggtcatgattacaactatgcgtcgttttgcttttgcaggctcatgttgaggagattaagaagacccatttacgtgatttgatgaatgatgctcaacgatgccactcaatgatggtgtacgataattcttttcaagcattagaagtgtgtttaattataaattttcttgtttagaatctagtttgacacagattatttcgattatataaatgttttaaattgtactcgatagttaactttgtgctatgggtatattttacttttctacagtgagtttggtgggttgctattggattacttgcggcagaatgccacacttgcaaccattgaaaagctctttaaattagcagaggtagcctcagttcacccctttttatttttttaaactgcccatgttgcttgctattctttagtagcttatctgattgttggtattgacaatgtagacagcaaatctcaaacacaagattaatcaaatgtttggtggagaacatgtaagttcaagtttatctcttgactaaatgaagtaatgtgatacagggttcacttgtttcaaagtaatgtgtttattaactttgttgtgcttattagaaggcaagaattcattgatagtttgatgaattgagtgtcattgctggtctcttgtctataaaataccacagaatatccatttgatggttctttgaaattaattgttaatgtttttaagcaaacttgtttcttttttttttttattatttatatatatatgtatattgtttgattatttatgggtgttctatctcttcagataaatagcacagagaatagatcagtactccatgttgctctccgtgctcctagagacactgttattcagagtgatgggaagaatgtggtcccggatatttggaaagttctggacaagatccaggagttctctaagagaatccgcaatggttcttgggtagtcttccttagcttgttaatttcacttttgttggatgtgatgcttcagttttctaataactgaaaaatttgttaggttggagctacaggattaccacttacagatgttgttgctgttgggtcagttcaatgttaaactgtagcttaaattcttcaatgatatgggatttgtttcttggggaattttatggtgatctatattatatagttgaatggctgaatttgcttcaaagctgctgtaaatgaaaaaggtagaacaaatatggaattgagcaaatcaagaatgaagattggtcccatttcatgtggtttctttcactaaactaaaatctttttctgtcattttgtttttccccctaaaagttttcttgtcaaatattttagcatttttctgcttgaaattaaccagtctctctactggtcctcttgaaatcaactgttgaaatggctgaaagatgctttaacttccccctcttgtgattgcatactatgttcaggccttctgctgttgctaggcatatggtagcagtcagcacaaatcttatggtactcttttagtcattgtattcgatgattaagcaccggttgggtcattagtactaaattattttttctgtttcagcttgtggaaaaatttggtattgatcctaacaatgctttcgcgttctgggactgggttggtggacaatacagtggtaagtagtttacctctttttttcgctttaagatggcccctctttgataattgattggagttttaacagctggttgcagtttgcagtgctgtgggagtgttgccgttgtctcttcagtatggtttcccaattgttgaggagtatgtattttataattgctacagttccactgcatcattagtactgaaattttttatggataaatttgcttgtgctccagctgtcaatcagattagtttgaactattaatctatttttcatctctagttactaggggaaagacagatgagaatatcttaatttgtttgtattgaatttaacttcatttaccaattatgctatttggcatgtttctaatgccataacattgtttctttcatctggtgaaaggttcttaaagggggcctcaagcattgatcggcatttccactcagcaccatatgagaaaaatattcctgtaagtacctgaactggtatttttttctgtctccataaccaagtgattaatttccctcgtgcaaatttgatatgcaagaaagttcagtacaattgcttacgcaaaaaaactgtttcaaagaggactgccgtgtcacactcttttcttcctttcttattcattctttctcttgatgaataatactaagaggcgctaatggtttcaacaccaccccactaatataaatggatgtaatatgataacttaatgttgttggactcatttggtaccaggattagtctatatggtgttgagcaccaccgatgccccataatgctctttcttaattgaacttcagaagtgagattcagtacaggttatagatgagctgcattttttaacaagacatctgtttattaggtgcttttaggcttgttgcgcgtatggaatgtttcatttcttggatatcctgcaagagtcagtgcttacttctacttcaagtttatttatttctttaccatccaccgaatagattgactaaatatttttttgcttaggccatcttaccttactcccaagccctggagaagtttgccccacacattcaacaggtaggtccacttagagtgatgcttagcttacctgccttttttttttccttgaaggtgtgtgttgttttgttgcatgctcttaacacctttcgtcttgtaattctatgtaggttagcatggaaagtaatggcaagggtgtatcaattgatggagttccgcttccctacgaggctggtgaaattgactttgatgaacctggaacaaatggtcagcacggtttttaccaactaattcatcaggtattgataatttgttggtgaaactttgttaattctttaacttcaagctacatatggtaacctctctttatatctactgaaagctgcacttaactattctatgaactttcagggccgtattattccttgtgattttattggtgttgtgaagagtcagcagcctgtctacttgaaaggttctttttattgatctttttagatctaatgtttattatcacgtgattttctagaagtttgtagtctacttcacagaattttatataattcaaggatgaataattttgttgcaggtgaagtggtgagtaaccatgatgagctcatgtccaacttttttgctcagccggatacccttgcttttgggaaggtattatgcaccatcatagatgctttctttgttctttcgagagttttatctcatttgctcaatattaatattcctccttgacccaaaataggggttgggttagtggttatggagtgatttacaatctcttttggaaaatttggtagcaaattataaaataaagaatgcaagggtgtttcggttagtaaatactgtatattagtcaacttttggtgctattgtcatattaccacattttactttctctaaccattgaagagtttttttgtagaccatagaacagttgcaaaaggagaatgtggcggagcatctggttcctcataaggttatttccttaatttgtagactagacattgttattaggtcaatgaatagtgtactaattcttgtactttctttcacagaccttctctcagccttcttctaccttcactaactgcttacaatgttggccaggtatgcagtttttttctctgtttattctatacttattgttatttttcatttaagggaatgatttaaaataagtacaatactgtaaatgcttctttttatacataaccacaataagcatatttggagcagatgactttggactgagttaattgataaggcattattgaggtcacatgaatttccacatatttttatgccttatcaattagatagctcgagtctaaacatatttttctgaattctgcagctctcacatttgcttggtgaatgtattaaaatttgtaagtttttgatggaactttgtatgaaattatgtaaaaatagaaaagtgaagtgtgtgagtaggagtctcacatgggatagaaacactacatttgaagtgtatatctagtgcaagtttgagatatgggtttgggccccaaggggtatccagttttgcgcgcatgggtgaggactcacacactggaccaccacacgcgcgcgtcgccgccgtttgtccgaccgatccagacgggtgaggtgtcactttatttt

SEQ ID NO: 187382 - DNA, 558 bp, Cannabis indica
atataagttccaaattacattatttggatttatcctttaaccttatcaactccacattgccaaaaattcaactagaatctaataataattttccttttattgatttaagctccaaccactttcatggccatatcccacctagttttcttttcaaagtaactgtgttgaatctctccaataatactctcacacaatttgagcctttgttttgcactaattatctatcattattagttgatgatgattattccccaaaaacaacaattcttgacctttctaacaatttgttagttggaacccttcctgattgtttatttagtctaagaaaattgaaagtgatcaatttttacaacaataaattatcaggagtgattccaagctcaatttcatctctataccgaatcgaaaccctaattttgggaaaaaacaacttgtcaggaagtttgccatcatccatgaaaaattgcactcgtttagtatttctagatgttggagagaacaatttgagaggaagtataccattgtggattggggaatgttaaacctctgtgccattag

SEQ ID NO: 187383 - DNA, 5616 bp, Cannabis indica
aataaaaacttgattagggtttctttgacattgttgtaagtttgcacaagacttgattccaaaaaatagtacctgtgtgcttggttattcaagctggactatatgacttttttgggaataactgatgataaaacattgcctctaatattagcgtgagccagagaaagttataaatgttgagtttaacctaatgtcaactcgcttttccttatttgggcttagattctggaagcaccaactgaggaagaagtttctcttctcctggagatgtttgggtgagtatgctttaaaccatattagtgttttgaggcttcagaatgatccgcagagtgccaacatgggtactaatatacttttctctgaaaaaaatgtaaagtaggctctttagtgtcatacactcacaggattcattatcatattgttttgggcttcctaatcttggtagtatttgttctgactggaaaatatacacaaataacttgtgattagggcagataggacgatgggaactgaagtctaactaacttgttgcttgcaggctctgccttacaggtgggaaggaagttcacaatgcggtacttagcagtatactggatctgtcaaaagctttatccagctatgaagatgaagtattggtaaataaatgaagaatttggttatactcctgagtttactgaaattagtcaaatatatctatgtataaatgtgtattttatataatattatacatatatataatatatatatatattctaatgaaacatcaagaaaattattgatggaatatgtttaaaagaaaaatgtcttaccctcttgtggtaggaattctgcttagtgatatgtcttgctttatatacttaataatgaatgccatgtaacagcagacccttttggaacatctaatatccttaccatgtttaattacacttgaagtgctagttttttggtttcatatcctctcttctctattggtaccctttcggaaaacaaaattttgattacatcattttgaaaaagtggcttagtgacctagaaactgtataagtttggggatattcatttaaatatatgtatgtatatttatatatacactatttgtcttttctgctaaatatgtaattgacctccttttcttctagagtaaaccacaataataccattaagactctaaatgcaactaaagccacatcaatattcaatacaacattccctcatttatggttatacatgaatgcatggccttgttcattctttttgtgcttacaagtaaattgtgttagtttattcatttttgtatttttttctctaggtaaagcgagaggaactgcttcaatttgctcaaggggccatttctgggcttaaaattaatgctgatattggaaggtgagaaaaaataagcttttatcattaatctgctgttaatactcattaagctttgaggtatcaagatgaagcctttctgtacaggtttccactcagattttgcgtgttgattatatattgactagtttctctaacttttacgagagcaaatggaaaaagagaaaaaaaatccagttttacgcagaataggaaatatgacattaaataattacttgcatcccctgcgatgacttagttgtgcctcacacttcaccattgagaatgaggcacagtctggtaataacaaaccaagttggtccagtgttttgttggtctctggtgactaatggaagtccctctctctctctctctcctcctggtttgcattgttgcatgtaggaccaattttcagatatggttatctagttttcagaaactaattttatgaactgtatctagatattttctgtttacttttagctgaaaagattcagaagttagttgttcaaaatttaatgagaattttatgctctaactaaatgctcctaggttgtaaatgacacaaaagaaaaacaggaagactggagacaaattatgttctagttatgcttaacgtatttttaattcatcatgatttctggttacagaataaacactgaagcatctaggctaaagggaaagcttgatgagatggctgcttcacaaaagttgtctgaagtttgtgaaggaacaatgtcagagatgatagaggtgggctgtttacttctgatgatccttgtaattgatatcacctggttctgtatcttttgcacggaagtaaaaacatcaaatgcttgtaatataactgatacttagtacacactcatatatattgctatatattttcaccgtacactatgttttacttagaaaatgtggcatgacatgctgtgtgctgttggtccaaaattttattaaagaaacttaatgataacatccactttaattattccaaaatagtgaacttgcttgcaaagtaactccctaaaacttgctctatttatcatacaaaaatagacttgtaaaacttggattctaatgtttttgtgaacgcatttaactctcagaattttgtggttaaactttttggactgaagtttaactgttttacttttgtgtcagtagtttaaagaagcacttgcacaaattcgagcttgttccaaattggaagcgcttttactaaagaagaaagttctcaacaatggagattctcctgagattcatgcacaaaaggtttgtgctttctgccttcttgtttcatgatgaaggtctttgtgttcttagatggaagtgctcatattaagtgctggtttatttgtctgaatgagtggtatttttagaaattttagtgtaatcatagaaattgtaatctacaaacttttatattaacattatttgagctgtataagtaggttgataagttgaaggtcttgtcagaatctctcactagctcctctgtgaaatctgaaaagcgtatctcagagcacaggtacaaaaccaattttaatagtttttggggcttttattgaatattatcagaactagcatctaaaatgtggacgtataaaaaaatgtttggtagatcacaaaaggcagaggcactaaaagttcgtgttactaaagcagatgaggcaagtgaaagggagaaggtaagctgtcttcctagcaaatgcatttttattcgcaaggcaatgataagcagttctagtttgtactgcagtagataatgccatagcaatgcaaatggaatgtgggcacaatgagctataattggatagcttgaataattgattgccaattatattttgtgcttgcatttacgttgacattattgtgtttggagattaagtggtgaaattgtaatcctattaggaccctattctctatgattgcaaatgcttaagaaaacaagagcaaaaactaactgaaatttttcctagtagaaattatgaacaaatacaatttggaaggttatttggagacccccagccctccccaagtagtctcttaacaacacgatgtcccagccaaaagataaacccctttccaatctgtgctatttatgtactctacttcccaacctctttctctcttagctgtctcctttgatgccacattggccaagcctatctaattctatctttaccctttatttcttcgcctagccaaagacgaaccctgtccgcaaggttaaagtggtgttaataattacatcaaaattttaccgtatgtccttgtaagctgataggtctttccttgtttttaaaatttctactctatcacttgatctggtaagctctttggctagaccagcacgagtgtcagttgctgtaggatcagatccttatttgattaattgtattcttctatcttcattttacgtgccgtgccatatatttggggcaaagatctaaggctttgttttattggtatattttcaggaattagcatctgagatttcagagcttgaaagacaaagagatgatcttgaggctcaattgaagaaggttgttcactctatatctttgttattacaaatattagtgttgctattatttttgtgatctgacttaaaatgctttatttaccatctcccatagcaataagtaaaaatgaataaaacgttttgaagagaaccaattttttttagttattgattgttatgacaagtcttgcactatttccttttcagtcagatctatgtctacctcttaattttattgagcattgtacacttattgattgtacatgcgaatatgagttggtgtgtaggttaatatctcgttggcagcagctaatgcccgacttcgaaatgctagggaagagagagatcagtttgaggaagcaaacgatcagattgttgcacatttgaaaacaaaggtctgcattcgtgttctgtcttaagtgctagagtaattcgacattcaatatctgaatgtggttcagaatttgacttttaatatgttaatgtggtttggaaaatgatactgtgctgagtacttagagctcacttcactgaatctctcagccttaaagagaaatgtctaaacattgtttggactttgtacaggaggatgagctatcaaaatctgttgcctcgtgtagaatagaagcagatgttctaagtacatggcttaactttttggaagatacctgggttctccaacgctcatatgcagaaatgaaggagaaagaggtcaagtatgtacttggcgtgatacctgggttctccaacgctcatattatttatttgtttgtctttgtttcgttcctagttagttactacttcttctcatcaatgcattccatatttgtgttgcttgtttgtattttcaagtgatgaattagagaaacatgaggactattttgtgaacttggtcatccatcttctctctgcatacaaggtatttgactatcctttacttttgaatgaaagaactttcaatgttatggattggtgacgtacttgttctcgggacatacctttcactttctatgcagaaagagttggagccctctatcagccgtatatcaaaatttgtggagaacttaaataaattgagtgatgggtaatgttactcctgtgatgttgggatggttctgattttcatcctctttgactttgcttttaagtattcttgatcttctttgactctcttattaagtacttttggacatgtaatataggtcacagacagcatctgctgctgatgaggactcccaactgttaaacccaaggaaaaatctcgaggaggaatatttggaatatgaagcaaaggtacattacttttgagcttgtttggcatagtttttactttttctttacacattagaagaagagaagtaaaagtttgagttttttaattagtgtttggatttttatttttaaagcacttttttcatttgaagagatttttgaagtgtttggtatgtacaatataaatactcttacgggatttaaaaaaaataaaaatataataactcttaaaaaataatatgtatttcaaatttgcccagaactaaatgttaaataataatactaataattgtttttttcaatcataaaagataaaataaaaatacataaataaaatacaccctgagttaccaagccttaacccagttttggtaattgaataaatactatgtatgtgtgtgacatctaaaaaagaaactgaagtagacaatagaatatataatatagtaaaaacctat

SEQ ID NO: 187384 - DNA, 5930 bp, Cannabis indica
aaaataataaaaaataaataataggatgttcaaagagattcaaacgttaaactcagagctcaatgataccttatgcaaatgtcaaggagcaaaagaggagaaggagatctggagttagagtcgagtgggtccgctggggagtcgcgccgtcgaggttagaatagagcagcctcgacgctgaggtcagagacaggggaacagctacgaaacgacaacaaaaagtaatgaatggacaagaaaaaacgaaaaggcgcaaacgacacaagcaagcgtcttaaaaaatacaattaatacaattttatttgcatctattataagcatccgttgtagtctagttggttaggatactcggctctcacccgagagacccgggttcaagtcccggcaacggaatttttttcaatatataaaaacaaattcctttgactctgttagtaaaattttctcaaacttctcttacagaatatttttttttttttatttcacataatataaattatataggtaaaacaaattaaaatcataggcaagttattttgcttcaaatgatcaaatatgcattaattttagtgttcactaatattacaaaatgataactcatctttacttcaacagaagaccagaaatgttaaaagtccaggataataaagaatggttgaacatctgctttggtttgttgagtgcacaacaatcttgaagttacttaactgcaagaattggagcaaagtaagctatgatgatcttagctattcttcaatttggtttgggaaacgaatgatgatctcgtcgaaaggggaaagatgatctcacaaagattatggaaaaaaccctctgtcatacatgttattcttaacaaccacctcaacatcttctagcggagaccttcgacagagcaacttccatttgctttctgcaggcttggtttcactacccatctcactgatactcgctttaagggcttcagtacttgcctttgcttcattcagtttcttctgccagcttatatactcttgccatttgaaggtctgtcgttacaaaaagaaaatcacaatatgaaagaagtcacccatggcatgataccatcagacatttcaagcaaaatttatgacaaacaaccttcatgacaacgagttctaaaactactattagcttctgctaattgcattatgaaaccgtgttattgttatttttgttctcttcttatttttctctgttgaaaagtacatattatgttctatatttatatgtcttcatttgtcccacatcaaaggattgaaaatggtctctgtacaaaatcagtgttcaccaaatcatctcaatttatgactttactaagacaaaatgaatgaagcttcaagggccagaaagtgacctcattagtggtggtatttgtgagacaaagatttgcatggtagccaaagaaacctgccaacagtaatgaaacaatggcaagaaacaccatgagaagaatttgagtattgtaggcacccagcaaccactgttcaagagcagaaaacaatacagtgagtaaaaaacaaaatcttctgaacaatgcaacaacaagatgtacgagtcaaatttatatgagacaagatttatcaagtcaaattattcaaaaaaaaaaaagtcaaatttatatgctgacgtttgaaatcaatccatattttatgggaaaaaaaagttatgttccactttcacacacaatattagcacttgacaaattcagaatccatatttttatgggaaaaaaaagttatgttccactttcacacactatatgagcacttgacaaattcaggtatcattatttgaaaatccatacatagccatttcagcaaaatactaattaaaaagagccatttctgtgaaatactagttaaaaagagaaataatcccttcttttaaaatgtagggacaaaatagctgatttattcaagttaaattgtaaatggtaacattttaatagaggtaaaaaaaataacaaatctagccataagaagaagtttatttcctcaaattggttcacataaaacagttcaaggcatatgtgcacaagttttggggaaaataaataaaaataagctgcaatacctgtactacatgtggagctaaacttctaaaatttctctctattccataataaactacaatgggcaaaaaactaatgttagacggaagcccaaatccaaagtgctgtcaataggtcccaaataatcaacttaccagttaaaatatgtacaacttttaattcttttacttggccagcaagaataaatccaagggcaactgatccatatatgcaaataagaaagtgcctgaaatagcaattaaaatgtgcataacagacggaaaagtaaagcaggcaagtaggagggtagcagattgcctccaattttaataaaattagaaattgacttagcaataggaaagaagcatattagaacatagataatgctcaactattctatgcatttgagatgtttatacaaattttaggacaatagtttgggacactgaccataaaagaaatgccatgaagtgacgggtgtttctctcgcctatacaattattctgaaatgatgaaaatctcaagtcaagccaaatcttagtatcttactactctagaccaccaaatgtaaatgagattagttccttttaaaaagaaaagtttgagaggttccaaaccatccatccacaatgatgatcaaaacgagcaacacagcgattgcatatgctgcagtgcttggaccttgcaggtctgaaccatcaaagagaagaaacataaaatgaaaaaccatcaccatatatccaaaaacacaatagctaattatagagatgcataagaataaccaaggaaaaacaactaactttggaattttgcatgtcgaacactctttctcagagtaaataatattgtcataggggtaagcagagagatattgagagacattttcagcagttactgttcctggatcagaaaagctagtcaaaagaaatagcagaacacctacaccaacagccaacaagcttgtgtacctgcaagagagctgtaatttctaagacaattcaccaacaaaatgccttacaatgactagggaaacaactagaataagagactgaatacacttacctatgaactgcacccagataatacccagggatgtagctgaaggaagacttgataataaagtaataggtcccccaaagtattgcaagatatatgaccttcaatgatacagaaaccccacattaaaatcttatgccaactgaaaaacaccagcatttgtgtgtttcaaccattgagcatttaatgaaccacaagtttgaatgtgactactcaaccattcattcaaatttttcttaattccatattcccttttcgttacttatcaaacagttcaaaataccccagctcaaaaaggaataaagtaaaaaaaaaaaaatcaattatgtttctgcatacctggagaatcggattgggtcgatcacaacagaactgctcaatagaaagtatagcatttgtgcccttcgtgccaaacacaaaccctataaaccgcctgcaaaaacatacagatatatatatatataatataagtgtatgtaaatcaaaaagctcgaaaaacccagatagaaagagatggtagtttagtttatgagatgaatgcatacaagaagtaatcataagcgccataggttataaagtaatggatgcgttgaattggggtgccctggaagatgggccactggccgcagaggaaggagatcaccactaacaatgtcaccagtccatgacacaccaaaagccactgcacggccatatattctcaatcgaataagtttttggagaaacccaaaaccaaaaacgggtcaacgtaaattttgtgtttcaggggaatagacggagttctagtaggagtagttggctcttggctggtctgctccggtctgaggctctgttttgtaattttgttggcccctttttacttcaaatcaagaaagtttgcctttgactatattcctcctattacaaacatttctcactcatcagatacttaaaacgacaaatttcagtttatttctcttcccccttcctttgtgtacttttcattattcataccaatttaagtgtataagcttggaatatgtgggaatttaatatagtatttgaattttcatgtgcccaaatagtctttgtaaattatcattctaacaagacagggtcgggtcttttaaatctttctaaataaaaaagaacaattatttccttagggatgtattgaactattaagataagtggttttttatagaatcattttagtgctacagaaaacttttgagatgtatacttagtcagataatgaatttagtttacatcattacactgcaacactattcaaaagaacttagtcatagtccttaaaaaaaggagagtagaagagctgctagagatcatcacttccaatggcatcttcaatggtctcaatgcaagatcctacagattttcctgctgtcatggcctctgctagtttggatcttgccgtttcatgtcgacgaagaagtaggattatgtttagtacagaccatctgacttgggaatcaactttctttgtgtaaatcccaaccctttgagcaatgaatccaactgcatctcaaaaagaaagaaagaaaaaaaatccactttttggttagtacatcttatctttaactaaagcatataatgactcatgtcaaatcagagaccttgtttatatcatcaagaccaccctcagcacatccatatagaagatattcagtggccactccagctagcgctatgcatgagaatcggtttagagtctggtaacacattcccagaattgcattgagttattcttattgccaaacgagcagggcatggtttagcaacaaacaggaaaattgacatgtttggatgcagcaatatttataggtaaagggtagatataacatactgttgctgataattttcctccattaacctgcattattatgacacatagatcaaaactcaagaacaagactacgtctttactatagaagtagagcttaaagcaagcattcaagaataacccttttggtgttttagatcaagctctaaaagaaatagtgacagaagcgtgagaaacacgtacttcttcaagaaactcaacatccacaaatgcagtccctgcttgaacattgagcgagccttccttcttcaatgcttccaaactagataaagtatatcccctaggtagaattccaaccaagtaggctataagaaaatgcccggcttcatgctgcatagagtttgttttgatgagtactttatgatgattccgttattttagcagagaattcaaaataatcataactggaatagcaaaatgccctttgcatggcctaaaatcatagattctataatttatgtatacattgtatagagaccaatgaaaggttaaattaaaaattccatttgcacttttgagtgggtggaaagcaaaggtcttgcctgaatgaccctgttgtggtacttctggctaaaggtatgaccaattgtatcaagaatcaagctactgactcctccattgaaagatacctaagatttgaagacggaatagagaagatataaaagaaatctcaaccatgtgaagaaaatacacatctagttcaatgtcaaatgataacaatctgattagtcaatttatgccctttttataaaactgtaaattgtaatatggttgaagggattgatttgaaatgagattaaagatcttgaagacatatttctaaacaagcatgaggaagttaccgagtcaaaagtccacaggaacaacaatcctagagaaatatagaaaagttgctggggggtaaaactaaagacattccaggcagaaacacctcccagaacagcagcaagctgaagatttctt

SEQ ID NO: 187385 - DNA, 4209 bp, Cannabis indica
attaatataattaataactttttcacatttttatttataatttaataagattttttatatactttcaattaaagttaattttacttctaatacattagagcgcaataatataattaagatcaaatataacattaatttattttttaaaactacattagtttttttaaaaaaacaaatgggacaaatttagcataaattttgcatcatccataggagatagggatccaaagaaattcattacaaaagctaaaatgacaaaccaaacattgtaaaccaaacgtgctctaaaaattctgatttgtaattagaaaaatgatataaaagagttagtttgtttaaagttcaatcaacagtgtcagtgatgagattcgttttggcttgctttacctaagtatcactttttctgcatagactaatatttatacaaaaatactccacttttctaggtacgtttttgaatctcacgttgcagacaattattaaaaaaaggtagtgtgtgaatagatttcgtctattaaaactaaataataaaagatcattgggattgtatattgcctagtgcctactctgctccccagttttttcttcagaagaatcgagatatagacagcaatgaatagattctaccataaccaaagaccataacatttttaaaaacacaagctcttcattgcaaaagtttgaattattcccctcaactaacatctaaccccagaaggaaaaaagagaaccaaaaaattgaaaacaatcaaaatcgggctaaagatttcgaaaacaggagaaaattgttgaaacaaaataggggcaaattacagcttgaggaaaacgaactcctcgatggctggaacatcaccgatcttcttcaaggactccttgctgggttgatcatccacaccgattgccatcacagcctgctttcttggagcgattcttccgacactcatgaaactaacattaacattttcctctcctaaaatgcttccaactgttccaatcataccgggttgatcgacctgtctgcagagaattaaactaccttccatgctcacatcaacctcaaatgatccaaccctggttagatgagcaatcccatctttaacacgtccctccaccttaatttctccactctctgatatggcactggcaaacttggattccacattggcaatctggacctggatgaaatccaatggactctcaggcgagccatctaaaatgattcgctcttcggttattctgatccctctctgcttggcagtgaaatcagcattgaccaaattgacaaagacactggatatgggctcaatgagacccttggtgatcatggcacgaagcaatctagtgtccaggtcatcaggtgctctagctgaggcgtaggtcacttttacactcttcacaccacttcctcctgctactaactggacagccagtcttccaagcttctcagctagttcaacatagggcttcaattcagtcagaacctgcaaaaatgaaatcggaacattgataagaaacaatttgaaagagctacaacatgacaccacatagaatgatgacactggctaacatgtgataaaatacctaacaattcccacattaaaagttttatatatcttgcacacacattcccaatgaagaaaatgtttaagaaaggcaaaagagaaacaatacctcagcaggaaccattggtgcattgactgcagtggcagcaagctcccctttcaaagctccaacaacagcttcagctatttcaatagccactccttcctgtacatcgatttgaaacattaaatataacaggatgaaaggtataataagcaataaatatattcaattagattattttaaaaacctgtgcttccatggtgctggcaccaagatgaggagttgctgtaacattctcatgcagtatcaacttgctgtctttagctggtggctccactgtaaatacatcaagtgccgcctggaaaaaaaaataagaagataagtgttaccttttactcaacccaatttcatgtattcatttctgacttggaacacacatacctgtgcaacaattccagcatcgagtgctttcacaagagcatcttcatcaatgactccaccacgagcaacattcacaatgcggactcccttcttcattttcgcaaatgtttcgtcattgagaaccttcgatgtggcaggagtgagaggcatgtgcaatgagatgaaatctgctttagaaatagcttcatcaaagctcacaagttccacacctattgcacgagcacggtctgcaggagcatatggatcgtgtgcaataacatgcataccaagccccttagctctccgggcaacctcagtgccaactttgccaaaacccatcactgcaagtgttttcccaacaagagatacaccaacgtatttgttcctctgccacttccctgaattgacagaattataaaataattaagaggttgtttctactaaatgaagcccaagtcacaaggaacgctcatcaaggttaattaacaattgacatgtaaaaaaagcacagagaaatgtggaatattctacaaaacaaggtatcttaatcagttcattgggtttctccagtttcaatattgacaatgaaatagattccatacccaaatgaaaaaaagcatcggagaattagtttacgactctgtcttcataaacaagcatctactaaaagacgagctactacaaccaaaagccaaacaagtgctccctttctacagagattacatcaactcgaagataaataataataaataaaataatcttgcatgctttccaagagaatcttttgcgtttaagatctgtcctttacatttcactcttcacaatactaaaagtatttttctcagttcaaaaagaattcaaagattatcaaataaatcatgccttcaaactgtttaacaaaatgcatcaaagttcgaatattaataacaatggaataggaaagaccagaagctcgacaaaaaaaaaacagatggaataacaagcttactgaccagcttcacggaggcatcagcttgcgcaacattcctagccatagctgccatgagagcgataccgtgttcagcagcagcaacggtattggcagtaggcgcgttcaccaccaagcaaccatgttcggtagcagcagccagatccacattatcaatcccaacaccagccctaccaaccaccttcaaccgtccaccagaagactcaaaaacctcgcggctaaccttagtcccactccgcacaatcagcgcatcacagagcgagatcttggtacagagctcctcaggggtaagattatacgagcaatcaacattagcaaactccttgagcagatcaagcccagccgcaccgagcttctcagcgacgaggatcgtaggcttggcatcaagaccagcggagacaatcaaaaccaggcgacgagactgctggcgccaccgggggttgagcgagacggagaaagcggaggagagagggagcttggatgagagagaaagggaagcgtttcttagtgggttgaggcggagggtttgagaagttgaggcagccattggaggaagtggcggtggcggcggtggtggagaaaatagaatatgaataagcagtgagaaaagtgtgtccgtacttttataggcgggggttgagaggtttggtttggtggtttttgaggggaaatgaaaatgaaaatgcacgcgacttggcgcgtgagctgcaaagttggtaaagaaagagagcgaagaagatggtgtgtgtttgtattgtgtgggttgggtttttcttctccaataagataggttcggtaatgtaatgtaataataatatgttttctaaacaaataaaataagaaataggtttcctaatgaaatgactcccttttttttttgaaacggaattcattcattcaaacacacattacaatggattaggcgagtctaaccgaacggcatgactcaaaggggaacaaccccaacccacatggcactagctttgttagtcaaaacttcattggctaatacatgagcaacttgattggctaatgactcccgtttgatggacatgctttcaatcacatctgtatttatttttaatatctacctaatgtttaattaccaacgtaaataatcacttggcttagctcaattggccataagtgggtgtgtgaatgttggaggtcctgggttcgaatcccaggtaaaatat

SEQ ID NO: 187386 - DNA, 3407 bp, Cannabis indica
aaaaaaaaataaaaaaattaagatacacttgctacccaactttaataggatctctcttcttaacccttttcctcatcatctcagcccatcttgcaagaacatttgaaacttcaaacttgcctgcaaacttcattttctgagccaattcttcaaggatgtcgggcttccccgctctcgagaaatcggctgcgaacttgttgtagtcgagttggggagctttcattcctttctctaacatttcttccaaatatttacaagcctctcctgattttccctgtcttataaaccctccaatgaaaacagtataggaattacaatcagggcaaaaccccttttcaatcatctcatcccatacagattgacccatttcgaaatttcttgttataaaataagacttcataatcatgttgtaagtgtgaattgatggcttaacaccactctgtaccattctcttgtacaccccaactgcctcgtcgggcatttttcggcttgtcatcaacttgatcaaggcattgtagaatcttccatcaggtgtgcaacctttctccttcatctctttcaacaattcataaaccatatccatatttttcaaatttccgaaacctgttatcaaacatgtgtacacagcagtatcaggctggtttccagattcgatcaaatcatcgaaatattcaactgcttccctcatctttccttgcttacaaagttcccgaatcaaaatcgtatagctcttcatattaggcacagggccttttgccttcatcacctcgaacaacttaattgcatcagacctcttcctacttctcaacagcccttctaacatcacattatgagcaacaatatcaggcttaaaaccgagatcaatcatctcattccacaacttcccggcctctatcaaattcttcaacctacaccatccattaagcaatacggtataagtctgtaaattcggagtaaacctccctttcaacttctcgaaaagtgcttgcccttctttaccaagcttagcccttccaagagtatcaagcaaacaattgatagtgttcactccaactttaaacttatacttcttcatcaactcaaacatcccgaccgcctttttcctctccttagcagaggcgaaagccttaatagcaatcataaaagtctccattgttaacaaacctttctctcccatttcttccaacatagacaccaaagtctcaaactgtctagtcttccctaatatactcatcatcgaattataagtccttgaatcatgggcgaatcccggcttacccccagcccaacaaaagaatctaaaagccggttttcgagcatgtttaaacctttccaacacatcaacaacaaaatcatgtgacaaactaatcccaaactcatcaagaacagcttccatattcctatctaattcaaacaattcatcaatcaccttacatacacgatcaacttccataggatcagcactagattcaacaaccaaaacctcatttttctcatcatcattatcatcatcaaaattctcaacttcatccccaatttcactatcacaacaaacactagaaaatctcctataactacaatcaaaatcacccaaattctcccttaaagctctcaaatttgaaattggtatcaacattttctcttgtatagtacagagtgaagcggtgtatgacaaagaatatggaatttgactataagaactataaaaattacaaaaaggagaagaatgaaacacaccaaacagggacagagagccaccacaaacaaagtcggcgacttttcctcgagggtatcgtttttctggtctcgttcttcgatttccattgttagtgatgaatagtaatgtagtacttcctcttcttacacaactcgaattcaaaaaaagtttcgaactttttacaaaaatcatcagtatcaacggttgtttctctaaaccctaatcttataattaatgcatgaattcatacctgtgagtgaagtaattgatgattgtgttatccaaccataacggaattcgtcttctccgatgagatttagaagctaagcttaaaggttgtttcttttagtttgggtctgtaaccctagaaatatgaagccctaattaaaggggcttgggcttatgatactgggctgggcttcctcaagaagtacatatggatagaggggaaactctatagatattttaattattttaatttttacctttatttttatattttttaagatatacttacttttatatatgatatccccattatactctttaagttaatataaattatgtactagacttaagtggaaggtaagggtatattaggcaaccactcataaaagtgggtatattttaatgaaatttaatatgagggtatttttaattaatagatacaaaaaagtggtatttatcaacttatcccattaatctatatgatgatagattgatagccaattaaaataggaataattacataagacactatgttttgtaaaataattacatttttacgttcaaagaatatttttttacatttttacggttttccaaaaaataacacgaaaacaacataaaatcaacaagaaaactacataaaagtaacatgaaaataatatcaaagtaacaacaaaaaataacatgcagataacaaaaaatcaacaataaattaacaagattacaacataaaaaaaaccgtattttttgtaaataaaataaaaaaaaatcgtaaaaatatttaaaattccgtgaaatcgtatttttgtaattttttttgttgtttttatgtttttgtgaaataattattttataataattatctgaaattaaaaattattctgaggctctcataactatacacaataaaaattgttttaatattaaatgcatgtgtctctccaattagtctaattatatgaggttctaaaaacaatattatatgatagtgaacaattatgagggttgtaaatatgagttggactttttgatacgacacgaaattgacatgagtttaagaggcacaagcacgattaggcatgaaaaaatatggacttgggcacaacacgatatgatattacaaattagcataacatgacacgaaaatataggattaagcacgacaagcctaaaaagctatgacacgtaaaatacgaataatttattttgaaaacgtaacatgttaaaaacccttatattttaaggcttttttttacataaatatacaacaaaaataatataattacaaaaatagtgaaaaaaaattatttttagaacttatacatttttaaagcatattatataaaaccattattattattattattattattgtttgttgttgttgttgttaataataaatacattaaggtagaacggtaattagtcctactcgatgtagatcatttatagtaggatattt

SEQ ID NO: 187387 - DNA, 4204 bp, Cannabis indica
tgtatagtctctctctctctctctctctctctctctctctctctaatgcaactttatggtttacttctctgccttttcttttggggataaaagaccagattttggagttgaagagccttgtaagcgtatagggttgagtatattttgtaaagcacaaagaaagcttattctctctttttttttaaaaaaacaatacatatacataatatatatttatttttgattccatcaaggtatgatgaagaggaggaccggcagtaggataaggatatcctgaattttgcaaaagtgatgaatattttctcagttctcaatttgggaggtgtgtgggaaaatcttttaatttaatcaaaccctgctagtctcctccaccttcctaactaaatactcaataatccaactattcaaaaaggaaaaatgttccccttctgaaagaaaataaaataattcgaatatataaacgtgggtactattataccattgttgaaagtaagttcaattatagattttcaaacataaaattatattctttaattattctgaatcaacattttcaataaataccaccacccctcaggtggtttaaattaattttaaaacgctgcccactttctgtgttgatttggaatgaagcaaggaatctaaaattacccgtgcttgtaatttgtagtgaagtatactcgattcaacaagagtttatgtggtgttaacctcttttgacaattcacaaacactacaagtgaggtttaaagggtactgccaaagctgacattttttaatttggcactccaaaccgcctaaccaggctgagtcaacataacaccatcaccatgattgttctctatggtaacaaagacttttcctctatttgccaaaaatgagcatgcatgaggattatgattatctaacatccatattataaaagactattgaacgaagtggggttataaattttttttaagacaccacactagttaagctgtttttctctgtttcaaaaatcagagtctattcctcatgtggacctttacctagtgatttgttagaatctcctgcctcttaagactagtcgtagctttccatgagagaagtaaagaaaattaaaagaaaaaatactctacaaactcagaatttgtcattttgatttttgctactgataaatgtatgaattatgaaatatagtaaaagtgaaatttgaggtggggagggagtttggaacaacatttaggatgcatataacctggagaggtcttcagagaaagcctttttaatgacatctcttttgatcttgagagctgcagtaactaggccagtctcaggtgtccattggttcgataataacttgatctttgcagggatctcaaatttctccagacgtgccttctttcctacctgtggattatacaaaccataaggaacaacaattgtcaatccactggaaggtgagccaaattctttcaaatggttataatatgtggctaaagtaaaaataagtattaaggctggcagactaaatcattatgtttagcatactgcgacaacataagaaacaatctagattacataagttgatacgtactaagacctttgtatgatctgcatacaatcatgtgtaatatatacacaaccaacttctggacgccattcatggattcaatactatttcttactcatgatgaatcatttcttagtaagctggcatgatcacgtgatatacaaacaagcgattcctgaggcctcctccttaggctcgttatttggattcattactttcattccaattctaaaataatgggaataaaatctgtgaaacagtacctttacaagtgatgcatgcacttctttaatagtttctcctttctcacaaaggtcagcaaagtcggtaaaacatactccttgtttcaaggcccactcttccaaggtgctttgagaaggcaccacaacagcaacacagtaactatagaaaggatcagcatgcagcataatgttgtcgacataggggcacacggagagagcagcctcaacctgtacggtaccattagtcccgaggttatccaatgaaaaattccatttattcttgcaagttcatacctttcctaaggagacatactctccatgctgaagtttgactatgtcttttttacggtcaattatctcaaggcaaccatcaggatgaaaccgcccaatgtcacctgtatagaaccacctcacccctctctcatcaacctttcaaaaccaaagtaccattgtagttaataataatgtcaggtaacccaggaagaaaaaaagattaatcaaaatattgacaactaccttgtatagttcgtttgttttttcttcatttttgaaatacccaagtgtcacatttggaccaccaatcactatttccccacgaggcattggagaatcatttacaagataaccaccttcagaccaattaattaactggataagaaataaaagagggcaaaaagttaggattattaaagtcaaaatgttccaactcaacatagtgatgaggaataggaataaggatacagaaacaccccctgcaatgtaagtaaatttcattaactttaaacagcatgaaatcaatttgtaagaacttggaaggatggactacggggtgtagaggctggtcatgtgcataaatattgcagcaaaaatacgataagaccgcctaaaagtctcagacttccttaaaaggctgtttgttcattttcataaacactataaatccataaggtaagctttcatactgtttcaaggacaatagtcatatatgcttgataagatgtctaaaattagctcctttaagttgccttcttgtcaattgctactgaccatgcttaattaagaaaccaaactatgatgaaagcaacagaaaaatatagggatgcatccattacaaaatgatttatcacaaaaagcagaaagaaactattaagagtttaagtctaagttggttttaaatattttaaacagcctttacactcaatgaacgtaattgccacttgcaactattcaactcgagaccacctaaaaccatttcatcaaaatctcaagttgttaggaggtctcgcaaatgtagtacaaggaaaagaattagaaatagtaaagtggatcccaaattttgataaccaattaaccaagttaaagagagtatcaagttgagagagataagaaactccaaaccatccaaatgaaatggctcatcttgggaacattaatgcttatttccactaaataatttacttggtttacccaccaggtagatatttttaaggactggctcccacaacgggctgatgtttatccagccatgtatatcactaatatatgaaactcaaaatcaaaataattatgtagagtattaaatgattgtcttgcacttcgaggcctaagtttaagaaagccaaaacaaaaaattgtgtatgcatttttatttaaaaggaaaaagaccaacaaagtgttgagcaagtttgttcataagttgtaagaataagaatatattccaaagatattgttaaccttaacaaaggagcaaggaagcggagccccaacacgaccgacggatgtatcatcaaattcagaaaatgtaccaccagcacatgtttctgtgagaccgtaaccttgcccaattggaacactgcaacagattgaattaaataataataagaataataaagattcagacaaaattcaatggcttttcaaccacatcaaccaagaagttctatcaaagacaaaagaaacaaaactaattaattacacttagaggaaaaaaaggttttcatatagattggcataactaatgcagtgttcctaagcctcttttatgtcaaataagcaagcactgctagcagaactaacccaagacatatgttgatgaatctttgagtatcaccagaaagaggagcaccaccagatagtacgaagcggacacgacctcctagaattgcctggacctttttaaatacaagtaaattccatagaagcctttctagaccccaagccccaagccaacttccgtttactgcagacagtctacgagaatatgccaagtcaaacaacttcttagataacccgccctttgaatttacctgatcattgtacatttgtactaatatttagttatgatgacttgaataacttccaaaatagaacttcacaaatggcgtgatttgcagggatcactttgttt

SEQ ID NO: 187388 - DNA, 1023 bp, Cannabis indica
caactacaatagaatagtcagtcgtagtgggtgtaaataaatgtctaaaaatgttaagcacaacattagggagcccatcatcccaagtgacccaagcacccgaatcatccttaagtcgagtgacagtattgtattttttccagctgtagctttagcgtggaaaaatttactgttattatctctgtcacgaagccacaatttcttagagcattgatgccaaaagacctctctttggttcaaaatctcattgagcttaagctctacatcacgaaacagctagatagaaccaagatcaccccctttcttccactgcttgatttctttcttacattgggaaattcttactttgaagttactagtgaattcacgaccctagtcagcaagagactccccacaatacttaatcttttccaaaatagacttgcctacacaaactcctagctatacttgaccactaggaaacacaaaggttcacgaagccatgcattttcaaagtgaaattgacgaaactatacataaacattatgaataagaggctccaacaacaaaggacaatgatcagaatctaaaatttcaagaatagtaagttgggttgaatttaacatcgaaaaccaatgagaactaacaagggctcgatcaaggcgaatctcaatccaagagtcattccctctcccactttcccatgtgtaagggtacctaataacctcatgatcgataagatcacaatcaataagcgccttattaaaaccatccaaaaacaattgcggataaagatgaccacctcttttattgacttggctagtcacattgtttaaatcactaataacaattgtttaaatcaagggagagaagattccgacttaagagatctcaatatcaccacaaccttcaactaacaggttagttcatggccctttcacttttggctggcccattatttgatggtccaaagcatgatatccactagaaggtccttccttggtacgatgacgtttggaatccaattgttggaatatattttac

SEQ ID NO: 187389 - DNA, 982 bp, Cannabis indica
gcaactcgatttactgatcgtctgataaaataaagattaacattttgtagagaggatagtaagaattgacaattttgaataacaggtccgaaagtggagttcatcttttgattgttgcgaatactttggacagtaagcatgttatccatcttgatctgaacattttgtcactgtttaatttttatccagttaaggacctcattgataccaatggcttcaataatttctgcagggataatcacctttttggtaacaagatttagcatcaattaacttgccatggttgtcacgagctacaattccaaatccataagaattttcctgtgcaaatagggcagcatcgacattaaccttgatgttgttggaattcagtttagtccaaagctcagtgccatcacctttgttttttaaaaaaataaagaggataaacaagtgttatcctgagctttttcaccaataatcaagtgttgtactagtcgatgccagaattatctcaatgtgagaggattctttttttattccaaacagtagcatttcagaccttccacagagcccaacacaacattacaacataacatacttgttcctcatcaagcttgtgaaaaatctcttctagccagctgccaaaagaggatggtaatgcatattcaaagtaatccacaaggttgaccaataatgtgaagcaagagggtagttaagcagagcatgaacattaatttcaggttgggaattacataccaggcaaatagatgagattctcattccattcttattttcattctcatttctattcttattcttatatttttgacactgcaaactattcattattatttaaaaatttacagatagtcttaaataactacaacatacatgattaagaaaaaaaattaaactaaaaaaaaatagatatcaaaacagaaacgagtctactaaaatacccttttaagatgtaccacaaaataatatatgtagtaattcc

SEQ ID NO: 187390 - DNA, 3872 bp, Cannabis indica
tttttttattttttttattacagtttatgtatacatatattaaattattaattaaaaatgaaaaactcaccattgaacagatccttaactgtaaccatacatcattaacaaacaaaattattaccaatctaattattcccaatagtcatattataccaaacaaaactcaccattaataatattataggctctgcaaaaaaacgcatacgagcctcacaagtctgctttgcatgcatttgtcttgatacccaaaaaaaaaggatatcacatatgatataataacataaccatgacaacactactacatgcataagtacctgtaaatattttttatttttcttcacatcttagcattcaaacattatgaaaacaaacacaagggcatgagtgaagtaccttgatgatctcacaggatgatagttatgtacgttaatatggactttgaattttatgaactttaaagatataattatttgaataaaaaataatttttttaaagagttgatcgggtcaacctgccaacccggtcaagccggccaatcgaaacctgccaacccatgacccgtcaacccgccaaccgccaaccgccaacccgtgccctattcaggtccgggttcggtttctttttttgaacccgaaacccacgaccccgaaacccggtaaacccgtccgatgttcagccctagcatgtaccactacaccttcgaagaaactcttttgtcatattcccattaatctccctattatcggttaactaatctcgagagttagcagtgctaattttcggaattaacaatttgtaagagcaagatttaattcgagttctcaaggaaagtaccaaaatgttgaccttgcttttagtcaacaatactgaatctttaaagcgataaaattgaatgatcaattgataataaaataaagcaaattagaacacaggagatttatagaggtttgaccccatatatttgtaatagcataatccctttttagttgtaatacttagagaattaataaaatcacaaagtccgaccaggttagtttcttaataatcttggagaagcttacaaatatttttgcaaagtaattgctcttcaaagtgtaaaaaatctgtcccttcctcagtgaatggcctcattatttatagagaaaaggtaatacatttatgtcctagaaaaaaaagtacgtaattaaacttcctattttggtgggatcagttgaagatcgacttcaggctaacaatcccacgaatctcggtctagcaagttaatacgaatgagtagatattctagttgctaatttcgtagaaataatttaggaaagaatctaaagaagatctattttccatcatatttagttgtgtggacagttcattctgctcgacatgatcaattgcacgacatatcacgagctactcgctccgtctaaagaatagttgcaggatagttttacttagatgaatcagactttgagatagatttggtcgacgtatttgggaaatatgctctgaccagctcttaacatacatgccacgtgttaccttatgaagtgtcacattatcttgtgcaaaattttggacatcactttgggtaaacgaaaccatgtgccctaggttgaatatcaacctagacaattgtagctgtcatcaggtggtgtttaaggccaaacaactaccttgatgataaattctcttaattccaagtcccatatatatactattttgggagcaaaacaagacttattcccaagaaaaattattatttgagtaacgaaaccatgtgcaacaaattaaatgtcaacttgggcactccctatagccatgggggtgtcaacctaggcgcctttcaagtgtttctcccaccagatggcttcatttttttttgtctaagagcatttatctccgtatttgatagaactaaaggagatgtctgagaaacatcttcacaaagtatgtcagaagcgatgcccagtctgaggatgaaatgtcttggaatttatttttttgatgttcaatcttctttttagtggaaagtgcacaaacaaatttggtttcgtctaatttacaggagttacttggtgaacttgagttggtgccctagtgcctaggtgatagcacactgtcaacttgggtgctcattagggaaatatgcacctttgggatatagtttgcaaaaaatcaagtcctcacatcgtttcttgtttaatttaaggaatcgaggtccaaagaagttcccaaaaacctaaaccccacctgtcgtgtgtgcccaggctaactagatgtcaaccttgggacccatgcctacctggtctcccaagtagggcttgttccatgattggttatggagcttggaacatggcagggtcatgtctctcatgtatacgagtgcaatggctaagttgattgcacatcaataatggcttaaaaccgaaacagatgcaacttaggacacaaaatttacttgggcaccccatcttgacctgggcacaggttgacttctgagatgcccatgtgacacccttagctttccaattatagctttttagggtcttgtgacttaattcttagactattgaagaacataacttatgagcgactttgtttacttgggtacccctttatgtcaacttgagtgctggaatactgctttgtaagtaagttgactgtcttgtcttgggatgtaagatcttaggattgttttcttcatgctacatgtcaaaaatatatataaatataattttttcgtaatttaaaaataagaagataatattaatatagtaaaaatgagaaaataataataataataataataataataataataataataaagaatctaaatgccattctaaagtgaagatatatacttttaattttttctattcatcttccatattatatcagtagacaaagatctttcatctaaaatccactcaagccccacatatgatcttaggcaatctcttcaactactttaataaccgatctgcatatgatccacatatgaaaaaaatttactgtaaaagatgataatatttcagcgcatttttagtagagtgtcaaataagtaatatcgttatattttagcatatataaatttgatactttttacacttttaacattagtcattaattttaatattcataatatcgttttaattaaactattgctatttatatttatatttttttaaatatttagttaattaattaacatcaatgatatttatttttttaaggaaactgaggaattccattaaaacacatcaagccaaaaaaaaatagagatacaaaagataagcaaatttaaatagctaaatcagtgggcaagctcggctaccacacccgaacctcatctaaatctaaagctcgttttgctaaaaaatgagtaatatagtttttcactaattacaatgcaacaacagggatatgttattaaaaaaattcctaatatgattatcaatgataaattatttgttaaatgagtttgcatcttaaaatgctattgtatacccaaatataattataaatgttgagcaattaatttttcaaatcaaacttacatcccaatatatctcatgtcagtatatcactattattaaaagagtaatgttagataaacatgaaaattacatgcactttttatttttactagcaatgctatatacattaaatttatgttgacgtttttaaaagggtatcacatatgactttaaattgtgtagttgttctgatacaatttaagtgtcccactttagagtaatcaatcataagaagacaccaaaatgaccaaacatttaattagcatttggtgattgagtgtagatgagatatgttgtcacatatataatctgttcatttcatttttttttctttt

SEQ ID NO: 187391 - DNA, 4804 bp, Cannabis indica
caattttatgttaattttttagaaagtaaatgtagatccattctttttaactaaatgttatattttatcaactaagttttagttactttaagtggttatgttataatttacctatatatagtagaacaaatgtgctatcctaagtttactaccttataagtttaataggttaaattttacaattttttacaaaaatatatataacggctaaatacttaaaaaattacaacatataaaattatagaaaaaaaaataaaaaaaaattatacctaaataaccaaataaataaaataccaaaaagtgtagattagatttttctactaagaaataactaaatatacaggctaaatatatctgatcaatagttattaattatatataattagctagctaaatacaatcttaatttcttgattagttagagagtgataaacatatttatatatgtatatgcacatgtatgccattccaagctaaacaacatgcagaaaagttggtgattataatggagtactactagaaataagaaccctatagtactactactagtactgcatggaaaatgattgtatagaataagagatagtatttgcatttgcatttttatttttatttatttggatttatgagataatatgaaatcatggaagagatgtgaaatttgaccaccaacaatatttttgccaaatttgttactgggaatatatattagaattagaatggcatgtgacccacatcacatttgaccgttttcaaattcatgtttgactctttgaccctataatattatcaatatgctatcatcctttccattttctcatatcaaaaacaaaaatcatggcttccattttctatgatatttaacatatatattaatcccttccctaattattatataatgttagtttgattttggttaatagttactggtttgggttatatatgcatattcataataaaatgttataaatataaaacttatatgaattcaatcataatagcataatttagaaggcaataatcataataacatttaaataataatagaaattagtccgcgtatatttaattattaaaattcaacattatggtgtagagtaacaatgggtcttcttaaaataaataaaaaatatatattgacaagtagttattagttgtaaaacagaaatattaaaagagcattgctattagacactagtagtgtctagcaccttctcgacatgtctttgtcacgttgcgattagctagcgatattccctaaaagctattatgtgggactcgatacttagttagaccaatagcgatatcaacacttaagaaggtgttaggcaccactgatactctttaatatttctcatattaaaatctaatgcatcatatatgaaattttgaggataagtcatgaccatatatggtcatatttacaaaaagcaaccacggttaaattcaaggaaatttttcgtgtcccatcacaaatatacaatagagaaaaatgttaaagggtacgcatttttgtaggatatatataatagtataatttaataatgcgttgcatttattttattttaataaatattataaaaaattattaattaattataaattaatattttatcgtggtgctaagaattataaataccttgtaacaatactcatacgtataatatgtaccaaggtgttagcaaatacaatgaccaaaatataattaagtaaaaaccttttcggattaaagtgctcccaactcttgaaatatattttcagttcatgtttgtttctgctttcataaagaaaattaaattaatagagtttaagctactctactatatatgccatttgcaaatattatttgaatatagtaactctactaattaaatttctaattacaaacttatataagaaaatactgacaactatgcttgatgtaactttttaccataatagctactccacttgatttatgctagagcaaacactactccaattgattcatgctaatctaacattggaaactactacagtgttcgcggtgcgggtggtgcagttttcgaccattttttcaaaccaacccacatgcgtgtggtttttctaatttctcaaacctcacccgcaccgcaaaaccaaaaaactacaaaaattgcaccgctaaaaatggtgcagtgcagttttgcgatttctgcgatttggactatcacaaatacaacaaaatttgagcaacacttgtaaaaaaaaaccataaagcttgaacataaatatataaaaagaaaattaattttcaataatacaataattagtgggctttgtgttgaacattcacatattggacctaaataaatataaaaatttgtattttcataatgtgtggtgcggtgcggtttgagccgcatatgtacaagtcaaaaccgcaaactgcaaaccgcaccgcaccgcaccgcgcagtttaggaaaaattcaaaccgcgaccacaccgcaaagaatttcaaaccacatttttttgcggtgcggtgtggtgcggacggtttgagtggtttgatgaacaaccctataaactacagcaaaaacaaagtttgaaactatcactaagtttgaaatgtggttctagcatttttcaatccaaaaagcatgattgtataataatatataaatgtctttgtcagtttggaagttgatatgttcttgatccgctacgtgtatctttatttggttgtaaccggagtatgcattcatgaaactgagaaatttgtacctggatgtggcgtcaaccatttgatctattcgtaaaagtagaaatcagtcttttagacaagttttgtttcgatatgtgaaatcaatgcacattctccaagttccattaagcttggggaccaacactggattggcgagtcaaattggatatagagcttcccataagaattctatgttggttagcttgtctacttccgcatttactactttcgctcgaactggattaaatggccttctcttctaactgagtggatctgcctttgggtctacatttaaagcatgatagattacatgaggactgattctagtcatatcaaaatggttccatgccaacacatcactgttcttcttcacagttgatagaattttctctcttacaactggaggcagattcttccctactttgatgactttcataggatcttcatcgttgatgcacacttcttctacctcctccattggttcaataatttttttcactcctttacgtggatctaattcatcttcttcccgaaatacccccagtgctggttgaacgggtgttccgagttcaactggattctcttccttaaccataaggataattttggttgagacattataacaatttctcgcacttttttgatgacgcctgatagttccaatgtttttggtattacttaggaactttatatataaatggtgaatataagttatagctccaaagtctactagagcaggtcgtcccaagataacattgtatgcagtgggacagtccactaccacaaatgtacaatattacgttactttcagaaacttctccatttaatataattgaagttgtattttttctattggcagcaatatatctccgttgaagactaagagttgaattggacaagatgttaagtttatttctaccagacctatagcttgaaaggcaactttgaagagaatgttgacataactcccattatctacgagaactctagacactttcttatttgtaatttgagcttctatcaccaatgggccattgtgtgaaaaatacacatgcttagcatcatcttttgtgaaagttattgggatttggttcatggagctcatctcccttattgacaggattgtcttcttgatccataggatatgaatccttagactcttcgtcttcttctccttcatcgatgggttcgtcatgaaggtttgtttcatcacactgatattttcctttttggtgactggtcgcctcagtgggatcttcatcgagcctaattttggtatttggatcagcaccatcttggtaatgaagaccatattttatttgggtgagtaccataattatacaacgtaatctttgatggtattatggctttctttagctcttaagaaaatacaattgagaatgaaatatatgaataagacacttaaaatttttatgtggttggagtattaacgagccttagtctacgagtcaatattattataaagttggctagaaaagcctttaagattactgttaggttgtttttagtattatttttaggttattttttagtatatttttagtattatttttaatttagttctactcttgtttggagcaattttacgctttttattattttattattgcaaatttaaaatagaaaaatattagaaaatatcaaaggaataagatggaaaaaagataaaaaaaatctcacaaaaagatgatgtataaaatagagaaaattgtgcaagaaaataaatttgaaaattcaattctgaattcaactatgttctgattagatttttgaaagttaaaacataaaagttctagatctctcttttatctttctggaacatcttgaattgtccaattccgagcaatatcgagagagttatggccaaaatactatcagttgacacagtagaaaactcacctcattttctaattcttagaaaataggttttctaatcctaagaagaataggtttttttcttcagcggttttattttattttatcattttttggctataaaagaagtggacttcaatagtttttgggagaggaattcaaagggaaataaacagcagaatata

SEQ ID NO: 187392 - DNA, 2162 bp, Cannabis indica
aaaaaaaaaacaaagaaacaaatggtgatgaatatgtaggtaggcagtagtagtagctaggcaaatgtaaaaaaagagggattaaatattgatcaataattgaactgcctaaacagtcatctgtcaaaaaatgtaggacttacgaggtgtatgattcaatggaagtagcatgtgatttgacaagtcattcacaatcttacacacaataataataataataataataataatggctctaaactctatatatacaataatcaatttattctagctactctattttattttattaagaaaatattcagttatgttggttatatttgtgtcgtcttttgacccctcaattatagaatccaagtttgatattttttatatttgtttcgaaaaaatatatattatcaatcaataataattgatctatttgtattattatctggagagggagtgactcgtgtgagtcgtgactaaggaaaaagtgtttaaaaacaatttataagtaaaattaagattgaattgtactaacattttttgaaacattttttttcaaatgagaaatcttgttacaggttagaacatttaccatcattttggcttgttgtagaattttcaagtatattttgtgtgtaaatctcaatgacattaattaagggtggaagagttgagttttctctgttctgtttactattatctctaagctttacactgtatattgtaattaatctcaagtaatttggaaccaatggcccatagaacattataccatttaagtatatgttgagttctctagtttcattcttgctatactttttgagctcagcaaattgtagataaatacatttggactcggatcctacttggatcttggccttaattttaaactcgaaaccgatcccaatcttaacccgatttaaataaatttaaaaaataaaactaaaatttaataaacacactcaaaaaatttaaaaacaaaaatttttagttgaaactttaaaaaaatttcggctgggtagcaatttttgtaggatgtcaaccaatcccatacaatcacagtttcaacaaggaccaaaaactattccacataataaatgaaattggatctccaagaacgtacgtctacctacagtaatgtcccatgaaatcagtgaaaaaattaatgctataattggtagactattttttcaacatgttatgaatagtaatattaattaaagccaatgtatttaaagcaacaaggtgaaaatatagattgtgtatttttttaaaaggaaaaaagaagaggtgaaggagtaggagatatatttttgctcgtctggttgtgaaactcaattcatgatattcatgatattatagccaaaaatgtgaaattgttgtatgtgtgagtattgtaattattctaaagaaagaacccttattaataattataggccttattttatggtcagaattttagaatgtctagtttggtactagagagtctatataatatttattaatttttatgagaggtggtaagaattaataatcattactagtttctctgccgtaatgtagatgctatacaagtaccatgtattgttggcccctataaagattttgtaaaacttcttaattattcttcatcagaacctatagtggagtgttacttgttttagagtatatattctctgcctctccaagtaccattatatttattttaaaaaaattacaatatacaatacattttttctctaaatgccattaggagaagataaatttaaataaaaataaaataaaataaataaatacttgtatgggagagaaagcaaagagaccaagaaaggccaggacaaaactttataaagcatatatgcaggtaagaagatgttttaattcattgatgtgaaccagtcacttccataattggcattgaaaaaaaaagcataccatatgcatatagctgtcatattggacccaaaaataaaaattaagattacctcaaaaagatttttggataagattttggagatttacacaatagtgaattaggtacaagtctaatgtctcagttttattacatagtgaccacaaacttattactttatagaaataaggcatattgttccttcaaaaaaaaatggctagaattttttttttttctaaattttttatttttattgaattct

SEQ ID NO: 187393 - DNA, 1389 bp, Cannabis indica
gggtgtggattgcaaatccacttaggccacaaaaaaactttcctttcaatctatgaacttaaggattgagtaagagcactcacataataaaaaatttctaaaatatataaaaatctaaactaaaaacacgctaggtcaaatactttaaactcattctctacttcgaagattttttaaaatttactattcatgttctacatttataaaatattatttattgttctacatgttttattaattgtttagaattttaattttacattttatttagagatatatctaaatattaatattatatatttcaaataaataaaatatactacaatttaaaataaaataaataaagtaaaatttttgtaatgtattttgaaaaataaaatataaaaactaaagaggttggtcatgttactttttctataattctctttttacccttgaaagtgagctatagaaatgaaattatcatagaaaatatagtaaatatgctaataaatatttataattttatttctatattttagaattcctttccttcctcccttccaacttatcaaataaataattgtaaggtacacacccactttatccactatttttatctttctacacctcatatacaatctatcattaactcattccatccttcttaccataccaaggataagtttcgaaaatttagataatttattatcttattttaatgtgatcatatgtttcgagaattaagtaatttttttttaatgacaaatctaaattttattaaatcatagtatgcaccactaatcagggtagcaagtcagttgaaacatcttccaaactaaagcaacaatcaggaaaaaatataaaagctctaacaaaaagtatgagccacaatattagctgattgttcaataaaaataacaggaatactactcaaatcaagaatcaaaaatttataatcattaatcacttgaccaaaaatagagatcatctaaatagaactccgtaaagcttgtataaccatcaagctaaggccctcacacacccattacttttaccaattcaggtgtgaccgatccatgactgagctttgtgcaagcttccaacaataaactttgatcgtcctgggccacaataccaaagtcataacaatgagaatcttcaaagaaagcagcgtccacattgactttaatactaccaatttatggtgaaatccattgctcaacaccatcccctacctgaaaaccaagccacgatgactctatcacaaagttttaagcaaatctccattataaaggcaccttttagcagagccaataatactatcaatttccaaaaaaatttgctgctaaactcgctcattgcgagcagtccaaatagcctaacaaatagctaacagcaaatactttt

SEQ ID NO: 187394 - DNA, 2456 bp, Cannabis indica
gggcgaagtccatcaaactggataaaccattaacgagtaatctaatgtgggtggatttggtcaaagaacaagttaaaccatagttttcgatatggggaagattgagatgctaacctggtccagcagaatgttagaggtcttgaaatcgcgataaatgacaggtttttcagcttcatgaagaaaggcaagccttttgcagcaccataagcaatcttcattcttattgaccatggcaaaggaagcaacactcctgcaacaatcaaggaaaggctaatcagaggtgatttacacattagtaaaattttcgatacacaaacgcctttagattcgtcgagaattcaagatacatcaaatgttttttacatcaaagtcaaccgagcaagagctcgtgatctcaacgagttgaaaaactcgaaagaacatcatttccttccccaagttttaccttttacctttctaatccgaaaatggtatccaattcaagatgttagccctattacataacaaaaaccactttcttatgatgtcaatcctaagaacatatcatcattctagaaagaaaaacatcccaaaatttcatgacacaataatagctagctctacgaaagtacttactcgaaaacaaattgttctccacacttccacgagacatgtactcgtaaattagtactcggtgttcatcttcgcagcaataaccaacaagtttaaccaaattcggatgtgaaagctgccccaagaaaataacttctgcctagaaacatacaaaagctctcatttttagttacattttcattgaaaactctgttatggaatcgaatatgagacagagcatttttaccagccattctctatgtccctgatgactgttatctccatcatgaacctttacagctaccggaagaggtgtaaggccatctcttaagtcctcagttataaaccctttatacacactaccgaaaccgccaccacccaacatgtaatcttgtctaaaattatcagtcattaactttaattctttgaatgtgaatgcaatcaaaggatttgctgcagaatcgcgacgcaagctctcaacttcctcgggatttgatggtagttttctaacttcttttctcataactgagggactattgtctttggatgactctgcagagtaagatcagataacaaaagaacacacatttcagttctagctagttatataaacaagttcattctattatggtaagaaaaagtggtaaaactacaacagagaaatgttaaaaggcaacagtggtgcccaatactagcacaccatcacgagctgtctattattagtttaattaagtatcagtgccacatattttaatttaataactattataaaacatcactaggtgatgctaattgcttggtgtggctataatgatgcatagaaagcaaaactaaagtggcaagctttatgaatggctaagcttaaaaaagtggaagaactacttatgactttgtagcacttaaatgctctgttaaaacaattgaaaaatgctaaaaggtaagagtggtacggaatacgagtatcactattggttcagttaagtatcaggtcgtacatatcttaattcaataattacgatagaatatcattaaccattcgcaagatgctactttgtaatcgtatcaggtactactagtgccttattttgtgtggctaaaggtccttattaatttttattaatgatgcctctaaagtattagaaagcaaaactaaagtggcaagctttatgaatttcttaacttaataaaaaaaactatctttatatcaagcaagttcattcttttagtctcatgtgtaaaaaaaaatgaaaagtattgtccttttaagagatttaaagtaacaaaatttcttggctccaaagtactaggaagcaaatctttcctttttctccattataacagttaaacaaagaaactatctttacttacacagttagtaaaaatcaccactttgaaagttactccaaaggctatgagagagtttgattcatatttttatttattttttattataagggcaaagaaaaagagtgttcatctgaaaagatattttattcttaaaaaaaaacaaattataatatagacataaaagacaagtccaaaatcagccatatgtattaaattatgaccaaatatattagtaaacaatactatttgtataatctagaagaaataggaaaaaagtttgactttaaagaaaggatataatttgataaaaaagaatagtagagataagagagagcgcactataatgaggaggactacccacttagcacatgagaaaaagtaaatggaccactatcatattcattagtggtctcaaacaaaaaagaaaatctctctcttcttctaattgatttttgcttacacaataataggaaattctaaagtgaacattttcaaacactctaaattctaaaaaagat

SEQ ID NO: 187395 - DNA, 3964 bp, Cannabis indica
taattgttttatgaaaaaggttaaaaatataaaattagtggtgggaccggaatcgtagtgcatatacgggagttatgaaatctgactttgtaggattttggattccgaagaagaatggaatgtggaaaggcattactcgctgctaactataaatatttattgtttatttaattaaaaaagtaatagtaataaattggtcgtatgaaagagtgagggcgggtgtgtatgttgtatatatatatatatatatagaaagtggatggttctcagagaaagtccgttttgtgcgtcttaattttggtacgtttggagtagacgaaaaggccactatttctctcactctcaccccctctcatctcaaccgaactgattttctcatttctccgcagctcggagatggaggccaacgaattcgatcacgaggagcagtgttcataaaaaccaagtgttttcttctttcagtgaaggtatgtgtggagctttttctaaagcttgttattgactttttgactgtaggttttctgtttggttgccgagaaaatcagatattgttattagtttgttttcgtatgtgtgtttgtgttttagcaaaaaaggtgtggatagtttggagcttactttactgttgaattttgattgttctaaatgtatatttttagagtttctgtttggttgccgagaaaatgaaataaaaattaagcttcctttgatttttcttcgttgactgatttttacgtgcgagtaagctaagttttggtttgttttatgttgttttttttttatcgaagcagctacgagatttcgaaagttgtgggagctttgtgatttgaatttgcattttcaaggagaatcatcgtttcgcggggataaaggaaagtagtctgattattctgagttgctgttcctagaaaattgatggaaattttacttcatttggtccaggatatgaagctcgtggcatttgatagctcttttgaacatattacaaagacttgttaggttgagcagtgtactcatagtagactaaggagagaggtttcaaccatgatgtttttgttgctttgttctaaggggccaccgattaaacggagagcaggactaaggatcaaacaagctgggagaggctcatataggggcagttagagaaggttttgtgtttgcaatttgggctttgaattttgttaataactacgaatttgtgagtttgtgacctcaaaagttagcgaatggggactcatcaaactttgaggcagtttctgatgagcctttgtgatcattcccactggaaatatgctgttttctggaaactcaatcaccatgttcctctgtgagtttttatttaatactatggtgctatttatttattcatgcatgttttgattgtgcttatagaaattgattgtacttcttatacactgttcaacttctaaaatcttgaccaataatcgatttcgttaatgtgtacaacttggtgtgatcgtgtaacaagcaatatagaatattattggttatttttcaccattcacctaaacatttttattttgtgttaagctgcatgatcaggtacactggttttttcaatttgaaagaacataaaaatctcttgctgaattgtgaaagttgccttaggcgttgctttaagagacatagttcacttttcttagttttgtgctgaacagtgtcatatgatgtagtactttatcactatttcatcacagttacctgagaataatatcaacttttttttttattgtgtccctctcctttttttatttttcctaattaaataataatctaaattttgttagtaccgttctcatgagatgaccaagttctcttaactggtattagctacttagcattttcaaacaatcttaagcatactgattgtttttttttttttggaaaaagaaatattggttgacataaattagtttagcatgaattgtttccccttttctcaaccattgaattaaattttaagctttctgtataataatgttttaatctttaggattttgacttgggaggatgggtattgtgatattacaaaaccagcagaaaggaagtcagatgacagttatttcaatggaacagaggcattatcattttcaggctttgaaataaccatgcgtgatattggatccaggggatgtccaatcgaacttgcagtggctaatttatcgtgtcttcagtatgctttaggcgaagggtagagcttttaatctttggcttttcacataccttaaccttattcccaggaaattttaggatttgtttagataatgttttcaccaataacaaatgtgaaaaaacataactctctgatatgtagatacttttatggaaaaatgagaaaaagtagttttttgatctgatctgtagatattttttatgggaggtatgaggatggagcctcaaggatttgatcttaaaggcaacttcctttagactccttaatcgcctcacgccaccatgattttgtaaaataatggttggccatcagtaatctgcagctatactgttaaacagtgagtcagctaattagattcttatatttctttgaactataagaagtggctgaccatgaacttttaaataattatcaggttggttggtgaggtggcttacacagggaaccatgcttgggttttcctcaacgatttatccaccagatatgtctacagcaagttggttcctgaagtaagaatctaatcatgatagttaactacaaactgttaaagttggttcttcaagtactgaaatttgtatctaataaatgcaattctttcaattgacagtggacagaggaatggcttctccagatttcattgggtgtcaaggtaaagtgattgtagtagatcatgtctgtggctctttaataagttttgtataattattcaaagtagacatgtatacttatttactcaaatattattttttttctgatgcagacagtcttgcttgtacctgtccctgatggggtgttgcaacttggctcattggaaacggtgtgtgttttgttgtaacttagactgataccaccatggtggtggtttgttttgttgtttgtgcatctcataaaaattaaacagttgacaagtacgcattttggcagtcatgatggtggcatccattggttcttgacatttcattctacttacgtctggcatccattttcttcaacatttcaggttgctgaagagatggcagcagttggtttaatcagagacagatatgatgcttttcataccatgatggatgagagttggcctttcacgttgacacagaatactcagggccattcatcattatcacaattctctggccaaatggagaacataagagagagtacaggtcttatcattagccaactgaaaactgagaaagtggacaatttcgatgatatgagaatgaaaaaatacagtttgtctgcttcaaatgagtatggccccctgcatactgttcagcatctgcctattatgggaaatggtgtggcggattttattgaaactacaagtgaagatggaatccattttccctatgagtcaacttttcctagtcaaactatcaatccaaacaatttggatatcatagacactaagatgtttggatcgtcctgtatagaagaagaactactagcttattctttatctagtggtgacaatgtggagctcttcggaaaatccttgagcgaacttaattcagtctatgatggagccatggcagcacaattatttggagacaatcatatttataatggcacttgcgaagaaatgaacagtttcttcagattttctgaagactatggactaaatagttcacttccgtcaactagtcgtaaaagaactcatgagcaattttggaactcatctgaatttagtgaggatccattcatcaataactcaagtttgctctacaataaagatctcatggacatcgttgaaccatcatggtttaccgg

SEQ ID NO: 187396 - DNA, 1869 bp, Cannabis indica
cttctaatatgtttgtagttgagtggatccattatgatgaaaatttgtttgatcaaatggtgcaaaaactgttaaggttgataagtgagcatttggcccacaaattaattaataaagacgagagatgataagatgaaatatggtgtgttatggcttttgacagcagatttagaagccacacatgcgatgtaggtttgtttgccgttttgttggagttattcctttgtttttatttgtttagaaaactaaaactacacacacatggagtcttgccttttttttcttttttgagtgagagaatggatatttcattacgaatgaaaataattgattacattttacataattcatcgacgttggtgagattattaattatttcatttcttttactttttaagccatgccatgaatgatcacttgagatgatgagtcaagtcaaagtcaatacaataaccatatgtttatacctatatatatcggtcttacataaagttctagaaaattaattatatacaaatatatgtgtatgtgaaaccagcttatcattattagatgagcttgaaatgaggaaaaaggatttcattctatgtaaaaggccgagaaaccatgaacctgtttcacaatcaatgattacgattgcaaacataatatgaagatgaacgttcttttctttttctctctttcttaatatatctaaagcttttgggggtattttagttattttgtgtataagatcaaatagaatgggacccagattctcaaagcaaggtaaagaaaaagtgagtgagccaaatagacatcacataaaacacggagaaagaataagagctcctgttccatgttcgaattccaatgtctcccactatccatttcggttgttgaaattacagatatacccttacatcctaatctattttagtaacattttttgttagctagcacattgatagtggtgctttgcaccttaaagtgtgactcttaccatttctcattgattgacacatgcagtggctggctgcggagagctaagtcgttttcgttacatgttttattggctaaagagccacgcacacttattgactggcgcgcactggacgagtggagttggatcatgatgcatgaagaagccaaattcggtgtgtttcatgtagcccgtcctttgctcaattttagattccaatccaaaacgaccgcatgcacagcaacaaaaagaaaaaaaaaatagagataagattagacttgatcaggaaagttgagctccagagtcacttatttaatttttcatgatcacaaaaatcaaataatagtagtggctgttgacataataatcattatgttttaatttattcggacttaatttttataataattttagccattttcttctatatgttaagttttgatattgaattgttccatcatcaataatcctctttgctttgtccttttgtcattcatgaactaaaccacttgcattgtagttataatttataataaccaagtcatcataagcgttttcactatttcatcgatgacgaaaactcaatttatagtgaatgtgttgtacttgtaattttgagtgagtatggtgcatgtgctgctgccttgtaatatagctattacactgacacctgctacatcaaaatctttcgtactgatgactagtgatacacacacttgaatggaagacacatttcatgacatactaaatcttaaagttccagggtaagcctactataacttcaacaaataaagagtaatttacggcataacctttttaagtggttaaattttcgaaactaacccccaattttaaaattttggcggtaaaacctcccaaactgatattctgttagcacttagcccttt

SEQ ID NO: 187397 - DNA, 1405 bp, Cannabis indica
aaaaaaaaacgtccattaataataaaattaggtctctcggtcattacaaaataagtcttgaggaataaaggaaactcccaagttatccaattgtttgtgggtaataaaggcccacttaatcacattgtgggcaacaaaattataaaatttagaaacataagtaaaaaggcagccatcaaaacatctggaaagtttctaacaaaacgacgaatagttagcaatctcccaaagcaaagacacctcattaagagtatcgatcaccattcttgagttactctccacgatgatgaacttgtgccccttaatctttgcctcttcaagagctaaacaacacgcagctaccttgccgtattagcccaaatcacctcaccataatgatttttaaccactaccaatgcaagagtttgccgtattagctatccgatatatgtaaagatttaattagtctatcatttgtatttgaagaaaagaatacatatatgtggcatgtgggccattttatctaagctcattcaattaagtacgtacgtacgtacttgtgttgtgtcaaaacttttatcatcacgtgatttttttagagctcgtatatataatgtgtacgtccctacctaattgaatgagtttccttaagatatgtaactggtaactagaggtattggttacttcaaatatactaactcatataagataatgacattttttaattggtcgacatgctagaaaagttgacgattgataaactgatcataccactatttagtttaactttaactataattagttttagctttaattaatgtattgttttagaattatacatagttacacataacagattaagtaacccatcttaagtactactagtgctttttttttaagtgttaagtgttttgatttcaattggtttgggaattggaagctgtaataattaaaaggcctatgaacaatagggtttgcaccaactgattttttttcatcacgttttttttttcaagtgatttaatttcaattatattccaattatttgtgataattaaaaagcctatttgaatatacaataggttttgcaggcaccaacattttttttttactacaactgatttttttttttcatcacgtggtttataggtttaggaccagattaattttgaaaggttacgtaggtacgtatagagttatagaatttattatgatcataattttagttgaaaataatgtctattttgatttttgaataatgcccaaaaacaaaaagagaaattaacagactccaattttgaaaagtacaacttaaaaatatttcagtcaaagggcacatccttgtattatatatttctagtttttttaacatagctccaagaccagtttttttttattattattatttttttttatttaagcgttt

SEQ ID NO: 187398 - DNA, 3742 bp, Cannabis indica
tgacaaaactattacattttttgatctattcatgttaaaaatgccttcaagttggtcatattaaaaataaattgttgaaaattgaattcagagttttattttttaccattttggaaaatatagaatgcattttgtcaatttaacaaaacaaaaaatctaataaataatttttacaaaacacatgatccaaaataatatttaatctttttttaaaccatccttaattcatatttatcgtcaatataggtacttaaaaattaactcatgcactaaaggtaggagataaatcaatttggataaataatttttttatcattccttattgatatactcaatcctgattctttttaataaattattcattgtttgaaaaatatatatataaaagaattaaaaaaaaaaaaaagagtaaaagacatgcaatcgaccaaatcaaactaaatttcatttaaaaaaaaatgtacaaatacaatttgtcccatttttttaagaatcacaaagccatgcgaccaaataatctaatttcaaataaacaaataaataaatacctaacaatcaagtcatttacttatagaccatgtttaaatgatatcaaaaaatttaccaaaataaaatagagggtatttccctctccagaccaaaaacgtttactatattaagtattaactagtatcaaaattaaacaaagtaatttttagtttttacattatacataatagctagacaatatttagacttatcattatattactcgagcaaaattatattcacttacacatcatgaaagaaaatcgctaacaaattttttgattctccatggagcaaacagatgcaatattgaataggcagtagtcaaagatgtggctcttactacaataaacacaagaaatctccgcgagctgatccacgtgtgaggaaactatttgttgacccatttctcacccatgctctagtctagagcatatttaacattgaagctacttggacagctaaagaaataatgacatcaacttcaagaacactagtaactttctctcccggaaatgctctagtagtaggccactgataattgttgttggcgattctataataatgtcatagatctcattataggacttagcaagtaaagtcccattcaatgaagcatcaatactcattatagtgtgataggattggtaaatggataaatattatgttttgtgtaaaaaaaagagtgtaaaaattgataaaatcaattgaattgatgtagatacatgattccacatgtgcccatgtaacttcaactataatcagccataaaatatacaggaatttgaacgcttccattaggattttggcttgcttacccaaactgtgctatagttgttaagtgagtgctgatctatgtataatgtcataaagagagagcagaatttcagcacctatcaaggcaataatgagccactccaacagatctgatttcctattttgaagaatttcctgaagaaaccgaatattatgctgcacagataaaataaaattttattagttacataggatgcaacagcaaactgccatatctaggaaaacaagaaaaatccacagagcatatttatttacctctacaaacttcaacttgaaatcaagacttgcgaatctctgggttacctcaaattcttctctgagatattcccatatctgagcatatttagcatctttccaggcaatatctgatctgtaaagctaaccagatatcaaattagcaaaataaatcacatgagactaatcttaaacggccaatttagcatctttgagctgctgcagtgaaaagactaatcaacctaattgttttctctactttctttttcatttttcatttttccctttttacttttttcctatatacaatacttaacaacaaattatgatatgataaaactccgcattttcgctaaacaaaatctccattgccatttcttagaacagataccagtggaaatgattacattcactagagacagaaatatatcctggcattgttgcaagttcctgtgaaattcttcacctataataacaaatctagactagatcatatcctttcaaaaccctaattgataataaactttaatgggtacattatcagcaataactgatttactaaagttttttaaattatatcgtactgctcatttaatatcccctctccccagtaaagcaaatcttgaaacattatagtgtcactaattttcccttgttttaaaagttcacaaatgcacccatcccataatttttcagaagcagcactcacttacagagaaatagttgataaattagacaacttcaaacttgaaattcaaatattccatgtagtagacagttaaaaaatcacctctcaaacagtccaagcttaagaatcacatcagcaagattagaatttgcctttccaactaattgaaataatttttttttcttcatcttaaaatttccagttgtttccatttcacggttaatgtctgtgaattctgcaaccattccatcaacctaaaagaagtaaaatttcagattacttacaaagaactatctcaataaaaattgaaactcccaaaattatatacaccatacctggcgaacatagtaatcaagagcaatactttgaccaagaacactaccaatggtacgaatcccatcagtattcacatactgtaacattatataatccaatcctccttccatccacgtgtctaatgttggcttctctcttacttcgtactctaattttacacaagaataaaggaagcaacatgaataacattcaaaacctactgttccacaaatttcatttaaaatttatgagaagtttaaaatccaagaaagaaggaacctgttatgaacatataaaacatcacaccaagtcaaacaaaagaagactttgattgatacacagtagaatcctgctttctcttttaatgctagacttgttccataaatatgttaatttattagctttagctatacaaatatgttctgagaacagaaaatgtgacagtaacatgaatgcaacatctatatgatgatttactatttcaaaacggaagcacatacttaaatccaagtgaagctttagagatcttaccatcctttctcatttcaggtagtaagcctgatgcatgtttctctacaatttttagatactgatcaatctcatgttcgcggacgttaaacaagacaattgaaccgtattgaaagacaaccatgtagcagcaatcactgccacttaaagaagcacgcaaaccctgaaacaaaattcacactatcatcttaagttgtgtcagcaagggccgacagtagacaatgagtatagatagggtagatagtcctatggcctccatcatacaaaggtctctagttagaaaatataatttatataaacaccaaaaaaagttatttgtattaagagccccacaattaaatttatcttggacctcaaatttttcaaagccaaccccattcttacaataccactttccttttaaaaggccaaacccaaaccaacaaaaacctatatcaagccaatatgaaagcatttgctttataaacaggtattccatcgggggattagacaatgagacaaatcaattaaaatttaaaactaaagatagatcaacaattacatcatgttatgacccaacaaaataataataattacagcatgtaaaagcacacttcttaaggcttcgtttggatctcgggattatgaagggaa

SEQ ID NO: 187399 - DNA, 4815 bp, Cannabis indica
aaaaaaaaggataaaatgtctttgtataatttttattcatggttggatataactaaacaaaaccattactacttagacgctccaaaaactttggttatagggcgattgagtgagtcggcttatgtaggcttcttttccattttgttagactagtgagttgtaacaggttgaacaccgatacaacaagctagcttatctcataaaaccaggccaatattgcagagaaaaacagatgataaaaaagccgaagcgattgaacactccaagcagaaattctattactgtttcgatgatgagaattacaaaggaaatgcctccaataattagaaagcctggtctctcccttttcccactaaaccttttgttacctttctcagctaactaattttctatttatcctctcacacccacaaacggttacagcactcacaaccgaaaaagcacactagaaaataggtacactagcaaacttatatctccttctcacataggtgcacttaaccaatggtttatcaaacaactatcgaaactcgatcttgttttgtagctcattcacgctacattttcttactcggagataataatgggatgttctgctgggatgcctgagtgtttgtataaaattagcagaaagttgattcacattagcttttaggatgcccctactgagctgtggtgagagtcttgatatgataccaaatgattagatgtgccaatttcgtctaactgcatgttatttttaacagtctcgttttgtttatgtcttatgtgttatcagatcctctcttggttaaggctgcaagaggagagcctgtaagtcggcctccagcatggatgatgcgacaagcgggaaggtatatggctatttatagaaagcttgcagagaaatacccgtccttcagagagagatcagagacaaccgatctcattgtggaaatttctttgcagccttgggaagctttccgtcctgatggagtgattattttctcggacatacttacccctttacctgcattcggtgtcccatttgacatagaagatatcaggggtcctgttatccaatcaccaattacttctgaagagggtttgaaatcattacatcccattgatttggaaaagctttcttttgttcgggaatccctgcaaatattacgaaatgaggtgatttcttatgttctacgtgctctttagaaggaaatcggctatacaagtatttatttttgtatttataacaggtcggtaatcatgctgcggttttgggcttcgttggagcaccttggacaatagcgacgtatatagtggaagggggtacaactcggacatatacaaccataaagaaaatgtgccatacagcaccacatgtattgagggctctcttgtctcatttgacacaagcaatatcggaatacattgtcttccaagtagagtccggggctcattgcatacaaatatttgattcgtggggcggacaactgacacctgagatgtgggagaaatggtcaaaaaccttatattgaagaggtaaagttgtttgttttgattccagtctttagtgatcttactaactgtaatatgttagttagatatgtaaggaacttgaaacaattacgtgttctattgtgtgttcgatatctttttcttctttttgttcatttcgtaaaattcttgcagattgttagattaacaagaagcaaatgtcccgaaataccacttgtattatacatcaacggaaatgggggtcttcttgaacggatgaaaggaaccggtgttgatgtcatcggtttggactggacagttgacatggcagatggaagaaaacgactgggtagtgggattagcgtacaaggaaatgtcgaccccgcttgcttattctctcctcttcctgcccttactgaagaaattcaaaggtttgcaacagaaaattctcaaatccaactttcatattctacacttaagagtaacattgaaaaaactcagaatttttctctgaacaatgctaacaacatggcaatgaagcatagatttacatactaagttaatcgataaggcttgacccgaccgagtaataatattccaattctggtttgtttctttgtcagggttgtaagatgtgcaggaccacaagggcacatactcaatctaggacacggtgtccttgttggaacacccgaagaagctgttaagcatttcttcgatgtagcaaggaccttgaaatacgatacacctcaaaatcaagctatggaggaacccaacttagtagcttaagcaagaaatttaacttttcggttcagagttatcgccttattgcggtggcattcatgatagctttcggtttagctcatgcgcggttatgaattcgacaactattttaaagatggttaagagtgaggtaagctaatttaattagtgctatactaattcattttcagttctatttaattgagcaaaaattctgttctgcctgtaattgtgtagctaatgatatacttaagcttaatgaatgaatttttgcttatattgtctaatggttgtagttatagagtaattatcaggagaaaaattagaaataatttaataatttagttatttttttttttaattgaatatgcaaacttaccttgctcttattatgaagaataaaatattataaaaggtgaatcacaactttgactgattttaaacatttattgaagctttagaactttgttattgtaaggataattggttttgtgtgtaaaatttcaatagattattagattagtaaattatttgagtgatatttgttcatacaattcttgacttaataatttaagtctcaatttggaagaataacatttaaattgtgattcgttatatatttactaagtttaagaaagtatatttatataataataataattattattatattttaataataaatttatttttataaaattaataattttattttaaattataatatatatatatataaatattatatttattcaaaaaaaaaatgttattatgatatattattaagatttgtttattattttgttgttattgttgatatatttaatactttttgatattttgattttttttttcttcttagtgtatttttatttagttataacatcttaattagaatataatttatttggttactattctacaattcattaccatttttattttattacagtgaaccaaacgccacctaatatataaggaatcccatatgtaattggtgcataccatgtttccaactcaatttgttttgattagaaaaggaaaaaaggaagaagaaaaaaaaaaattaaaaagagagcttaagagagacatctagctataggatctcaataatggatagaaaaatgatgttctataaatttggtgtcaaaaattcttttgattcaatcacaacactaagaattatttacaatataaaaaacaacataaaaagttgtacgtttttttttttttttatgagtaacagacgttttattgaaagcaaaaaaaactagtaaccacaagagggggctacatcccttaagagaccactggcctcagccatatgcactctcgcccaacgggcaagtgcatcagctattacattgtgttccctactcacatgacaaacaaagactttatcaaaatccttgcacagacacaaacaatgtcgaaacagtgggtaagtgtcccagccatatggaagttgatcatttttccaaaggctgtggcagcgaccaaggagtccgtcttaattttaaccacagcagcttgacactccttagccatccgaagtgccaaggcataaaaagttgtacttgcaatagattgtttggaattaatttttttttttgtaaaatatcttaaataattacaacagtcatgaaaaaataaattaaaaaattttcctaccttttgaaataaataaagatgaatcggtatatcttttttagaaattgaatttttcataaatatatatgtataatattattaaaaaaataaaaataaaatattgtggctacagtagtacaacatatatgtcgtgcactgtaacttgcaccatataatagtgtaagttttagtgttaccttggatccatttcttgcaccaaatccaatatttgaagatacaatggaggtgctcttaaggttctctcatttgagattcttccatttatattatattatgagatatttacaagtcaaattatttaatataatattaaggaaattatattgaaatatgttaaagtatgctattattttcatatgtaaataataagaaaacaaatattaatttgatctttaattgtttgagtttgttctcatgaaattatgtgtagattttctaaactatcaattacaaagttgaagattaagataaatataaaatatatgtacataagccataagggatggtaataaggtataaaaaacaaaagatcaacagaaaaatgttagggtaaaacttaaagtaattgtattattaagtataaacaagtacatgcatgatcatgaaatccatttactaaaaagaaaataattaataaaaaaaagataagattagagtaatatgcattattaaagtagcatgcatattttatttttcaccactttgataagacaagttttcaccaagataagttttctagtcacatttttttttcttttaaaattattaaataattattattattttcttttacaaaatattaattattaaaattaaatacacactagtaattaggttgtatagatctaccaagccttaaccccactatatgattttggttaattgtagaaaatagatatgtgaaat

SEQ ID NO: 187400 - DNA, 1316 bp, Cannabis indica
ctagctccactctacttgaggcaaaccacaatctacagttctaccacgggcatcagccctgacactgaaggaaatattcagattttcattaacaaaaccgcaaattcaactctaccaccacttataaatgccatggagatttatgttctcaacgagctatcactgaaagaaacagatcaaacagatggtaatctaattattgacaaccgaaatataatgtacaattttatctctattattacaattaatcacttcacttttaacgttattgttaatttctttttttctgttgtgcatgtacaaatatcatcagttgatgctatcttgaacattaagagagtgtatggagtgaagaagaattggcaaggagatccttgtgctcctgtgacttacgtgtgggatggtcttaattgtacctatgcaaatagttcccatagaattacgtcactgtatgtctctgtttgactttgaggattttctttttttacacacatatatacatatatacattttttaggctagctctgtatcttatatctttatttgtttcaaataaaatcgatcagggatttgtcttcaagtggattagtgggggaaatttctccttacattgccaatttgaggatgttacaaagcttgtaagtatcatcatatcatatgacaatgttttttggagatttctttttttttactacagacccctttcttaactctttgctttttgtaataaattttggataatttattttcaatggagttataggtagagatgctatatatagtgagcttactttttttatttttatttttgacaaaattaactattatatatgatcaatctactactcattacagggatctatcaaacaacagcctaactgggatggtacctgaatatattggtcaactttcattcttaagggttttgtaagttaaatagatatttgtaattgattaattaaatatcttagtgacagaattattgacttaatatatatgtttgtatgcactctgtcacttttcagaaacttgaaaggaaacaacctcaagggtccgcttccagctttgcttcttgaaagagctaataatggcagtctatcattaaggtttgactttatatgttaaaacttttatatatgatatagtcatgctcattttaataaaattatgtattcatttcttttataaaaagggcttctttattaccttcaaataataaccgtaacaactaaggttaaggacttattttgatgcagtgctgaagccaatgtgatggtgaataaaaattcaacttcacccacgaatgaaacttcatc

SEQ ID NO: 187401 - DNA, 3140 bp, Cannabis indica
taataggtcttgtcactgcagtaaaatatttaatcttattccctattataaaatatcttattttgttcagatcaatattagataactatttttccatctcttttcttaattcgagtatttattcttttctggtcacagtatagctgaggacaaggtcatatttccagcagtagacggagaattttctttcttccaggagcatgctgaagaagaaagtcagtttaatgagttcagatgtttaattgaaactattcaaaatgcaggggcagtctctacttcggaagctcaattttatgcaaaattgtgctcacatgctgatcaaataatggaaaccatacaaagacatttcagtaatgaagaagtgcaggtgacctttcattagtcattctctacaataatactattcatgacagagaacttaaagaaagagttaagggtgaggggagagatgtagtgctgtgcagagagagcttattgttttcttctgtgtgtgtgtgggtggaatattagaagaatatcatgtaacgtggaagttataaatgacattattatcttaccattttacttgaattaatataaatgacattattatcttaccattttacttgaattaatattaaagctgcactatctctatttttagttactacaactaatgtttatttatttttatttctgaaaaagaatctgctaactgtttagcttatctaggttcttccacttgcaagaaagcacttcagcttgaagaagcaacgccagcttttgtatcaaagtctatgcatgatgccgttaaaattaattgagcgcgtattgccatggctggtagaatcattgactgaggaggacatacaaaactttcttaggaacattcaattggcaggtatattatatgctatatttcgtcacttgctgaaagactattactatttgtggaattttctgtcatctatttattttttttgtttgtgacaatatatggttccgtgctccagctccagctgcagattctgctttggtaacacttttctctggctgggcttgtaaggctcgtaaccaaggtctatgcttgtcttcaagagccattggttgttgtccagtaacaaggctaagtgatattgaagaggatcttactccatcagtttgcccatgtgcatctgcattgactgctaaagatttcttgaattctgctcaaaatgtcgataaaaggccagtcaaaagaaatgcaactaaatcaaggaaaaatagtgaatccacaaacacttcagaggctgtaaatgaccataaacagtgttgtagcgatcaatcttgtcgtgtcccaggattgggagtaaatagcaataatctgggtttaaattctctgtttgtggctaagtctttgcgttccttgtcttttagttgttctgccccatctcttgattccagtctttttgtatgggaaactgataatagctctattgattttggccgtggtgaacgaccaattgatactatttttaagtttcataaagccatacgcaaagatttggagtatttggatgttgaatctggaaagcttaatgattgtaatgatacgttcctacgtcagtttattgggaggtttcgtctactttggggtttatacagagctcatagcaatgctgaggatgatatagtgtttcctgcattggaatcaaaagaggcccttcataacgtcagtcattcgtacacactagatcataagcaaagaagaaaagctatttgaagatatttcatgtgttctttctgaactttcgcaacttcatgaaaacttgcagaaggaaaaattaaacggggattctagtgaaagtagcaccgagtattctgcagtcaacaaacttgactatactagaaagtataatgagctatctactaagttgcaagggatgtgcaaatctattaaggtgacactggatcaccatatatttagggaagaacttgagctgtggccattatttggtaagcacttctctgtggatgagcaagacaaacttgttggtcgtataattgggactacaggtgctgaagtgctccagtcaatgttaccctgggtcacttccgcacttactcaagatgagcagaataagatgatggacacctggaagcaggcaactaaaaatacaatgttcagtgagtggctcaatgaatgctggaaaggaagcccagaatcacctccacacactgattcatcagaagttagcattcctcagaaaggtctgtatattgcttagtaattttccatgtaggagagatttttttgcatgctcttaaccggagatgggtttaggagatatgtttaagacttggttttgggatttttcattactttttacttggtgtaggccttgttcattctctgaatttatgtggtattgagtattgggtttgatatttgaaaagtccctctttacacgtcatttatcaattaaaaatagaaagaaatccagctttagtacatgaaagaataggcttagatctcaataacagttgactatgagataaagaatatgattctagtagacgcaaaaggccttgtcttgttaattgtaaatattttctgttgccatcaccagaaggattttctatagtgtattgcagtcttgcaataccacaccatggtatctccgatgtttgcaatgttaatttgtgtttcatcatattattttaagcatcaaataaaaaataatagtttactacataaatgttcatgctaattatacttgtattcagtccacgagtttaaattctgttattggtatctcctatgtttgcgatgttaatttgtttcatcatattattttaagcatcaaatagaaaataatagtttactaaataaatgtgcatgctaatcatacttgtattcagtccacgagttcaaattctattattgttagagaaagaaaattatgacctttcctatttattcttgttagaatattagctgtatattagttgtaaaaattaaggtaacttgtatttagtagtttcccatttagtctcctagctttgtatataaatatatattattctatggaataaaatgtacaattctcttcaccattgtttacatggaatcagagccactttagattcgaaaacaagaattaggatttatagttggagtt

SEQ ID NO: 187402 - DNA, 2016 bp, Cannabis indica
taggtccaaaattttcaggtaaaataggggatttgaagaaatacgtgaaaacaaaaaccactggctgataatggtaataacaaaacataaaaagccacaattaccaccaaacttgttaggactcgtagatttactgatcctatgctcttcatccttttcgatctcaacaggaggatagcttaatacaggaggctcatctccaccaatatcaacatcctcatcaattgggtcatctcctgaaataagaaaaaaaatcccaatacatgtcaaaactaaatagaaatataaaagtccatacaacctagcttagaaactgaattttgaaatagaactatacaatgaaatagtggagcatcacctctgcaaggtgacattgaagaattgctcaaccctgagtcctgcaaatgctacaagagaattagaattattttatgaaaaagagaattataccattttagtatgaaaagtgaatagtaagtacctctatttcacaaggttcagcttgcgactgttttttctgcttctcttccagaaattcatctaaaagcttacgcagcttgaacaaagtatcatcactgaattcgtcaatatcaatctcaatctcttcctcttcacagtctctgccatttaaactactttgctgtaggaactctaatatatttgaaggcaactcaggcagccaatatcttaattcattgtcaattttggttttctcctcgtctgtcattactcttttagcaggttcagaccttacatccggttgcatatccataattttccttttttttgagggggaaactggatgagtcatttccaaggcatcacctttggccgattttgctagtaacggttcggaatcaaatttcggcaaattctttttaatatttttccacctaacttcaaaatatttattgatattattagccatagtatggtatagatttccaggaggattgtaggtcattgcatttgtgaaagtcagtctcacatcagcataaaactccatgggatttgagtacgaccctgaagctatcttactatttatagttcccaaatccattggatgcttaataacagtaaaataatccggaatattcatactcactacatcaacagggttgttaaatgcccatccaaacctatgattcatcaatcgttttaacaatgcctcgcattgtttcagcaacatggcaaatgtagtgtctggtaatgaagtctgttttgttgattcaaacttcccagaagaactccgattagtttcagctttcttaacaccagcattcaacttctttccctggctagaagttggtgttgagaatttcctggactttccaatggttggcacattctgcccattgctacaggtaaaaatgtccttggaagaagacctggcaagtaattcaagtttcctcagagctactcgtgtttgtacaagatcctctttcaatttatgtaacagatcctttctctcagttcgtgacaaattggacaagttaagaacttgattgggaatgcagaaattggctctctctttattagaattcaaacttatgcacttccttgttaaggcacttggagcttcagaggcagagatttccatgtccattcgtcctgagtaacccgaaaactcagactcaccagctgtttgaatggcattaccgaaatagcttcccgggtacctatttggcttggttacagtcatatccaaaatcacagcaaagcactaattcgctcctttccaattgttgtggactttgtatggtctataacgatatataatcaccaccaacagagttagaatttctgcgtatgtatcaatcatggagctaacactaccatatcggctaatacctactaatactccccaactcaaaacttggactacacaaagggtttaactggttcttttgaggatgaaatatctaggctaaataatttgaggacagtgagaagtggaaagaaaaatagtctttggtcattaaattcaccaactatacaaaaaaaaatttaaaaaaa

SEQ ID NO: 187403 - DNA, 1153 bp, Cannabis indica
aaaaaaaaaaaatcacatgcataggtatctccaatatattttatatatactttttcttaaaagtgaaactttttatacacatttaacaatttttctatatagactatataggattagatccataaatttacaatagatattttcttattgatgaaaaatatgatgccataatgtcatcattttcaaaaatgacacccttacaaaaatcatttttcaaaatggcattattaattattatttattattgttatattattgtaattattattcctttctcaaaattgtttataatctaattagaatgtgactattttatttataaagatttatcaaattattatattattgtacaaaacaactatataaagtattaaaattaatttgttcaacactcagctgctcttgttgatattaaggattttcgtgtggaaactagaaaaattattattagtgaacattattaatatatttctttttcaataacttcgacatttatacttaaataaaaaaaaaatcgatatgctctaaatttttgcttttaatattcgttcttaataaataaattttttaaatccgtcactgattatttatatacagattcgagttaggattggagaaaccagacccaatgagagcaatacaaagtgcactaacaattgcattttcatacataatgggtggatttgtaccattattgccttatatgatatttccaatagcaaaggaggcagttgtggcttcagtcattttgacaattgtggcattactcatatttggttttgccaaaggttacttcactggcagcaaacccttcaagagtgctttccaaactgctttgattggtgccattgcttctgcagctgcttatagcattgccaaggctttccaagcattctaattaattcttaattaattactctattgttgttttgcttatcttaattaattactctattagtgttattagtaatcttgttatattttagctaagaaatatatgagggtattatcgatttcgaaaatgccttttgtccagggttagccctgaactttagtgggccttatgaaaaaaaattggatctttatttaaaagatatagtattttcaaaatcaataaaataattgtgtatttttaaaaggaaaaatatttttt

SEQ ID NO: 187404 - DNA, 1277 bp, Cannabis indica
aatcagacggaggaaaaggaatgatatagaatcatgtggtgtaaatgtttaacacgctataccatcgcatcatcactaggcttggagtgagccacatatactcaccacctgtccccacatttacacgccacgtgtcccctctttctctctctaaacccacccccattttctttagagcgagaaagagaaagaacaagcgaagcgaacctcgccaatgctctcctccgactactaccttgcttgattccatcaatttcaatcagtagaagaagatttcgtagattcagatgaagactatcgtttcgcggttgatccattcaagatcatcgtttcccaggctcaagtaagctctgtagtttctgaaaatctcttttttttttggagctatttttaagttttgatgagtgtttggtgttgtgctgattgcgtgatcgtgtatgtttggttgccgagaaagtggtaattgagttagaaagaatgttgaaagtaagtaattagcaatgcatgcgaaatttagtgaagcgaagaaggaaatcaaatgtgggttgtatgtttttgctcatttgatcatgtatgtttggttgctgagaaagtggtaattaagtgggaaaagatgaaagaatcttaactagtttgttaatttatgtttgatagttttatgtgaaattttgtaaagtgaaaaaggaaatcaaatgtgggttgttgttctctcgtgtttaattttttgttttttggctcatttgactatgttattttgaagttctaaaaccctaaccacacaaaattaatacatgtatatgagttgagactctggctaaacctaaaaaatgttagaagatacacttacattagcttttatttaaatgagatattgctatctagatgtggaacctaaatcattgatgttttatctctctgaattagattttcaaactggggacttttggtgtatagccattatttcgttaataatgacattttctggtgtttcaaaaacatgtcatcatggttctcctgccctttttccaagactcttgttgttttattttgataaattgggtctgttaagcttgttgtagtgtatattttatgttaacctgagggagcatgttcactgactcactcttgtgtcaatggaatttttatatgcttcatagtacattggttgggtccaacagtgggagatatctctcaacagactctaataaggttgatgagccctttaaggtcgaggaagcagagactgtcaatgttcctcctcctcctacagagaaggt

SEQ ID NO: 187405 - DNA, 1041 bp, Cannabis indica
aaaaaataaaaataataaaaataaaacagttacataatcaattataatcatatacagcaatccagcccataataataataataataatatagggttgctattattaattaatcctaagcacaaaatattattgataaaaacaatcataataataccaaataaaaaaaaaagcacagtttgttgtttttggcagccaacaaactattatggttcatacctggatattttgttctatctttgttgatgctttggaagaacctgtttagtgttttaagtatttcgatagtactaatcttaaagcctatttattacctcaacaatattaatacacttcaatatatagtgtgcattattcaactaatcttgatgaaagttatttaaaaaaaaatgaaaacaattggtgtattaattaacatataatactgcaattgatcattaatgttgattaattaataatatataaatatataaatctaatacaaagcagccatgacaacgtgagctcattgagttggtcaacatatgcatgcatttttctttttaataatataataaggaaataattggtcaacatttttcccatgtgatgtggtgcccccatcaattaagcatttctgtaaatttgaaaattggatatattagagaaagaaaaaaaaaaatattaatttcttcatttaattttcattgtattgtattcctttttctccatatttctccatgaaatattttagacaattttttatacttgagagagatataatccaacagtaatactcaaattaattccatttagttttggaatttatctactttttgttataacgactctcaagcattaataccaaatcaattatatccatggaataattccaacgaaagctcagtgcatgggatctctgtccaaattagaacaatatttatctcaaatttttcacaaacatgattccaagtttggatgttttcttttcaagacttaatatataaatatattcgaaattttatagtgtggcccctaaaaataagtgtatgctttctttttgt

SEQ ID NO: 187406 - DNA, 3101 bp, Cannabis indica
tttttacaggtttggaagctgtataagtcagataagttagccgaagctgttgaccctagcacgaaaggtgagattccagcaaaagaagtagccaaagttcttcaaattgggcttctttgcacccaggcttcagcttcttttagaccatcaatgactgaagtagtttcaatgctgaccaacaaggaaaaggaaataccagctccaaaccaacccccatttctaaacgccactgctttaaacccaaccagcttcactgggtcttacagctcacagagcttagtatcaaattcaacccccattactagagttgaagcttcctacacctctacagagatttctagttccaacagttcagaagggcaaacaagaatatgagaattaaatggcatatatttagagatagttacaaaactaaacactcatgtccaagtaccaagactcaaaacatttttgagagcaaaaccactactaatcatgcaaatgggaaagaggcatattatttggatggtttactcatacacatactactgccacaagggttggtttaacagtgcagttactcaaatttttgttaaatacacacaatgttggaagaatattttatatattttttaatgtatagaatcatgggaccacctccgaaaattgatgcatgccattaatttcaaaagtgggaggtggaacagtttgattaggacctgcttaattgtactagtctcacactcattggggtgccttgtttcatttgtttaatactaatacttgagctgtcataaacactatcttctgaaacaaaatcggtgcataacatggttttaatctgtaatgctaattagtacttgtcactgtgggacaggtatacaacaacgcttttataattgcaattaaattatacagcatatacaggtggcagtggtggtagttagttaagtagtattaattaacactagatgtgacatcttgaatggactacacaaagtgatgagtttgcataattgtgtaataaatgaggagattgttggctatgatgagcataaccatatttttttaagctaacttttttatttctgaaaaatacttttataaataaaattgaagttagacctcctcgtggtcattacaaaatatattaacaggtatagtagatatttctactatgcccgtaatattgttaacaaacgctcatttggccacattatgagccgcgtagttacaatttctagctatactagaaaaattacaattagtcataaaagtatagaggagcttacaatgacgcacatagttctcaatcccccaaatagaatcatcgccttttaggtacaaactctgaatcactctccaccaaaacaaaagagtgatgcaatgagaccgccgtctccatggctaaaagacactccatggctaaaagacaggccgcagcttctccagtaagtgggtcagagaagtgtagcctttttaccgccacccacaaaactgattcgttatagtctctcacaatcgccacagcatgggaccatagactcataacctatctctaccccgaaagatatgaaatctaggtgaaagcaaaataagtatctttcaaatcagtttttggacaatgtatactaaaacactaagattaaataaaatgggatgggtaagacattgagaaaaagacattatagaggattagaggggcttatagatgtgcacatttttgcattaattcattgctttataatcatttttcatagagaatatgaattgtataatcagactaccctaatcccaatcaaggcataaatccaaaatctcaactgaataactctcatttcattctcatcccaaatttaatgttatgtaaggaaattattaatgtaggctacaaactcctagtcatgtctaatcaataggttcacttattactaaattataaaatctcattacaaaagaccacacattacaagacataaagttaaaacaacaaacaacaatgttttttctcatttatgttttttttcgaatagctatatatacttgttatatttgtatacatatatatatccttactctgttagaattattataatgtactgatatacaatcattaattatgtgcctgatgttgctaataatcataataggatggttaacaacttaattatgtattagaggcacatgagagcacccttaatactatagttggcccattaaattatagtataccataaaagaccccaaaagcccaattgattaataaccccttagggttataagaacaaaaacaaggaatatttatatgggttatgtgtggtaaaggggtaagatgagtttgtatggtaaaaggcaaagggttagctccacaagtgctctctcttggtggtgattctcattgaagacaaagaaggataatggcttacataaatggtatgagaggtatgtgttttattgtctttgatgctctaaataaaatatagattttggttgatgattatgagtaatgaagattaacatttaatgtattttggttagctcataatcatagaaatttaacaaatggtatcaagagcttatatatttgattttagagctccataatatttgaacttaatcgtttttttttttcaaatcttaagttttttttttcggattaatgtgttgggaggagataatatgagattaaatgttgtagaatttgttttttcttaatatttgggactgttgctatatgattttatagtgagatatcaagtttttataaagttcattaatggaggaaaacccatttcgggttcaaaatattttatctattattttgtgttttttgaattaaatggatattggaaaataatagagggttgaaaatgaaacaaaacccctcaaacgacgtcggatttggtggccggaggtggtatatccggccaggtcacgtcgatccgagttatatccggccggaggtgctggtcagatttttgatctctccttaggtaccctaccccatgacacatagatcactatgaactgatccatcagtgtccttattatgggactttctcaaactattagaggtagttggatgtatcccaagggtgtaaggccttggccaaagaagtcgt

SEQ ID NO: 187407 - DNA, 3859 bp, Cannabis indica
  modified_base (3806)..(3806): a, c, t, g, unknown or other
gtaagtggaataaagtagacaaagcccttgtgttgtcaaggtgtggtgttgtgaaaatacgttcaagctccctgaatgcttcttcatctcttttctcctctgaaattacacaaatataatgttagttttgttatatatgtatagataaacttggatgaattatgtcaggagacactcacgcatgattgttaagcaacgttcgagtagctcaacaaggtgaagccttttgatgttgttgagtttgtgagccaaggaagacagctcccatgactctgtcaagagacttaaacaagaacacttgaaagttagagagaatgttctgacaaaaaattatcttttttaatcacatgaacttactcgattggtaaggagccagtgagggagaacatctgagttgaagcaacgactatgcttcggatggtccaataaacaacagtgggaacattagcatcaacagcaataatctcagggagatcataaaactcgacaagtttgttggttgtgtcgataatttccccaataagagcaaagagtgcatcaagtgttggtttcagatcgtgtagatgctccaatatttcaggcaattgtttaagaatagcaattgcttttgggagtggattagttgtgtagttctgaacaacaagcctgaacttaccaaaagtgatcattaaagttaccaaaactagtaacaccttcacttcccagctgtagtgtttgactagctgcaatacgtctaggacaattgtgtgcacatctacaccagccgagcacttactatatatctgtgcccataatatgcaaaagggtcattcataaatgaacaaattgacagaaatgaaatcatttttgtttttattacctcgagagaaattgcactaatgaccctggttggaagatcaaccaccttttcatcagtcacagcaatgtcccattgtgtaatcgagccctgttatgtatgtacatataattactattattgaacatgagcaacaaatttgctatatacaagtactaactaactatgttatgagtgaaagtacctgtgtaaatttaaaaatgtcttcacttgcacggttgaatatgacaccaatgacagccagaacaggcttgacataaaaaccacgctcattggattcatgtgtggcaaggatttttcttcccaactcagtgtcgtcggttacaccgccagtgtgtgcacggttcgagcgaccctgtctaagaaaacttgaagcaatgttcttctcgtgcttgggtagtccaaccatattagcctccattttttctctttctcacacacttgttactgagcaatgtatggtgttgttttgctgtttgggttttgttttgctttacaaattgttgtggagtaaagatatatgtgttcatatttatatatgcttgtcttgtgttactaaaattctctttttctcatttttcttcttattgagtaagtctcagacaaagggaattttgttattgttagtaatgtattctcatgttactatattcttcagtaaagaattatatgttgtacttatgtattaatttggttgttattacaagattttaaggaatatatgagatacattgactgagacttttttactttcatgttatcttaggacatgccagctcatcaaattttcatgtctcatgcatatataaatatgccttactgtcgtaattaattttagtgaagggttaacttatatataatttaaatggagtatagtttattgataattttttaaacatatttttgaaaaaaaataataatttcaggggagcttaatgggtcatacacaagtcagaccaaaaagatttctttgtcattggttttgtttatgtatataaatacacaaaattagacattattattagaagttctgatgccatttttttttaattttaaaaaagaatgaaaataaaaagaatttattgaaagggaaaaagagaaaaaaaagaaaaagtaacagttattggcccccagtagagttaaaaacattagagagagccttgtcttgttggagtcaattctttgagtaaagaagttgttaaagaagtgagtagtgtgttgattaaataatttgttgtgttccccaatcaatattcgatttgtcttgccttgtctttagaattataccgaacccctcttaccaagcaaagtcatgtatcaataaccttttcatatatattatactactctcttcctccatagccttttcaattgaagctttttcatcacggcccccaacaataatgttatatgtacatttagtatataatatatatatctctctctctacatatatctatataactatatatatacatgttacaatggtgtaacgaattaagctacacacgctcacttgttcatgttattcttattatttttgaatgggcatgttcatggttaattaattacaatatataaataaaggtatactatcctaaataaattggtaaagtattcattcttgatctcaacataaacctcgtactagttaatgtgtaatttaatagtcgtgcataagcaggtcatttaatatattttaattaaaagtttaattatagtttatatatataagtataatcatatatcaactgtgctatctctcccaactatagatttatcaattttaattttgttaaaacttatcattaaatattcaaaacgataggagctgaaattagtcgctcctataggattcctttaacctaataaaaaacactatatcgtcccactaaagaaccacttatgacccaacaacttattagtcgctcctctaggattccctagacctaatcgaagagcttcatgaggcctcacaagtgcagttggcgtcgtactaaagagaagtggaaaagtacttcaattcgaaggtttgggacaaaaaattcatggtgagaaactcaatcctcaaaggagtcttccctgcatcacaagatcccagagtgagggtgttaggcctcaactgggaaggcccttacgagattgaaaataaaatatgctctaggatcacctcaagcaattggacggaaccaagatcccatgatcctaaaatgttgtacatctttgcaagtactataaatgagtaggagaccatatttgtttttatttttaaattttgtgtaacttttgtgggtagcagtgatcaagatattattgttaatgtagtgatgtgaccaaaatatcatataaaatttcttaagtgtgtaaacgaaacttgagggcatgacaagtgactttagacctaaaacctaacactaaagcaccagggcgacaaattgcctgcaccggtaaaattgaattaaaaatattaaacttagtaaatgccaaaaatttacacaaagatcaagaactcaagaaattataattaaagtggagatatataaggccacctggtcgcattatcttaaaaaggtacgaaaaacaaaataaaaatatagctaaaagtgacaagggaaaaaactgctaaaattttaccccaccccgaaaaaatagcctcacgcccgtgcaaaaataataataaaaaagacctcatgaccatacagaaaaagagtcacaagagtttggctgcgaattgtattcaatttttcggggacgctggaggaggcaacttggggaccacctattttcttagcaagagttgcctcaagcttcttgttcttctcctaaaagagctccagaacctccttaggattctctagaaagtgaaagagaggttcaaagcgattggccttctaggtcataaacaccccatcctcatacgcctttcacgcaatgttggcatgtgacgggngttaacacaggaggtgaattcgatgtcgtgatgtcttggatcgattgattagc

SEQ ID NO: 187408 - DNA, 6786 bp, Cannabis indica
aatgataattataataagagacaagagcaatagtaattagattgtttactaaatcagttaaattctaaatcaattatctagtaacattactttcataagtagaaatcttgaagaaccaaaaaattgccatcagctgtgttaacacagatttcgcaactcttgctgactttcattcttttccctatttaaataatgatacaatagctacagacaactccgaaatttgtcagaaaatttttctgctaaatatattatgtatgttcatcttcctaaaacttctttacactactagcccgaagccatagtgttaataaatgcactaagaatttaacatatgaatcggtgaagagtagttatttacagaactgaaaaagtccaaattactaatagaattgttacatcagaaatgaactacatatcattcctcatgatagacttactcatttgtgaaggcaaagattgttgagtgaggtcgataatgacttagaagtatcgccatagatcctgttcttgtgaaaacaatgattggtgtattaatagtgtttgacattgttgtggcatgaaaagcaaatatttcacccatgcggttctgtacatgtaaaccaagtatgagaaggaattcagtaagctttactttaagcagcttcaacatagatatagaaatgaagacctaatgatctgttggcaaagacatccagcaccaattacttacgaccaacacatgttcttacatggtattttgtgaggccaaagaaataaggatgtaccatgtcatattgtgatgacatggggcttaaagcatatgatacatcggtgtgccttgtttcctaacattctcaataactaaatagtaaatacacgaaacttgtacgtagactgatctgcatgtaccttataactcaattcacttggaggagcagttgtaattggtagacttgactcattccttaatgctacactatgcattactttgacagctttcagaggaaacctttgttataattacaaaattagacagtggatatgtaaaataaattaagaaaaatgacaaacagataatttgcatcaacttgcattagacacaagggaaaatcatacataactgataactctgacaaagtgtccgagaatcatttaacatttttttaactggagaatactagagtacacttaacaaaaatgaattagttaacttactttccgtgggcagtttctcctgaaagcatgaccgcatcagcaccttcccgtactgcaattgcaatgtctgaaacttctgcccttgttggtgttggttgattgatcatgctctccagcatatttgttgctacaataactggtttttgcattctttgacaccttctgattatgtcctcctgttacaacaaggaacttttattcatgtcagaatctgaaacaagttcacaattttaacttcagcattttaaataataatcatttgggaagatgaacttatcctgtatacatatagaaagtacgctgcacgcactgagaagggataccaatatattttcatggctttgatatgacatatcgtgaataaaacgttctacacatggttatttaagctgcttcccaaagccacagcctacagcatttcttatataagtcaaatgattggcagttagtcactgtcaatctacttcagaggtgtgcctaagttataaataggataggttagaattattttctaacctcactttgtgaatgagtttcccattcaggaagggaaaaatattgtaaatgggtttgaatttccttaaccttgtcgaagaattgatgcatgaaagtcaaagtttttcttattatgtattaagccgcaaccaatagttcatcaagtagagtgtcacagttaatgaaattcctcaatattccacccaaaaaagagattccaaacaaatataatactattataacaaaaaattatcgtaaccacaatatttcgaaatcctttaatattctcaatataaatgtcatcaactttctctacaatgtgcatgcagtgtagtaggtttagtgccaagatacggaaataatgagaacgataactaaaatccatgtcttacctgtaacagaggaacgtcctcgattggaagttcagctccaaggtccccacgagcaaccattgcctataaagtaataagcttgttaatacaatgaataaaaaaatatcaactcttatgctctcttgcagaactgaacatgtggtttagatttcttttttgtaattcattttcccttctcaatgttttggataaaacaatgagagagagggggcgtaccaacaatgattacgccttgattttaaagatgaatttatgactaaataagtaaccactaatccgaaaaagacacttaaactaaccccatcagatgcaggaataattgtatgaagatttggaatagagtctgcactttcaattttcacaatcacatgaatgtctgcattgcaacctacaaaaggagttttcaaaaatttagttctaaagaagtcgaataactgttaagatgatctcgataagcagagaaataatattttacttttgagataatctttcaactcatgaactactttagcatctttaacaaaagagacagcatagaaatcaacttggttgtccactccaaacttgatatcctcccagtctttatctgtacgaaagacaaagatataacagatcatgtactggatttactaaccccatttagtataccaaaagaaagtatatgaaaatcttcatatcaacacctaatagtccttgttacctgtaattgaaggaagagttgcacttttgccacgaacatttaaatgacgccttgattttaattctccgccatcaactacttcgcatttaacggtatcatgtgtcttcgacttaacaactaaagacatcattccacctaacacaataggaaaatgtcaaatttttataagtaataacaataaaaatgatatttcttgtatctgctctcaaataatgtttactgtaactcaatcaaatacccaataaatagaggctaactaagcttaatattgatgaatggaaaaaaaatgaaacatgcaaccatttgaaaagaaagtacagtagttgcatagaaacaacactagtttccattttttgcttgagcagtgcaacagttaattccacatatgacaacaaaaacactctcaacttactatggcgaattggcaattttgtagctttgtccttgcctaagaaacacttgttccaaccaaacttgaggctaagaaagaaatgtcattataaaaactagttaaggcctctagtacagagtttcctatttaagggaagtaagtgaaaaataggacatacaaacaagagaaatgttccaaaaaccagacccagttcaaccaattacacaaattaatatgcctatcttgtctatttattcacatctaaagtatattttttaaaatcttacatgctacagaagaaccatttactggatcactgatccaccaacctagaacacagaatagggggtatctaattaccatcaaccagtagtatgtctccaacctccacatcggtcacaaagtcgtcgtaattcacgctgacagtgttttctgtactgactcctcttttaattgtaaaattaaattcttgtccttctttaagcattataggttgaggtaaatctccacttcgaacctcaggcccctgcaagaagaagttggttgtctcagactatcttgtattcattacaacttcacaagcatgtaacaaaagagataaaaataaatgaggatgagactctcttgaattgtaagacacactaatcttaaaaagaatttaatcataaaaggcacaatggtttgaactgtcagtccaatcatagtttcagcatttaagacactgcacactatgtagatacagaaaagggtgcactctatcatagcaactgaagcaagaatctgattcagatgataagagtaaaagaaatgatagcaagcagaaaagaaattaattctaacaacttatcacatttatcattgttaagacaataaatcatatgctttatatgaaacagctgctctgtaattctgagcaaaaattacaggctaattaggatttttctccccgaacttttcagactccccaaaactattaagatattgttagatttaaggacttctatccaatttcattcaactttactaacaaacatctaacatgaacagaaattcgggggacatgatcggtagttgggcaatagtcgccgaattggacagagttctctaaatccaaaaatttcaataattcgaaagaaaatttaacggcctgaaaaattcaaggcacgatttgatacatgtcaaacttcagttgaaaataatcctaattagccttaattatatagatagaggcttgtgttgtatcataaagaaaagggggcaacaaaccttagtgtccagcattatggcaacaaccttgtcatcaaactgagagttgtactctttaacaagatcaatagttttctggtgtgatgaatggtccccatgagacatatttaaacgagccacattcattccagtttcagctagtttccatatcatctcacgtgtacttgtggaggggccaattgtacaaactatcttagtttttcttctactgtttggagtcacccttgcttggcccattgagtaataatcaatggactgatcatcataaagagagtacttttcctgaaaaacaagaaacataattaatcattacttcacgttttgcatattcttttccaaataaggtggcgtttggttcattttatttttatatgactggtgtaatagtgattacagtgtaaacacattacaatattttcaaaaccaaatcaaacaatgaaatgaaattataatggtgaattcattaagattacaattaccttaaaacaaacataacatggcctaagaattaccaaaacgacaaatcaaagcataaataaccatggaaccttctaacaatcccttagaattgtacaattaccatatataaaacagttcctcataacataacaaaaccccaaatagagtgaaaattaacaattccaaaaacgaaaggaatgacaaaagtcaaagaaccaatcaaacagaaaaaacaaaacccagaaaggaaagtaaacatacagggctattcagagggccattggaggagttgaggtggcctttgtgtttctcctcggctatggtcatggatcgaacagtgaatgatgcatggttatggttcttgttgtggggcggacgaatgtttctgggtctggattgaaatgcaaggaagtgggttagggtgttggaagaaggtagaaaatcaggggtggttggtttgaggagagacattctggttgaaatgttaagagtggccattgaagaagacagttctgagcaaaactgacagaaacccagaaaatatttaacagactttctcctgaccagacaatttatatacttaattttgtcacataactctttgtaaaatttcataaaaatgtaaaaaaaaaaactaatttgaagtgtaaaaatataaaagcttccattctttttttaattttaattatttggacttacatttttcttttatagaaatttaaaggaaaataaattaaatcataattgccaatattttacatttatctccttttaaatttaccctccaaaaaataatcaataaagagctttaaatttttgtgtggaaaaaaaaaagaagcaatttctcgtatttatttggcatagaaaaaatgaaaaatttattttaccttctattttctagtcctcctcacataattgagctcacttattttcctcgagccttaaggtagaatttggtttagcatactagaatgataataatagtagtaatcataatagaagtgaataagaattgtaatggaaattatttattattgccttatttgaattaacattgtaatcatgagaatgtaatgaaatgtgaaatgtattcaggaaaatatttcttttaattaattattaattatacattattacattaaagaagccctcagctagactaataattggcaacatgttcaaattaagacgtgcagtcttgtttctgtacaaactattcgaagtaaccaagaaatgaagtccactttcggccttttaatcaaagactgccaactgttgttatctacccttccagatgttaatttttcattagatgatcaacaaatcgagtagcacattatgttgctagacattctcggtaacaatctgatcgtagcatttttgatatttttatttttggtgaactcttatatctcttgcattcagaatgcgaatctaattcaatcaatgaagttgattttatctacaaaaaaaaaaattatacattatataaagtaatttacggcataaatacttaagtttaatttctagttgtaaataaataactaaatttaatttttagcaatgacagttaaagtcattatacacatagtatatttaaactagtatttttaaaaaaaaaaaagatattaatcacttaaatcaatcaaaaattatcacatgacaatttaattaacatgtaaaattcacgtagctacaaaaattttaaaattataacttaagtatatattagcaatttaaatgtatctagatagattaggttgggaaaggttgcaagaacccaagaagattgtctcacaaggaaacttgattttgaggtggtatcatgatcatctactatgctaatatattgatgttttatagttttattcacattaattacaaaa

SEQ ID NO: 187409 - DNA, 2706 bp, Cannabis indica
gaaagaaaaaatagcttcgttttgtacttacgtagccaactaaacagttaacgcgtgcaaaatatagtgcaatttccactaaccactcgaccctgctatctaggaataagataacaaatacagattctagttgtttttttgtttttttttttttacctttaagctctcataacaagactacaatatatatttattattttacacttgtgttttcacttttcagtcccttactgcagatggtatttttggggcagcataaaaattataaaaataaactttctattgtattgtttaatcacattcacacttaataactctcaattcatttatttatctgtctttttgagtatcgtttaaggctgtttttcagggaaattcttgaactttgttcataaacgacatattgtcgtgaaaacgatatgtcgttttagttcaaaatggtaatcgagacttttgtcagggacaaaggcagtccagtcacagaagatgatgttgttagttacaacaccaaatacccgccattatgagtccggtaatttgttcttctcatatagttcctcctcatgcttctcttctaaacccatgtcatcctccattatcagcgtccaaaaacctccataattcatcaatttcatccattaatcgccgaaaccttctcactttactcactctctccactacccaattcatagattttcctctcaaccccatatctcctctggccgcaactgcccgcggcctctttcagatgcccccagttcggctcataaacaggtaagtcacaaaacccatatagcttttgttgtttggtggccgagaaaatagtggaaagtgacaaaggaaactggttttttctttttgcttgtcatgatgattgaattaatgctaaaagtgaaacaatggtaattttaatactgacttacgtgttggggttggtattgaaggtattttctggttagagcaggggaatctgaattcgagagctttggggtaataaacacaaatccagttgccaaaacatctgttgataatggattatcagagagagggaagaagcagacggtgagagctgcttttcagctgaaggaaatgggggcttgtgataatggttgttggatttggccttccattactcaaagagcttaccaggctgctgagatcattgcttctgttaatggggttagtcgaaggtctgcaatttcatattaatttggtattatttttaaacatgtgttcttctagaaaaatgttaggaaattttcagacttaatggaagagaaagtataaatcatccaatcactggaggtctttctttataaacctttttctttttctttgttataaaggtcttttatagacttagtcaaaagtaaattagtaaagtatgaactgtagtatgacatgtaactcttgcatgtactgatatcatttttcaatgagagaaagctaactacttctcagtaccttaataaatacttactatttgtccacaagtactagctagctgggatcaagccccagaatcacacacaaaattgtttgtttcccgggaaacaaacaagatcatggaaatcaggattagagagctgtgcttctcttcgttagtactcctacgtgagcaaccaaagggagtctgattttctagcttgggaataaaatggcttgctttttctcagttaaaatagaagaggtttcagtttaaatactttgcttatctttgctgttgcagttatattgttcctgagtacagctttttggatgctcgaggattgggggcttatgaaggaagaaagttggaggcagtttcagaagtaataatatacttgttgttttcacattatgatattcataatatgtttacaatcattagaattgtaataagtattatgggatttgaatgtgtggtgttgatatgtaatgtattatatgtctcaggtttatgaatcagatggtatctcaccaactataaagcctcctcctatcaatgatggaaccccaaatgagagtgttaaagatgtgtttgttagagtgacacaactcatgtccattcttgagactcaatactctggtgaaactgtgataattgtctcaccagattctgacaatttgacaatccttcaagctggtctgattggcctcgatctgagaaggtaaattattttctatcttgttcttggtatatccatttttcaaactatatttaatagtgattactttctctatataactctaagcacattttctttgtttgatcttttatattttaggcacaatgaactttcttttgcaccaggcgaagttaggtttgttgatacaactagcatacctacttacaagcaacctgcatctgctgtatataaatgtataaagttaccaaattgtaactaaaattctctctattttgtactatttgttaaccacaaaactttcttgccttgctttgaaataatgtcttagttgataatttagtcaatatattcattttcttggactttctcttaatccttcacttttaactccatgttgataatttgctttgaaaatttggttgatgaacactcttgatccttcactttgatcaactctctcgtactatgagaatgcgtaagaattgtggtctgctttaaagagacgattttgtatggtgaattggacacgaatctgtcaacttaagacgtctcttgcagagttcaagcaagggaaagc

SEQ ID NO: 187410 - DNA, 4635 bp, Cannabis indica
aaaaaaattgaaatgataaattccattgataatatgataaattctaggcaaatcgaattttaacacatacaatacgattttcacatattggagtcgaaaaaagtaggttgcaactcaaataataaatatttattaattcatgttgaattaaaaataattctaaatcctttttttttaagaatttttgaaatatttttttttttaaaaaaaaacctaaaatataaatatatacaaactatatatataagtcgatatgtgtcttctaatggaactctgaatttatctccttctacaattctagctacacgagcggcaaaacaggtcaaaaataagtcaacacaaatacgatataattttttattaagattaggaaaattaagtgcaggtcgagagtgagttaacatgctagacacgaaatataaaaacaagtcaaataagatgccacacgaacacaaccacaacacgggaacacgtgttgccatcattcataatagcttgagacacaagaaccatggaatcttttctttctaatgtccatccatatatgattattattcactaatttaaagcaaaaagttggactgctaacttaagaaatgcatgtcagtaacttgataaagctgcacatggaaaattaagttacttaaaaccagtaatctacttgttttggttccaagtatgaaactagcaacaactacaatcatgaaatttcactaatctgatgccctacgaaatcatctaaaagtctttaaagacattacatctcgatgtttcctcccaatttctcaggaaacatggcaacctacagtcatggcagcagccttcagccataaaatttatatcctgcttttatgaaatgaaaagggtaggaagaaaatctcacaattctttatggagaatcaaagataattcgagcttcgccatgttcatagaggaaagagccagctagactgccatgtcactgccgcgtctagaaggtattgtactttacaaaagtctctctcattgggcttagaaatcctgagtttaatcacaaaacagtctgagccaacaggagatgttgaaaaactaccatatcaagaacctctattcctttcatgcagatcagctaaatctggtaagttaaaattagttgaaattcaaggagtagagtaaacgaagagtgagctgctcaaatcgaaaaatcaaccctcccaaatgatttctttttttttctcaagctatttgattgtaatatatcgatttgtcccatgccgggcccaatattcccttagatctagtggtattgataaatcatggccttgtgccgctagccgactaagcaatctcgtgaaaacacttccactcatctttcgtccacccattcttgcatgccgcttatttggtatttgtggcagagggtacattgacatatttgttgtgcaacatgatgactgccatccaccgctcccccatttgtaacactgtcgagaaacaccagtgcaggagcaaaccggcactggcatgatagactcatcaaaagttatgaggttcaagcccacatcctgactatcccactctgttctatactttgtgccatcagaggtagctcgtctgttcagatcctctgctactttctttcgcggtggctttgactccctggatgaatgtcccttgttcacctttggtcgctttgtctgaggtgacttgatagcatcagaagatataactgtaatggggaaggcatcggttatctgcgtttcctttgagtcataagtagctaaagccatgttaggcatatgagttgatgggtggttcgtgcgcttcactccacgttgaactcccccacacagtgttacactcatggaactattcctaacttgaagggctgcaagggcgttatctctttccaacaaggctgaatccctctgagccattacctcatctcgctgccggcgagcctcatccctttcagccaatgcttcattcttttcagacactgctgcattcctctctcgtatggcagcatccctctcagcaattatggacatgatctttttattcataactaaagcattcggttccttcacttgatgtggggccatcatattccactgcacatttcaattctattccattcaagtgaatcaagaatttgatagcttaaaaaagataatcaataatatttttttctagtatctgtgttctggttaccggagagtgtgaggctctgtaatagtccaccttatgcctgctagtttcgtggtgcctgccatcgtccatcgtattacatccaagctgctagcagaacataccaaaattagtatctaatgagctagtaattttatgctttgtgttggcttacggccctaccaagtatcagcaatttaagaaacaatacccttaaatcatgaaaaggccatacattttagctacatacacaaccatgttctaagtgaattcatgtcattgaaacaacaaagttaataataaggccaacaaaaactgttgccaaaaatcgttcatcaaaaaaaaattgttgccaaaatgtgaaaaattacgaagcaagtacaacccaaaatgcagaataaggaattttctgttctttgaatctatattatctatccataagagcaacactggtaatatagaatgatcaaggcaacagacatgttttcatttcatcaattgcatcttattctttaaaaacaacaacaacaatgagatctgaaaaatatccatatagaaaactgaattagaaagaacataatcaaactgatgagaaatatgccaaacagccaaagagcaagacttccaaaatccaaggaaaaaaaaagactcctttacaatgtaaaaaaaggaacattcaccttaaaaatatatgtcccaaagacactatcttgatagcaaaggaattgtttttcaaatactcaagtttacccagatgacgtcaaagacttctcatgtcctcgtcttcttagctccaatagtcaaatgtactctatggatcaacatgcctaatgttcaagcgaaaataactgattaagtaaaaaaaatatgcaatatatgcagcaacaaataacttaaagccctcttcatctgaaactaacagtttaaacgtgcacacatccaagttagtatgtactatgtctttatgcatctatgcatgaatgtaatcgtattaaatatactgaagcaaagggcaaaaaatcccaataatcagcctctaaagtaaagaagtaaaatcaaatacctgataaagtaacatgaaaaatattcttcacgacccatttgatatttacattagctccaatatagttcacaaattatgatttttgtatatgaaactcctaaagtagtttaagaatcttaaacacatacaagattaaaatattagaagtaccggtagagccaagtgaaatacaattgaagataaaaactttatacccctaaactgattcagcattctagttactaaacagcttaaatcaaatttcaaaatttcacaattctaacacgccttaacattcatttcataatttcaaaatcatcaagataaaaacttgcacaaaaatcgcacacatggtcccgaaagaccaactccccatgtacatttttcctcttaacagctcttaaaaagagtaaaaacctatctaagaccaaagttgtcagttttagcctgcattaaatttatagaagaccctaccatgtgtatactttgcagtaatgtacttaattctttctacccaattcccattaacaatatcaaaatgagaactctgcattgccctataatgatttcctcttaattatacatggtgcatcattcataagcactttgtttatctcacaacaaacctaattacactcatggaactcaaaataaatacaaaataaaggaaataaaaaaaaatgcatattgcaacctaaattctaaactaaaatctatacactatgcactttcttaacaaacccactagtgaaattgttgtaaattataagcataaaaataacaaaataataatattattttaaaaaagaaaactaaatgtaagcaaaatcaaaacaagtagccctatccttgagttcaataagaaaaaattgtgcaaaaatattaaatttcatgcgaaaaaaatagtcaaaatacaggacaaaattcatgatcgattcgaagaaattcaatattaggtttagagagagagagtaatgaacaaataaaataaaataaaataaagatgtgagggcatatgtatacctaggcgagaagcttgagaaaggggattgtagtaaagttcggagaaaatcaaagaatggaaaattttctgagtaaccaaacagattaatgtgagcgagaaaatagaaagaggtacggcaaggcagtgggagaggagtggggcgaagtggatgatgggtttattatgtatgtgatgattcagacgacgtcgttttctatgaaaaaagttataacgatagtgataatacgacaggccattctctctatttatttcaacaaaatagatatgaagaaaaggtaaatactaattttgcaaaaaatattaattggactttctattttgttaaataacaaaatagaccgtttattttctaaaatgttaaaaattagaccctgagcttattttttttacaatttttttt

SEQ ID NO: 187411 - DNA, 2503 bp, Cannabis indica
tagaaaattgttatttatttttgcactatttgcatttttataaataggatgaaacttctttgatctggcattcaagtaacggtgaacgaattttgaagttaggaacagtgtcgagaattatacctggacaaagaactgtgagttttctacaattttgttttattcatcatccaaatagtacttgctttatgatgccatctataatactgtgtttggatgagctgagtttctcaactctgtatctcttaatatgcaatcaggctgttttccaacgatatctccgccctgaaaaagattatttgtctttttcactcatatacaataacgggaagcggtctctagatttggtaagtaatgaaaattttatattctgtatatgtttttcttttattatttttactaggccagttacttaaattataattttctgtatccagatttgcaaggacaaagttgaagcagaggtctggattgcaggcctgaaagcactaatatcttctggaagaggtggacgttctaaaattgacggatggagtgatggaggactctacctcgatgtaaatatgtctaaattaaataattcttgtttgttatatgtaccttgtcttgtgttgaatggtttgtgaaaaattatgatcatttacttcagcatcattgtgttatatgacgtcgtataactagctctaaaatcaatcaggtagattgtctggttaaagagaattgttcatttaccactaatcatacttaagataatgccaaaacttatcacgagttccaaatttagcccatttaaaccttttgtatcattttttctattttgaaaatttgtgtttgataaataggaacatgctttagtaccctttttttgcatattggtaggcacttgagatttgtttcgtgtgtgtttcacatttgtactatcttaatgatttacggtcaactgatttcaggatagccgagagctgacctcaaatagtccaagtgacagttcagtaagtggtgtaagagatattagttctcctgatatagtcaatttcaatcctaattcttctccaaagagtcttcaccctgacaatcccgtgccttctgtgaggtcacatgtagcgtcagaccagacaaatatgcaagtaaaaggatctggttcagatgcttttcgagttagtgtctctagtgctcccagcacctccagtcatggatctgcaccagatgattgtgaagccctaggggacatttatctatggggagaggctatttgcgattatgttgttaagatcggggctgacaaaactgctccgtatttaagcccaagagcagatgtgcttctcccaaggcctttagagtctaatgtagttttggatgtacatcagattgcatgtggggttaagcatgctgccttagtaacaagacaaggcgaagttttcacatggggtgaagaatctggaggacgactcggccatggtgttgggaaggatgtcagtcaacctcgtttagttgaatcgttggcaactactatagttgattttgtggcatgtggagagtttcattcatgtgctgttacaatgaccggagaactttatacgtggggggatggtactcacaatgccgggctccttggtcatggcactgacgttagtcattggatacccaagagaatatcaggaccactagagggactgcaaattgcatcagtaacgtgtggtccatggcatacagccttgataacgtcaatgggacaactcttcacatttggtgatggtacatttggtgtgttgggacatggagacagggaaaatgtagcatatccaagggaagtagagtctttattaggtttgaggacaatagctgttgcatgtggtgtgtggcatactgctgctgtggtagaggttattgcaacacaatctagtgcttcctcgggcaagctgtttacttggggtgatggagacaaaaatcgtctcggacatggagacaaggaaccccgccttaaaccaacctgtgttccagcacttatagattacaactttcacaaaattgcttgtggacacagtttaactgttggcttgaccacatcaggacaagtgtttaccatgggaagtactgtttatggtcaacttgggaatgtccgttctgatgggaaactaccttgtttggtagaagacaggcttattggggagtcggttgacgaaattgcttgtggttcatatcacatcgccatattaacttccaggaatgaagtttatacatggggtaagggtgctaatgggagattgggtcatggagatgttgaagataggaaaacaccaactctggttgaatccttaaaagatagacatgtaaaatatattgcttgtggttcaaactatactgcagctatttgtcttcacaaatgggtgtctggtgctgaacaatcacagtgctctgcttgcagacaggctttcggttttacgcgcaagagacacaactgctataattgtgggcttgttcattgtcattcatgcagttcccg

SEQ ID NO: 187412 - DNA, 2900 bp, Cannabis indica
gttaaactaaaaaaaaaaaaaaaaaacaagttgtgtgaccgttggggtggggcccgttgaagttacaaggtaaccgttaaacattcaaaaaaaatttaggtaaaaaacttccacaaacaatgttgtgtgctttttaggccatttctcttataatcccaaaatctcaaacaaaaattcacagagaacagagaagaagacccaactcatcaatgggctgcgtttcgtcgaagctcttcaaaaaagagcttaatcgagatatcatactcaacaatggcggcgactacatgaaccatgtagtttctcttacatcaaccacttatggggttctcaatctcgacaatgggaagcaaatggttaaagactctgttgctgttacaacagagactaataagaaagttgagaggtcatcaccgattcgagaaaacaagccagaggttattaatgcttgggagcttatgaaggatttagaagaaggaatgcccatttcgaatcaagtaaagaagagtccgaaaactcgtgctgttcttcttcgtgggttggctgatatggatgcgaagagtccaatgaagttcttgaatcagattggctcgccgagaaagtcgaagagtgttggagcagcagtaggaggagggaataaagagaataataacaaaaagggttttggcactggttatgtgggtcggtctgattttagtcccaaaggggtacttaaagtgaggaattcttgtgagaaatcttgtaaagcagtgttgagtttgagttttcaggcaaaagggtctccgaaaagggaaagctttagtcctctttttgatccagatttagtagcttcttatgagaaagagttgaatgttgaaggagagcaaatcaagagaatggtttctccatcgcctaataaagctcggagaaagataatgactttggagaagaatggtaatactactaatctaatacaatctttcactaagaattgtccacctgggggagaaaactctgtggtggtttacaccacaacacttaggggaattaggaaaacttttgaggattgcaacaaagttagatccataatcgagtcttacctcgtccatgtgattgagcgcgacatatcgatggattcgggttttaaggaagaacttaggaagctaatggggacaacacaagtgaaagttccattggtttttgtcaaaggccgattgataggaggagctgaagaggtgatgaagttggaggaagaaggaaagttgggtgctttgtttgatggtatacctcaaattgctttagggggaagttgtgaaggttgtgctggatttagatttgttatgtgtatggcttgtaatgggagttgtaaggttttggatgagaagcagaaggtgcagcagaggaagattgtgatggtgagatgtggtgagtgtaatgagaatggtttggtccattgtcccatttgttgttaacatcttgatttggcttggaatattggttttggcaaatggggtttctaaagtgggttttaggcctctttctttctgttttagtattatgatttacacgtttggtaacatttgttgatgttgggaatgttacttgtagtattgattatttgatttgtaatatatctcttcttccatgtattttggaagaattatatatgaaaatgaattttctatcaaaaaaaaaataaaactagtacaagagaagagactacctttttctccttctcaaaaacccttaaattaaacccctaaatatttctctgttctcaaatcccaatcttcatcctcatcctctttgttttccatttcttatttatatattatacatttcactcctagtagaagaaactgaatctaaatctaactgccttgaattttgtacatgttgcagtagctatcatagcaatctgttgcatttctctgttatggatgcttaaatagttatgctctaatttctaatgcaagtaaacaatttgagtttttggatgtgaatttcaagacccaaataagcaattctgattattacgtaattgcttctcattgtgatctccattcttattcaataattagctttgtgaccttattcatttgtaactactgcctatgacgataagaaaatccctaaaacacatagcagaaagtagaagttgaaaaggggaaatttgaaagacattttcaacaacagctggttaaaggaattacaattttgtcttatattttggttagaagcttatacagtttgaaagactttttgattagttgagtttggtgtttatgattgttggttcttaattgatcatattatggtagtattggctattgtgctgtagcaacactcaaagtttcaactgaaaaatgtaattaaattgatcaggaataatatatcaccattataattttttggaagttgatgttgtgctttgctaatttcaggttatataataggcaaagaatttggactttggtagctaaacaagggaagctcaacttcctctatttctctttctctctatcaactttaataataacttggaatttcagaacacatcaataccaaatttttaacataacattgcactgtgttagtctctgtgtgtgctattgttagtaagtcattcatttgaatcagtcaaactaaacaattccatccccattcttaataaaaattagttaatttttaacttaatattgaaatctctacgagttgtgttgtggcacaactgtttgattagtaaggttctcagtttcagtttgaggaaattgtaataaacttagctgtggaaacattgggacaaccgttttagattggaatgggttgattctgtttcgttttctatatcaattggtgtttaacaatctattcattttcttaataattgtgcagagttgtgaagagatagtactcaaccaaga

SEQ ID NO: 187413 - DNA, 5312 bp, Cannabis indica
tttttctttaaaatacatgtctagcattggttttacacttttattcttcgtttcaaagaattgcttccttttttaggagctaatgtgagttcatgaattgtgaatttgtgagtgatctaattcatgaacaaatatttgattaaacaatacagaaacaaaattattattattattattattattattattattattattattattattattattatggcttgacctaagcttagctctttctcaatgtatgaatgaaagaagtctattggataatgtgctggtgcaggataagtatggtggggtcacatttgactttggagggacctaattgggacagttggaaatggactggacatcaccactacaggggcatgtgaactctctcttctgttgggtcccctagaaaaacaatctcatttcaagatgtaatgaatggaacatttatgtcaatatctgcatcccaaaaaaaataaattagctacacttatcttattattggaaaaaacaatgcatttactggtttttttttttttatgaaagatttatattgaacttaatgcaagaattgatggcgcttgataaattagttagaagataaatatcattttttttttatatataagtaattaaaaaattcacttgatacaattaataaatagatctctctagcaatgtatttttctctagcaatgtattttaagatgataaattctaccttgagatagatgagaaagtgccatatataatatataactttactgtgtcagtgtcaatagcaataggtcactttattcctcttcatttgcaatttgcagagtaataggattccatactccctagtgggggagagctaaatttagcctttagaaatcaagaatgtgctatatagagaatatataagtataattacaacttacaagagagctatctatccatgcagccatgggataaaatataaaatcttttcagaccatttttttaaaagaataatattattatagatatagctgtgttatcagataaataaataaataaataaaagttctgatgctgacaaagattcttgtagcatgcaactccatttttttacttctgttcgagtatcataagtgttttttttttgttagttttttaaaaagcaaggtatatttgacttattacctatttaaatatatagcattggtttggtctagtcttatgggactactgtattagtacatttcacaccatttgctagttagtacaaacatttaactttttttttttttaaggttcatacatttttatacagataagtctactcgttctagacttgtagtagcttgtacctttataattcatttatatgtatttaagaagaaaatataatatgaatgcaggtgggtgaaattcaatatttttgattagtactcagtacactgatctaaaaaaaagttaagttaggttagacttgtaattttcatttagtaagatgatgatgatgataatgatgatctaataatggggttggctcaaaaccccatgcttttaattaaatcaaacacttttgatgagttgagttttatttattttatgagtgagtgagtgtattgaagagtttgaaatacacgcgctttgcagagggagagagagtagagtgagtttgtgggaaggaaccaaagcaaaaccatttggggggaatctcttgacagaagcaagagcgtcatcacatcaataagtgagtgagactttcagaaaaaaataaaagaaaaaagaaagtgagtgagaccaaaatgtgtttggaccaaaatacccctcaaaacacagcagacagatattgtcatgcaaacatctatacatgtagattcattattgtatatatctataggtttctcaggttttctctctcttttctatcacgtgacccgttcattcattcattcaatttcatatatagtgagtagtgagtgaggagagaagcaagaaaaagacatcacccagtcccagatagcaaaaccaaacaaaaaaacttgcaaggaaaaatcttttttcatttttattttgtggggtgtcttaatctcataatatcttactctctctttcttcctctctctgtctcactcagtgtcccctaataccatctgtgtgtggtggtagtgtcattgtataaggcaaagagagaaagtgaaaacagagaaggaaagaaaaaaagcagtgaaggcatctctctctgcctctgacctctcttttgcactcttttgcagagagagtattttctcagctctgtttttctctctgaagactactgttattacactttttagagtgagaaagttagtgagagatagagagatagagtgtgtgtgtgtatttttgtgtgttgtataaagagtcgggtatataaagaagagtgctcgaaaaaaatgcagcagcacctgatgcagatgcagcccatgatggcagcctattatcccaacaacgtcaccactgatcacattcaacaggttctctattctctatcttttttttttttttttattttctttctttccttcatcttcttttttctttctgtttatcttggtcggttatcatcttgtttttacttttattcttttgtgtacaatattctgagactctttttctttttcaagataagattttgattggtgattcttactgggttttctgtctttcgattattattgccttctgtaactgctctagtacttgatctttctttttttaacttctttttgaaccattcctatcgtttaatcagttttcttacttgggtattttattgttttatgcatttcactgctctgaaaaagcttcaaatttatctatgaatattatgtcggtgtaaataataatgcttaatgggtattttatggattgatgttgctgttcactttctcaaatgagttattccaatatgggttttgtccgttcttctttaatacgcctttttgatcagttattgttcaataatttaataccccagttatggaggaagctagtctttcactatctctctttttgtaatatatatactattaagtgttcaatgttattttatgtcgtttttctgttccattttagaaagatgatgctttttctgtagtaaatagcaatgagtgcaattgtgaatatggatattttgtgtcacatggctatttgtttgtctagcttagtttccgtgggtggcatcagcctacgaccttaacttaaagctgttatatgtcttttctggctcccttttagtacttaaaaagagtggaactttgcttggtattattgaattcgaagttgtgactggtgattaaatgttgctgaaccctacctttattatactgtgtttttgcaaaaagtctcctgaaaatgaggctttaggtgagttgttaatgagttaattttttacttgggccggcaccagatgtcaaaaactactaaccatggtattgctcagaaaagttgagacattgatgttgtactagtctagtgcctttatttttatgaaactctactacctggttttaacaattaacatcacatctgtcgaattcattacatgtaactaagaatgtttctttcaaactttatttatttgtgagcaaaatgcagcagtcttagtcatacactaccgaggaatttgttaatagtgatagtatgagaagtacttaagaatgtcattacttgatgtatgaatatattccatggagaaataaaacatgtttgtctcaaaactagatttattttttgccttttgatgctgtatttctagtttatgattttgttcattcattattatggcagtatttggatgaaaacaagtcactgatcctgaagattgttgagagccagaattcaggaaaattgggtgaatgtgcagagtatgtgattttctaactcctttcttacttttatttccttttaggcttttatgtgagactcactttccttatcttttgattttaaaagtactttgtaataatttacttttcactagtcacgatggttatgggtaagatactggtgcccattgctagatggtttctgctgtagcttttgataatttgttattcatcatatcttattcatttttcattttgtgcagtaaatgaaatttagaccaaagaaaaggaatggtttttgatatcatactttgagatattgttgttattgtaaatttagcaaaatgggagaagtggtctaattcttgtgcattctatcaggaaccaagctaggctgcagcgaaacctcatgtacctggctgctattgctgattctcagccccagcctcctacaatgcattctcaggtacaaacacctttcctaattcaagtttcaaattcaaagtcttctacttaattgtttattatgaactctggtcttagattatccagctttcctctttacacttgttatgatttgaacaagttatgtaaaatttctcttttgcatattctcttaagcactaaacattatgatgagttatgctagctagcgaatctgttggattaacttcaataaatcaacagctgaacactaatttacatcttttcctcttttagtatccttcaagtagtattatgcagcctggagcacattacatgcaacagcaccaacaagctcagcagataactcaacaatcactcatggcgggaggctcgtccatgctgtacaaccagcagccatttacagctttgcaacagcaagcactgcacaaccagctcggcatgagctctggtggaaactcgggacttcacatgctgcaaagtgacatgggtagcgctggaggcagtgggcagcagcttggaggtggaggatttcctgatttcagccgtggctctggaggagaagggatgcatagaggaatggctggcggtagtaagcaagatatgggaagttctggatcggctgaaggccgaggagggagctctggaggtgacgggggtgagaccctttacttaaaatctgccgatgatgggaattaataaagaggtaagaactaaagaacaaccccaacttactggtgagttagtgttaggaaatctaagttatgacgaggaaagatgaatttaggagcagaagaaaatagatgggcaggagtataaaagaatgaagttactgctgctgtttaaaaaacttgcattatcttatgtgtaaaaacagtggtgatcgagagtcttactctcaatcaaacttggagcttttatatcttttttagtaatatatgataatgcagcatttgtagtactttattatgtaaatttttagcttatattttcttgctctctgcagtgctctgtatttgtattatatgcttt

SEQ ID NO: 187414 - DNA, 3928 bp, Cannabis indica
aataataaataaaaataattaagaaacagcgcaagatagcatagccggaagacctttttttatgataaaaaacacacgtcgcctaagttgtttcgtaaccgtgaagaagggaagctgaggtaagcgcacgcctcctcacaccggcgcacgttagcaacttcattcatttgccttttgtctccgattatttccctatcgcttacgctctcttctccgtctccgatcgccaattccctggtgagtcctcttacctattatatatatacatttctttatttatggaaatataataaaaataataatttgtgtatgcgttgttctttcattattgaatttggatcctgtcgattctgattttgatatcaccaatatttttatttgattttgatcttatttattttatgtttatccaagatgcggttgctgttttatttaacgatctgttttgattaattttggctactttttaatttgtattgtgtttactacatttgtgtggttcttagccttaatttcatgttcaaccattgaaagttttgatttttgttgagttgagctaagttaatttgctttcttttaacttaacttttcagggtgtaacccagaagagaattgtttagggggatacagctgaggatagtaaaaccatggtcattgggaaaagacaacctacttctttggtcgatctgtgtgtttatacagctatagataatgtgaggtaccttggagatgttggtgaaacagatttggatctccttgatcgaattctacctcattgtacagttgatcaattggagcatgtagagaagagtacagaagtaagaatggctttgctgttttaaaaaatataaaaactatgatgttttagttaggcttttgtaaagagtatgttgacatggggtgtctgactattcttgcagggaagagatttgagttcagtaactgataagttgtggaagaaattctatgaaataaagtttggtgttgagaacactaagcttgttatggagaggatgaggcagaaaaaagtggtatttaaatggatgcaattgtatgaggtgggtctccttcctggtattttataaaatcatttttagcactcttccatgtaaagtgttcatttttgtcaattttgtaattgattgggatttttctgttgtttcatgcacatgtttgcatatttatacacttactcaatatagctttaagtgtggggatgttatatgaagtatccactttgctctgaagtaccgatttaacttggttgtatttccaggcaaaaatgaaggatgcagctgaggcgcaaaataaagcctgtgatcgaattgcacaactatataagaaagaaaatgccagtatgttatacattctctattgatctatatccattccaggcacttttttatataaataaaggcccaaatttatgtccctttggatgaaatccctctgacttcctcaggctcatgtaccttctgttaaaggttacttggagtctatcaccaaagtcttatttgttagcttggacccataccctgctaaaacctctaaaaaaagattagttgtttctttgtctcaacctattggagatctatcatatttcaacaatttagcttaaacaagaggagactaattttgtagcaagatatatatccagctctagtttccactcaattctaatttgatgctttatttaacaatatttaagaggagaaaacagtgcctttggtttaactataacattttgtgattttgaactaatactaatccactcttgtataattagcactaaccagacccaaataatagaaagggggagttggaggacatctcaaactgtttctctttaccacttatttctcagtgtttgctgactgaataatgaaacccactagtctgtgactataagttaacctagtgctcatatttttgtactatagctatcaaaatttgatatgttctattgatggagtctgtgctagttagcctggaaagagccagaggtatatggattgaatggtttgtgatgtgattgatttcttatattacctacataggtgctatgggattagtggaatgtgatatttatctttcaacagccactcatatgttctctgattcagaatattgttcgaattttctctggtttacacttctattcttttaattttgtaggaaaacaaagtcggcaagttcaactctgtacaaaggttcctccttcaagcaaaagaagtttctttggaggtaaatatgttttcttacagttgtttctcatagttctactagttgtttttataagcctcagtttaccataacctttttcaagctgttggcctaacatgtaaaagaggattgaataaatttcgtatgttattaacattaacatatgatatttcttttataggcagtggacctagctataacgtgtccaatgtgaagagcaacattatgaagaaagcaaaattagattttctcaagtggtatgcctgtgtactctattttgttagataaattttgtgctgagctaaaacagagttatttgagtctcattcatttcgccaaattgatttctctcttctttggcttgatccaatatttacttcccaatacaaaaaagttttctttttcttggctttcatttctaatgctgtactgcattttcattatcgtatttcttgcgggaacattatttcaccatcaaactcattagatttcctttgatttttgggttttgactgttgaccttatcttttgaacagtaatgaggtgaaaaatcttgcagctatgaagagaaatgctgtacagacaaatcatgggtatgaaatgaatcctcagttgctattgttttctcagtacattcatcattgtttaatttctatgcttcattccattgtacaaacagttcctctcccagtaagaagccaggtggattttctgggaaaagtgtagcttcaacttccagacctataccaagaagattttagaagcatattttctaaatttatggctttattatgaatagagcattgttttattccagaaattgtattgtgcaataaattatggaataaaacattgctcttccttcaaagaaactttgggcaaattcactgtagtgactgttctgttatgtctcattgcccttcttagaagtggaaattcatgttatccttgcttactggtcaaaattccagttgtaacatttcagtttgtaatatagaataattcagttttttaatccgtttcacattcaaatccaaacactatctgaagtcttattatactgtaaataaaactattatttattaaatcataataatcaaccacaactaaatcagtggttccttcctaatttaaaactaaaataaagttggggtatctttcgaatccacccaatattctttactaaaataaaataagatgtgagtcttaactataccaaaaaacagaaaaatagatctatagaatggattgggagttttactttgtagtaattttttttagaaaatttgcaatcaaaaatactattatgtataaaatattatttgcacccgaaaatgcttaataacccatgttctaacacaacaagtcaacaaagtcgaatcttcattcacaatacataaatactttccataatagccattaaggtatgtgtgatatatcagtagtaaacacagctgggacacaaacaataagtagtggctttacaaaacagtgttgactgctccacattctccagttgcaactttgaagggtatccagacacatgttacgtacactctcactgccaattttatagagaatgtgatttttaaggagcaatagatttcatatttagtaatgctacagctgtaattcaaaattgcaatatctatgtccgaaagtatcttctaagtctattcactgttatcattgtcgaacccaacca

SEQ ID NO: 187415 - DNA, 2516 bp, Cannabis indica
tgcttggcctgctgtcggacccttttcttgtactctgtagcatcctgaaaaaaccaagtaggttagcatcggtgaggttttaacttcaactaagtaaaccagtttcgcatcttaaaaaatgtgaacttgaacatcttccaactagaaacttagttaaaggttgtaaaagaaacttcttacagctcggattacacaaagagtgtacatggtatgacaatgatgatgataatgatgataacatttacatctttatattgattaacaaaagggtgttccacatttggtatttataaactctacgcgtgagttagttttagttaaggaagaaaagtacctgaataaagaggtggtaaccttctgtttgtgcaggatcagcaggatttggctgatcgagtaagtcttggataccaaccagtatttgcttaactgttatagctggtctccatccctgaataaaataccaacacgccattaacaattatccaatatgttcgactgaattcaaccaaattccatcaccaaaggcaagagaaaataaaatacttacactgtcctcgttaagaattgataggcaaacagttcctgaggggtagacattcgggtggaagaaaccttgtggaaacttgcacttcggtggcttgcttgggtagtcttcactgaagttaagtgtaagtgggaaacaacctccctcccagtcagtctgcaaatatacacatgtaagaaaaatgttctacagaaacataaccatgtaaaaatcaagggaaaaaaaaaatctgcataatttaacagctagaagaggaaaaaacaatgcatatcttaaaataacaaaacaacgaacgttcaaatcaagaatgagaacctttcacagcattagtcctgctgctaaaatctccctttaaaattgacgcaaggctacttgcatcacgatgcataatgttagaagctaaaaaaatcatacacaaagcatcaaaatgctaaaataatacactcatgcaggcagcagatgagctctggttatttgtcaagtatagagaagataaggtaaccccaatttataggtacagaaggtcagagaacatatgctagcccatgagtattatagtccctcaatgcctctgattccaatatagtgttatcatggttaagcctaattttttcgttcaaaccattgaagtttggaaagaaatcgctgcgttcagaaattaaatttcatattgggtggcaaacacaaacgataaaggtgaaccccaataccaattacaaccacaatagatgaatcaatagattaaaaaaaacattgcaaaatgactaagctcgatcacaaaacaaaaacacataccagctatataaatataaccttaattaaacaaaaacacatattagggattcaatcataaaaatagatagatcaatatcaacataaatatatataatacacgaatacttacgccggtcttgccaggaatagtgcaatgccacaccatcaaattcaccgtaccatcaggcaaagtctccggcttagcaacaaaaccctaaactcaccaaaaaacaaaaaatcaaaaatcaaattagggcaatcaaaacataataattgaaaatcaaacagagaagaaagagtttttgaacgcacatgaggatggttcttacgccatgactttcgctcttctgctagacgaccacgagcaataccacccgacatagcttcttcttcttcttcttctcttagctctctctctctctagaactttctctctctaaaaaaccttttctctctctctttgactgtttggggtttttcggcgacttttaaatttataggagacggaggctttttattttccgatttccgattttacccctgaattggagactttaaggcggagaagatgagatggacggtcaggatttaatcttagattggtgcggagcagctcattggataatgactgtgattgtcgtttatatgtttttatttttgggattataaaattggtccctcctaaagtcaatggatttgcagactcgtccttttttaattatttttttcagaattattcttttttcgcgtgagaatcacgccacagtacgacactctttatacacaccctctctctcgctcacgtgacccaaccgacagcccactggacttctcatgttgggcttgggctttgtactttaccaacgtaatcattttaattggttccttaaatggatgggcctagttacttggtcttcgcccaaagaatttcctgttgtttatagggttttatttatgggataatttcaaaaaaaacaaaaaaaaattatgaaaatacagtctatatgaagtttttaatattgatataattatataatgcacatttttttattaaaaaaataacatttttatatttaaagaatttttcgtacatttttacggtttttcatagaaacaacgcgaaaataataagaaaataacataaaagtaacatgaaaataacatctaaataacatcaaaataacaacaaaaaataaca

SEQ ID NO: 187416 - DNA, 3759 bp, Cannabis indica
tttatttattttattttattgttggtggcataaaaaaacaataatttattttatttcgttagtagttatgtgatttttattttgagttattattttacagtttatagttaattcaaaatatggaatatacatttagtatgaatcaaatacactttaaatataaaataatacggattaaattaaattaacagccctaatttcatacatatctccttatctgtatcaccattttgaaatgcaaatttcacatcaacttaatgtaaattcactttaataccgtacattctaacaatatatccttaatgtttaatactatcaattgttcttacttaatacttattatggattttttataaatagatatttattatcattattactagtacaaaatgttgtgtgtaataatctagatataatcatataaatatatatatatatatatatatttatatatatttataaatcgtgtcataccgaagcaaatacatttataaaccatattgataaatttacagatgactataagattatacaatattgcggttgacaaaatcaaatttcaaccattaaagaagtaccaattatatgaattttgttatgatgaatgtgtagaagttgaaatcggccaacattggatggtattggactattggtagtgtggaagcccccttttggatgttgtgtggggttcttttatattatagatatagaggaggaccactagttcacccacacctagctaaatcagtgggataaagtcactttcattcaagtcttttctttgtttttttagctctagaaaggtcataaatctactataaaatcttggatgttaattattgatgtttgcggttggcacctagcgtgaatatggcctctaaaacacactattatgtcgtcaatcctatgtgggccatttctcctctaatgtcttcttcttttgtctaaacattcattatttatggcatatatagttgcagaaacattctcgaatgactcgaatgtttcataattctccaaatttcttgcaattaatttaattatattgaatttgggtcaattaaatgttaacattgaatttcagcctctaccaatgggaaaaaaaccatggaattaaatcaacattacaactacaagcctattgtttattgtatatacaaaccctcactatagcctccacaacttgatcatttcatgatagaatatgaggggcctgtagacattttagaaagtgctctattttttaataatgctcatttagttaataacaaattttatcaataaaatcaatatcttagtaattaaatttgatattataaccaacataactaagtgtaatttggtcatatttataaaattttatggctcaaattttaataaaaggtattaaatttgtatttacgataaaaaaaaaaagtacgaaattaatattattgaaaatataaatacacatgatacttaatgagtacttaccagggccgaacaattaggaccccgaaattgtaaaaaaaaatatattaatatatagataaaatattaaataaaaagaaaatataacaaatattgtttggtgtagtggtaaaaagtcttcctttaaactaagagatcataggattaattctcaacctctattttttaatttttttaaaaaatatttaatgtgtaattatgaaggattgaaccttgtagctaaactctttaccaagcactacaactatcatttttataatagttaaactatatatataaggccccaaaattgattttaccttaggtcccatatactttaagaccggccctggtacttaccctaagaaattgatggacacataggtcatcaatgtcttgtatcaaaatgtgaatattgaattaaaactaactgaacaatgttaacatagatatttgttcctccataatttgtgaaatttatattacacttaataattttcaaacctaatcctcataataagattttggtagttagatagataaaagcgtgttttgtgtgattaaattctatagaaaattaaaaaataaaaatattaacatagataatgaaataaaagaggaaggacagagttggagtaattaggattataaatccttgtaactgtagtcatctgaatatttacaacttaaaagagttaagcactgaaagtagtacacaccacaaacatgtgcatattttaatatcacatttgtgaatctaaacagagaatctttaacatggtatttagtaaagcagcctaatgctttcaccatacacaaccattattaattcttttccatggtgggatacttcagagcagaagggctagtaaaaaaattgttctgcatcaatcagatactgatcccgaaaagaaaaaaagagtcagacctgaaattatgagctagaatctacggtcattgaaagtttaggaacatgttagatggtatatgaagtattatcttgattttctgttgttttatgttgctcatctaggctagagaataacctacatatggcaaaaataacaaaatctgtcataattttcaagataataatcataataacagcatgtatgtacccgttttagtacctccaattcaattcagctatctcgtgaagtaactctttttccttttcgtaagcagcttcaagctacaatagggtaaaaatactccaattaaagccacatagcatgtctcaatatcattcataaataaaagtaaaaagcttataaagtattagaagaagatcagtgtaacactacaagaactaatttggcaagttgcatcaattatattgggtcgtgaattattattcgttgtacactcataacatgcctataaaacagatatttaaaaaactggagtgaaacaagaagtttaaatatttggcaggaatgggaaaagtagagcaaacaacaagaagctccatttcttgttgagcaatttttcgaacataaatttaatgcatcagccgtcaatccaagttataatttgagaaaaacttcattcttaatctaggacatgtaagggtctgaacatcaataacaaaatttccaagaaacctttagagcaaacaacactccctacgttgcctttttgaagttgcatcagtagacttcaaaagtatattttcaagcataacaggcagatactagaaaagaaaagaaaaatcacaacttctgaaagtaaatagcaattaacataaccatgtcattacataccatagctctttctgggatagcactagctgtgcatcctccatctgctccacatggttggcaagagacattagaaacaaaccagataaaaactataaagttattgaatagacattaacctgtacacttacctacaccaatgtgcttcattagactcaatatactgtcctgttgagaagaaacataactcatcaataaataaatcattttgaatgtcaaaatcagaaatatatggataaaatataccctctgtacaatatttgtctccaaagctgtgtacaacaacgagaaaagagcgtaaccatactgattcgatgaagaagcttcacatggtaatggaagactcggtagaagagatggaacaggtgatggtagagaagtttgtggaagtggggtaatcacctacatgacacaacatatttatgagatgttggtcatccaatgatttaccttaggcacttaaactcccatatttacatctgttgaatccaaaaccactgtaactttgtactgcatgctgaatagtaataatgttggaatgcccaaaaaa

SEQ ID NO: 187417 - DNA, 1906 bp, Cannabis indica
atatgcgtagatgtgtaacagctgtaatcaattccaatataccttttcattctcatgtcctgattcaccaacccagagattgcccttgttgtccttcaaacacaccgcagtatggccagcaaatgcacctgtaacccatttttctaaagtctcaaatccaccccaccggccacgaatctttgaaactgccaaaaagtcaccggagtgaacatctttaggatctatagttccacgccaaggcttgggacgtttttcaaatttggcgcccatgtgcttcttaagaaaatctatatttgcattctgaccccaaccagtgttggagaacagaggcaaaacatctactaaagaaagaagggttcccagcatccctgatggcatgagaaatacagaaaccccatgctgctttacctgctcaaaatatcagctaaagagtcaaggtaatgcaacaaacgtgtcaaatatgtaactgcgaaatacaagacaatgcacacataaatacaaataacttgagcatacgtaatccatctcggcagtttcttcccacgaatcaaatttcagtgtatgttctcgagcagagaagtagtaatcccatgttattcggtatggtgtagcgaaaacatacagatccatacaggtccagctatgggcctcggatgtctacaaaagaaaaacagttaaatttaacgtatgtttgaatatatacagtatacagaaacgaacatttactgagatcatcaacaggactatccctctagtactttcatatctaaatcatatcaaagaagattgaaatgtgacgggctatgaggcaaggatacaaatatcgactgtgccttagtcgtaatgctttagaacagtttttcaaagtaagaatgacaattttccgtgtgttcatgtaagtgcagaataggattcctactacccgaaagtctacaagacaaggaaattagatatggccacaattcaatcttacatactcctccaagtgcagaatttagacccaagggacccatcaattaatgaaaactcctaagcattcaaaaatcagttgaagatctccatataaagaatattaataactacccgaggatgatcacaactgtgttttttttttacgaaaaaaataataataataaaaataaaagaaaaacaaaagaggaaataaataacacctttagatgaaggacaccacctcccaaactgggttgctcccgatcacctcccgtaaactcgaggtgagcctcgttcccttgaaagcatgctcccttccactcaatagtcccattgcccggagaaacagatccaacaaaataaggcaacaaatccacagcactatgaaaattgttgagcaccggccatgaaacctgatggggcagaaccggaagcacgtcattgaccctaaaaggaagcttaagagcgttcccaaacccaaaacctaaaaggcagaaaacgagcaatagccatgaacaagtaggagagaacagagacatgggtggcgttctcttcgatcaaactcaaaaacctgataatagagttacaaagagaacaaaaccctaagcccagagccgttaagggcagttgagagtcgagaattttgagaggagcggttaaggacggaggtggtaccggtagtccatatttaatttttttctttttttcgggacaaaaaattaatatatctagatggagtatgtattagtcagaagaagtttcttgctatttattgtttaattatttaattagaaaaggaagaggataatatatcgtttggtagttgcttggttacaggctacggagtttattatagtacaggtggcggataaatacacacttcaagtcttttctctatcccacgtcaacgccaactaatacgtcgaaaacgataattttaattttagcggatttt

SEQ ID NO: 187418 - DNA, 1794 bp, Cannabis indica
atcagtaaagatagctctcgatctaaagcagtatgtgttcagaaactagtccacctcgactatctttcgatcgtattttatgtcaggaccatccccacaatctccaaccaagaagagactcagcaattctggagttgaattgtgactttgaattcagcattaacatttgttcagaccaagaatcttcatcagctgatgagctcttctctcatggagtgatccttcccattcagcctcgtgacagagttagtagtactatcagttttccttcaaaaaaaactcaaaacagagaaatcccaagtcttaattctcttcctcctcttccttggtctgagtatcaatcaaagggagaaaagcttaaggaagtttccacttctgattatgttgtggagcagagcaataagcctcagtcgaccaagtcgttttggggaacattcaagagaagtaacagcctaaaccatgagaacaagagaagcttgctttgttcgttgccacttctttctagaagtaattcaactggttcggtctcatcaactcaaaagaaaacttcctcgtttaaggaggttaataagagcaatggtacttggcaaaagcagccgttgattccactggtgagatcatcatcgtcctcatcttcatcatcatcttcgtattcaacgatgcaaaagccacctttgaagaaaaattacggaggagggtcttatggaaatggtgtaaggattattccagtcttaaatgtaccacctccctacattcctaaaggaactgcaaaactctttggatttggtaaagatagaaagagtaagaaatgagtgatttatttcatggtgaagaaaacttggcaattatatgttttagttcatcatatacctgttatggtttcaagctccttgtgtttttattttcttaaaaattttatatatgttgtgtcataggatagaacatggaatcttccaaggtgagagaatttcattcaaaagaaaatatatatatcttcacccaaacttaaattcttgtaaattatgaagaaaaagatcaccatattgaaaggcttggaagattcattcatatttaagtgtcacaatatttagagacaagaacaggaacccataatactgggtttgtcccattcgtcattcgtgttcaaatatatatatatttttttatgtaatattattttcttgtaggttctttttcagtcttatcagcttttaaaaggactttattcatatggtagatgccttgccatttatttgtttattttttttgcccaaccattttgtttgtaattgattgattaaaaaattgatactttccttgcaagaattgcgataacaaaattcattggagtgggtttgaaaaaaccaaatcccaaaacacaaccaaatgtcaatgtcctacactatgcaaaaagttcttgtctttattaatttttttagcttcttctgctcaactaattcattttatcaaggaccatgtcttgtggttattcattagtatatattatatttaagtcatttttttcttgtacactttaaaatatatatatatttttttttatttttaagaattcacataaaaataattgcaactaaaattcacatcataactcacataaaaattaagtaacaatttaaaccataaattaaaaaataatatataaaataattccgctatatataaagcaaggaagattttaaaaacaaaaaaaatgtatcttgcaaacatagtgagagagtacactaccaattaagttggcttgatataattattgtcggagaaatttggacaaca

SEQ ID NO: 187419 - DNA, 1833 bp, Cannabis indica
actgtaggaccgtatatgttaccctattccacacgcgtacgcccacctcacattatcaacttatattaaccaagtcaattttttgagaatatggaacggttaaaattagaagaacaggttaataaattaagtttgaccgcacgggattatagactcatttttcttttggcgaaccaaacccaaacctccgccggtgcacactgcacacagaactaaaaacagaaagaaagtaaaaccaaccatatgagttttatttctctccctaccaccccagaggaaggagtatataaatataaaaagcattattatttttattattattatttattgaaaactactgaacccgtttttcattcttcttagactgatgcaaccgccatcgggccatagcagcggcggcggtggaggagtaagtcgaggtggactcactcggtttcgctctactccggcgaactggttggaggcgctgctggaggacgaagaagaggaccaattattaaagcctactcaatgtttgacacaactcctcactgaacactccgcaacaggctctgttccctttggtcattctgaacatccgtgctcctttgccgatgaagcttccgggtttctaaggcagaacagttcacccgcggattttctcgggacttctggtcatgcttccgatggattcttctcgaatttcgagattccggcgagtttcgacctgtcgtcgtcggcgaacttgaatgtcgcctctccaactggcagtggaaagaagtctagggaggtcgaaactgtacggaccttctccgagaacacgttatcgtctcctattgtgagcaccacaatttgattccgatatagcttctctgttgtagctatatcttatttgtttttgaatgaaaaaattaaaattattaattaatttttttgcttctctcttcttttctattattgttggtagaaaatggagcaaggtggccgtgtttctggtttgcttgatacggagatggaaaagctcttggaggattcagttcctttacgggttagggctaagcgtggttgcgccactcatcctcggagcattgctgaaagggttagattttgaatttcttttttaaatatataactttatcagtctatgcatgtgtaatgttttcgcttaattttctataaaaattttcattattaaataggttcggaggactcgcatcagtgaccgtatccgaaaacttcaggagcttgtgccgaatatggataaggtagagtgttttcagttctaagcatcatttcatggtactctttttttcttcggtatttgcattcattgtcttaatatcatgagagtgggatttgtattttatcttaattttttttaacacagttttcaggtgctcattattccttccagtatatattattattatatatatatatatttatatattgaggttttacatgctatgtaatttcgttatattagtatcatctttacttagagaacttaaccccaatattttttatgtcattattgaaatcctgttatttgagctttttactgtacttttctttctttccacttggtaaagatattatcaatgtaggactagtctgaggtaaatggtcaagactagcatgtactttgtaggtagcctgcagctcacatcctttccttgtttgaattacatttaccctgttcttaaaaaaattccaccatcatctgagtcatgatgtctttacgaactcatcatataactcataactataatatgtaaatatcataattatcattaataaaatcaattgacaaaactcattagaagctcgagcaataagtcttaaatttttttt

SEQ ID NO: 187420 - DNA, 4637 bp, Cannabis indica
ttattagtgatctagcaatattcaaatttcataactaacatgtcatcataaccacacaatcccttagtttttttttcaggacatgtttgaattcagatttgtgactttactaataagatcttcatgaagcaggcataagtattgtttctgtcaggtaattactaaatcatcatttagtgatagatacggcaatttctgttagacctcctattcgatacacgtattctaggagaagagctacaccacacaccacttatttagtttcattaatttagcatcctagttgtatttaggactggtttagttctatggtattggtattgctgactaaattaatgagagattttattaatgctgactggacaaactaattagaaggttatgtcactaagttcaaggctcctaaatgtatatatagctgagtggtttattgagagattagagatttaatctctggttgggacggacttgggaatcaccaaattactcgaaaccttgggaaagattgtttcttgatatcaatagagtgacatttgtcaaatttatctattttctaccaatttcaggaatcaaactgactgaaataattattcacttgcctggcatggtatataaagaactctttgagtgccacgttggtgggaagtaaggtgttgctcagcaagaattgcagtaatttgtctgacattaccaacatcatcaaccaaattagatttctccagtctctggccaataccatgaaccataaacaccaggtgtcgaacgggaacctgaccaaaacatgtaactttaatctcttggaaaacaatcaaatatcactgtgacctaaaccataaaggacaaataaactgctacaccagtagaaattttaaattcagattcctacaatcaaatatcactactgatagctaaaaattcgaattacttaaatcgcatgaaagaaaaatgtttccaatgtcaagaaatagcctttatactcccaactctgtgataacccaccatatttatagtttgatgagattcaaactatatggaacacttcacagtagcacaaatcttaaaattagaatttgactaattactaaaactttctggtttagatacttgaatgagtttatttcattatttcacactcctctgctttcttagaggattgcaaagaaatatcacaagaagcaatgtgaaaacactcagcatgttttaacttcgtccccacaatttcattgaggctgtagagcccatgacaaattcgcttcacaaagcatccaattcttgacattatctgtttatttataatacagtataggattataacagtaatagtgattggtgatacagtatatggaatgcaatatcagatccaacttgcaaccaaacagcataacaaaaaaatcacaccaaacaagcttttaaccatcaattgtacatggtgtggtggccgtttgcaataagtgattaaacatatgctacataattaagtgtaagtttttaagtataaattacatgcaccctaaatcatcactcatctacattagtagctatctgcatacagtgatgttttatacattgagcaaacttaaaaagttcatgcaaacaacagtacaacattggttaggataaaacataaaataaaataagtgccgtcattgtgtgcagatataatatcaacaaactaaagtaacatacgcataatttaaacgtatgcatatacctgtgagcagtaatcatccatttcctcttctttttgctgacgcaaatcatcctatgtaagaagaacacaaaagagaatatatttagaaggcagctacgttgttttttttttttcatttttcctatctacagatgatggaagaaatttgacttgaatcacattaatgttcacaaaaatgtccataataaattgtttagataaacagatattgtaaagaaacaggacaagaaagaacagttaaagtcaagtccacacataatggaaattagtgaaatagtatactatatccagaattttatacctacattcccaaccttatatatttccgataattccaaaacagaggaagattacaagtacaagaaaaggtgtggttcataacaagtatacagaataatgaaggtgataaatatttgttgttattagagcattagcaatgacctgcgttggttttagtgagtcagatttagagtatccacgtcttaatttgactccatttccacctaatggaatcatgctagaaaagccagaaacatcaaaatttatccaagcctcccaagtatcatcttctccaagaaaaagtgcatgcagtccctaaaagtgcatgtccaaagaaaattaatgtatcagatataacaattttaataattaataagttcaacatcaatgtgcagacataccggagaagagccttgcagatcaattcgagctgcaaaaagtcctgagggttgaaaagttctacggtgccaaacctggaaataattaccagctcaggctagaatgatcatcattttatttagatttgattaatacaagatattcatgttcaacacaaatagaatgaggtttacaagagaaaaattcacactctggaccacacttactggaaccgaatttcacgaatctatgataaaagaaatatccattttttaggaaggtatggaatctggctaatacttaacagtaaaactatgtatttctacgatatgaccctaaacatagttattatcagtcaatcaaacctgacttcggtatgcaacctccaattgctcagaaacatcttcacgaagcggaagccaatcaagtccccctttacgagcaaaccaatggcctcttagaacacgtcggttatctccactccaataaacagggaaactgtgcctcctcaataagtctacctacataagttttgatgtttaattttaagagagtaactctttttaagtctagttactcctttgtgcttctctctttcaataaagctctttctttcaattccaatcataagaacaaacaaaaagagaagaaagaacacctcataaagccctccctttacaggaaccccaactctctcttcttcttctttacatgattcagctaattcaggaccctttggagaagatgcatttggttgtgtatccaacttcttgctagaactgggatgtccatttggacctacactacactcagcatactctttccaccaataagacagcaactcttcctccctctgtgaacgtatgatcaacaaacaagtagccaatccgtcagcacacctagtagttaacaagattcacctccatcaagctaaaatgcacatacatactaatcaaaatttcagaataagggtcctagagcataacaaaatctccaaatgaaggtaaaaaaagaacatgattcaaataaatgacctgcaaaaaagatgcctcaattgcaagagaatccctcataccaaaccgaaaatagtcacctttcccaattatctcagttggagggaaagaagcagctaactctgttcatgaaacccacaaacatcaatgccatcattaacttgtaccaacatataaactaagtaacaatcagtaatgatttcaattcaaaaaaaaatgaatactttagccaaaaatagaaatgtaaggcttaccatcatcgaccaaaggaaccttacaaaagtaccaccttacatcttcaccatcagaaggacttcgagtctgcttatgatacttccgacgacctttacactgttcaattacatcttccaatcgagcaatgttggaaggcgtatttttcaacaaatcaggtgatgcttcttcaatcccagtcccagagcctgaggcaccagttgcttccgaaaccagcaaaggagcaacctcttcattcgttccatactttcgctctttatccgccattagaacaattccaaagcaatgattacaaaatcggttttctcaatttcaacaacagtaatacccaaaggagttgttgatccatggcataactggaaaagggggtaattctgaaattgagaatagtgaatggagaataaggaagaaaagtgatggggaagaaggagacgtgtgacgggtagatgatctcattctcaccaacgacaacgccaagaaccaaaattggtggcggttacgtgattatttagttttctttttttaataatcacattcaattaatttgtcattttttattttaattaatttttacacttcaaattatggctaatcaagattgttttttcgagatgtatgaaatcatgcccataaatttttttgatcgtcaaaaatttcctctaaaatattgagattgttagatttaaggatttttgtctaattttagtaaaaaaattctaatatggatgaaagttcagaggctacatatcaaagttcgaggggcatgttttagtagatatcaaagttgggaagcatggtttagtacataaacaatcactgaaacagtaaagtttaataaaattagacaaaagttcttaaatctaagaatcttagagggaatttttaacgaccaaaaaagtttaggggcatgatttggtacttgtcaaaattgagagaaaaaaaattttaattagcctaaaattattttacaaaattatacactcaaatatatttttttttatttt

SEQ ID NO: 187421 - DNA, 3211 bp, Cannabis indica
taattaattggaagttggattttggttttgaaagaaaaaggaaaggaaaatgtagggaaagaagtggaaaataataataaaaataaattctcatgtttgctatggatagagaaatgattgtaaaattgtatttgacaaaattttctataccaaatctgagaaattgatatttttttttattttattttcctcacctttttctttcttcaccaaaatccaacttccaaacatagagtaatggaatttcaaagggaaaagtttattatttgtttcgtaccatgtgtttgtatgttgtttattaaggccattttgttacattgattttccgtatttatcaataagcaatgttgttcacatcttttattcaattacttacttttgtgatgaagcttcagacagtttactcatgtattaatgttagaatatttgtttagatggcaatgcaggaagcagctcctgtctcggctcctagtgcccaagttgttggcaatgcatttgtggaacaatattaccagatcgttcaccattctccagaattggtgcatcgattttaccaagataccagttctctgagcaggccagatagtaatggcgtaatgaaaaccgtgtcaagcatgcaggcaagtatacttgggagctcgttccctcatttgcatagaatttgaatctcaatgatagtgttttatagctgtgacagaatgtgtacttgtgtcaatatccccaaaaacagaaaaaacttactttgatccttcatgatcacatatagggataatttatttcttagtagtactcagttgacaacttttttgtgatataattctgtatactaccctttctctatgggtatttcaccccttcagtgcattaagtagtactcagttgaccacttttttgtgatataattctgtatattaccctgtctctatgctcattccaccccttcagtgcattaagtagttgttggatcttgtttagatgtgttcagttttcatactatttttttcttctctagttgagtaatatgtttcaacttaaattctcctattaaatgtttgaagatcagtatagtttatcatgaccctgtatggagctacccattaattattaggtcgtgtgtctattttaaatctgttcctccattaattattaggtcaggtgtctattttgactattcatctactaacggtgtaattgttttcttatttggttgggcagtcaataaatgagacaattctgtccttgaaatatgaggactacacagtggaaatcaaaactgcagatgctcaggagtcgcatgagaaaggagtgattgttctagtgactggatgtcttactggaaaggataatgtcagaaagagatttacgcaaacgttctttcttgctcctcaagacaaaggatactatgtcttaaacgatgtatttaggtttgttgaggagaatgaagtgccacaagtcatctctatcccagttaatggtgtcgatgaaagtgctcaggaatgtgcagtggcagcagaaccaggttgacatttttattccttgatatatgatttactgcttgctgtagccttgtttttgaatttctcgttaatttgaaattggctgctcttcatttcagagcctacgcatgaacctgataatcttgtggtggtggaacgtgcaattccattggaggaggatgtcaataatggtcctgaagtttgtgatccttcagatagtgaaggtggacttgtgattgaagaagagattcagcaacctcctcctaatcccattgaaaatcaaagcttttcaggtgttgattcaaccccggaaacactagaggatgctcctaagcaatcatatgcttccattgtgagtcaatgctaatctatgttatttcccttttgagttaccttatgttttctacttctctccgtttctaactgtctcttaaacattttagttgaaggtaatgaagagtaatacaaaaccaacttctgtccatcttcctaaccgtgctgcaagagctattaccacaaacactgaacaacattctgttggctctgcaaaacctgcgtccacagtggaggcatctgttcccagtggccatgctgctcctgaaggtgacggtttgcatgaagaaggtatgcattttttctaatctaacctcaagaatgagttttaactcttcatgtatgctcattatcttatataaaaaaaggttgagcctagaattaggcaggcaccacgttgatgcagacaggattgtttttcataattttgagggattcatgtatgcaaattgcaatcttttctcaataaagtttatgatttttctattctttcaaattttagcagctgaaggccactccatatatgtgcggaatttgccctacgatgcaacagttgaacagctggaggaggagtttaaaaaatttggccctattaaacgtgaaggggtccaagttagaagtagcaaggtttgccccaaagaatatgatgcaatttcaaatttaatttcttgatgtaaaatgtactttattgatgtagcactcaatcatattattttactcaatcatattatttttttttggttcttgcagcaaggtttttgtttcggatttgtggaattcgaaaatttgacttcaatgcaaactgcccttgaggtaatcttacaaaactgagtgttaatgttaatctgcatacttactattcgtttcaggcttatgtaaataaatattttcactgggtcatatagggtcataaagtttttaattaaggtggatcctcattgtaagcaggctctgcttgaatttggctgaacttcttacagaagtagatcttgaagtgattaaattgttaaaagtaaatagtttgccttaaatgctatacactaaaaataattagtaattctgttggctcacatgatgatttatctactgttgcaatatgttatgcgaggatgtgtaaaatgtttggcagtaaaatgattctttttcccctatatcccatgcttctggtaaaactagactacagcatcattattatctggctttagcacatgttatttctcattttattttattgaaaattacatttggagcttccttcttgtatcatattactctcctttctctttatagtttaccttatttctgtatatgatagaagatgtcattttaaaactgcaggcttcacccattacaattggtgatcgccaagctgttatcgaaga

SEQ ID NO: 187422 - DNA, 4819 bp, Cannabis indica
aataggcagttgcacttaccattgtctttgtcttgtgattcgcagaggaggaaggaaaggaataaggatacagtttccattctttctccaatctgcaccatggaccatggccaaaatcacatttttttttaattgcaattactcaatctgtcttatttgatttcatcaatattttgcagatgtcaggtgttgctcccccacctttgtgtagaaatatgcagcaaaatgggccgaacctgaacacagttggtgctgatagctcaccaaagtcaactgtgaattctactgttcaagcccctcgaagaaaggttgtagacgaaggaaagctaagaaaggttaggaaacaggtcctgacatcagaacatatactactgctctgtcataactctgttttgatttcatgatttgtatatacattttggcgttttaaatcattttactatttccttgctgtagctgtttttacattgtttgcttcccctagattccacattattcaattgcttttgttttttttttcagcttcttcttagattgtttttctctttcataattcaagtctgtgtttgcattgtgcgactcttcttggttccacattatgcatcttccatcggtttttttcatttgtaattattcagctccttcttagattgtttttctctttcataattcaagccgtaaaccatttcatcagtcatttttgagtgattgtataaaacttgtccttaacgatctgtccctttccttccagatttcaagcaggttatttattgattctggcactcgaaggagtacaagactttctgcagatccagggagtaatacttccacaatgatgcctggaaatggaaatacaaacacatctaaatacttaggtgggtccaagttgagttctatgggattacgttccatggctagtcgtaaaggacaaacatggtccaatgaaaatattgatgaaggtaatatttctttaatctttcttatttgatgagtgaaattaatctataatgattggaaacaaaaccacctttagctttttttttggctagaacatcagttcaaaccaccctcattaaaggtaataaaaaagagaagaaactatttctttcaaaatctctttgtttatgatgcctgaattttgattttgtttaggaatacgcaatgaaacttttgaagactcgcgagtaaatgtaacttctagttcagcgcttcctattgatagtagatctcttgagcatgatggggcaagtgctctgttgaatacctcaagaatcatgttaggaacttctgaaatattgtctcttttgggaatacttggagagggctataggctttcctgcctgtaccgatgccaggtagagccttggttattgttgaaaagagttcatttccttatttctgggtttgcatggtttattaatctttgtgtttcaggatgccttggatgtctttctcaaactatcacacaaacaatataatacaagctgggttctttcccaggtaacttgtttcaaagctcttattaccactgttgcattggttttgacttgtcgtttattgtgcaactaatgcatgaagtgatccattccatcttttgttgtcagtcttcctcctgttgctggaaaaatggttaagtttattttaaactgttgaaaaaaatcaaatcaaatcacttttcttcttcttgctaatttttgattttataaatcaagctctttttattattatagttccatcttaattttgtgcagatacgaaccatattaaatacacgacttgatatgtgtcttgtgctaaaattgaatacttgcttctgccaacaattgggcattttgaatgcaggttggaaaatcatattttgagttggtagattacttagaagctgatcgtgccttcagtcttgctcgtcgtgcatcaccttacagtttagaaggaatggatatatattctacagttctatatgtgagtcacgctacattgtataatgacatagaaatattgacatttatctacatcagatttagaaaagtagttttgtaaaggcacctcttgggttaattaaaaatgtccttcatacaaaattagtttgggttgatagtcaatagcatttgcttctttggttattcaaggtaaaccatagaattcaccgtgatacaacaaaagtgcagataaactgtgactttgttcctagcattggcaacttttatctgttaagtttaccatgcactgatatgcttagaaattttagcacctctctgaaagttattgtgatctatttttcagcatttaaaggaagatatgaagttaagttatttggcacaagagctggtatcaacagaccgtttagctccacaatcatggtagctttattactttttcaatagtattatatggtcaacacaaattttttccgtttttcacttgtttattaaactcttatgcttgcttttttgttctagaagtaattttctcttgctagtagtgtccttatggtctttcctactgaatgcaggtgtgccatgggaaattgttttagtttacagaaagaccatgaaactgctctaaagaattttcagcgagctgttcaacttaattcaagatttgcatatgcgcataccctttgcggccatgagtatgatacatcttcattcttctctctcactctctccctttctcttaacattatttagtcactagtcctaaattaacttctattttttttgttgttaacttacggacattatattgtatctgtttgtcattctctcttctttgtttctttgtctgcagatatgtttcattagaggatttcgaaaatggaattaaaagctatcagagtgctctgcgtgttgatgcaagacattataactcctggtatgggctggggatgatttatcttcgccaagagaagtttgagttctctgagcatcactttcgaatggcattccaaattaatccacgttcatccgttatcatgtcttaccttggtacagcattgcacacattacaggtttgtgtttgtctgcgaattcatttgtttatacaatatagcttcctggaaaattgttgtggctaaagctttttattgcacacaacagagaagtgaggaggctttgtcaatgttggagaaggctattttagcagataaaaagaatcctcttccaatgtatcagaaggctaatatactcatgaacttggaagattttgatgaggctttagaagtcctagaggagcttaaagagtacgccccacgtgaaagcagtgtttatgcgttgatgggaaggatctataagcggcggaatatgcctgaaaaagctgtgtttcattatggtcttgccttggatttgaaaccctctgcaaccgatgtggctaccatcaaggtgatttgctgctctctttcatttatatatatatatatatatatatttatataatgtattaggactccttctacctgcaatctctgtctatgttttaccattcaagcacatcacatttctaagattagactctcagaacatctcaacttttaatgaatgatttaaacataactaactttgtttcccaggtccttttgcattattctactatttcagtccattctcatttatctaccatattctaggacataatactaaacctttaataaaactatgcgctcccaactattgccctgagcttcatttctaatatttgtttttcaataaagagcagaatacatacatacatttttatcgctcgtgtctttgctgatccctactttgaacaggctgccatcgaaaagttgcttgtaccggatgaactacaagattacttgtagggatcgacattcttcagaatcctgtagattatgagtctcagattattcacccccgaaaggaaattggcttgtgcttttggagaagacagtgattgagctagcagggctaaattcgcttgctccaaatactgctttccatttggcagagattgtttataaatgatcctcagttttgtaggcaattgacgtaccagcatgatctcatgtagcaaacacatgaagctgccgcagtcgtacaaatagaaatagtagtaaaatgatattgagagaagttcttgtaccattaaactcttctttttttctttctaatatttcttccagcttgtatcattatgttgagttaatacttgttcataatttttagtttcttacgtctttaaatttgaaaagagtagtttttttctttctataaaagagtaataatatgtgacacttttaatatcaaaacattgcttcttcttcttttaatatcaaatgaatctctggttggaactttgaacgatgtatggcccaggcaggagttatctgataaatacaaaaattacttgattaagagtacggggttaagtctacttacacatatcgagttatatatgttatgagccaataaattgtattgtaattgtcgtttttttttctttttccaaattccaatcagtctcaaattgatgatgctgattttctgtgaattgttaattaaacagcaaaaagccaatttatatattatctgaatcatgatcttcaaagtagcctcagctttctaaattagttaggtcattgactcagtctcattgttacatgtggggctctggttttacatggggtttgttttatcaatattaatttagtaccaatctaaattatttttgtgtgatcacttcaccatttacgaaatcattattataccaaatgtttcatacatcgtaatcataatactactataaaaaacattgaacatacaattcggttaatagtgaccaaaaaaaaaaattaaataat

SEQ ID NO: 187423 - DNA, 2835 bp, Cannabis indica
atatatatatatatagtaataatggaaagggtaaaacacaatatttggtatttaactttaagtggataacattgaaaacatatagtatttatcgacagacttccgaaattgagaagttaggtggactcaaaactaagtatttcttttaattaacaaatgcagataagaacattttcttttttttacactatagtggagagacgatttacagtagaggggaaggagaattagcatatacaatataaaaactttagagacccagctgatatattaaacttccaaacaaataacgagcacatttaccaagcttacctagaaccagcttcatcttcttgaaccagtcttagcctttcgcttaccacggtatcttttcttcgcattagatttcacattctgaacagccgctttcaaaggcgagacagcttctgaaagggtaggaattgctttctgctctcctgttgatccgtcaggcttctctgccagctgatctctaagtttcttaaaatcatgtaactcttccttggcttgctcattatctatcagcacttcatcctcagtctgtatgcataaatggttagataagggcttagttaatacttcaaacaataaagtaaatgacagcagctttagagtaacctacagttccatataagcagccaatttgaaagggatttttgcttacagtcatttcagaatgaggagtcacctccccatgacttgaaacagcactcttaagtataagtaatccattcctattttcaggaggtacagtattttgagctgagctagtcagcccattacaaggtgcaactatgttcaacttatttatagaagaaatcttttgcgagttttcagaaaccatcttcttcactctgggaatcaatttttgtactcgtaaacgtagcttttcaatatccaaaagaatagcatcgtagcgatcatcgccatcttgaaactcaaaggatgaggttgtcccaaactcatcattgtcataactagccttacctataagatcaatagagtatactgtattttaataataataataataataataataataataaatcttcaaatgtaactactaacaacataggcatagctattaaatgtaacaaggacctaagaatcggatctaatattgagatgatggaccaagatactataatcttctttcataaactagatttcagtgcacttcgaacttttactttacactgaaaataatatggcgtaacccagaaaagaatgtaacaaaaagtacaaagctgatccactttatttttttcacttataaaatgtaaagaaataataatgaagcctttttgagcaaatataattcaaccgtgagtctccattttaggtgagagccagattgcatatatgcaagatgtacacagctttttgcaatttaaaccatagatgattaatctatcacatccaaagaatggaaatataaaataccaagttcaacaaattcctacatttctggcacaatatgatatgaaacattaaaaaaaaataatcatacctagcgtactagaattatcttccatgggagcactgacaggagcaggactcttactttctggaagaaagggaataaaacacaaatagtcaaatagaagtttaactagcaaataaacaaagcattagacgtaacgtaatagcaaaccacataccataatatgaaaaaaagttatgctgcgacatgtatggcactaaatcaattgtctgctcaactctctttcttttcttcctcttcataactttgtttcttttgatttgactagaaaatggaagtgactttgaaccaaaaccttctggagtataagtgtcaaattcacgctgctttctgtcatcatatttttcaagttctctgtcatatttcatagcttgcgatcgaagttctttaatttgcaattccatccatttacagcgccacattataggacgtatatacattctccaatgaggcgtcatcttcttcttcctacatattttaagaaacagccgaagtaaagaaactattggaatatgcaaaagaaaataaatcaacatactacaaaattactaattaaaaaaattgtaagcaaaacatgctctaaggccaagaacaatttcaaacgaatgcgctactgtagtatcaactaaaatgatgttattttattgacgacacattttgtttagcaaatcaatgactaaaggcaagaaaatttgagaaaagaaacatcaaactctaataaaagtttttgtattgatgatttacctcaatcgaaatgcatcataatattcatcgtattctgatattgaagcacggtcactgcgcaaccgtgattgaacttcatcaccatctaacttaggactattctctctctcggatactgaatcaccaaaagaacttgaacttgaactttcaattacatcagcacgattggattcaatcagcccatcgtcacaagaatatgtatcaccaattatgtccaactcctcattatcacctccatttggttctgtggtttgttgagccagtgattcttccatgtcaaatatgtcgtccttataattactcaaacaaggcaagaaactatcatcatgatcttgctggatggttgtgatgttgtccttatgaaacgaaactctcattgacgcttctaactttggtttaaggtccaattcaggaaccatcctgcaaatttccaagtatagtcaacccttcaaagtggggaatcttgtctaatttattttaatatgttggtatgagtctacacatactatacacgcaatttatttctgaaaaacgaagcaaattaactgataataatattgggaaac

SEQ ID NO: 187424 - DNA, 1013 bp, Cannabis indica
ctttaattattatttcaattagtagctcgagtaaccaccacaattaataagatcaaaatggaaagaagcaaagaagatctaactttgtcttctagttgctctttattattcttttcttcaacaggattatcgttgatctcattcagagacagaaattggcctataaattccatagcctttgcctttatcatatcccatatccatttcaaaatagtgataggagccttgtttggttcttcttcgcttgtaacattttgcctctcactttcagctacaataaatataaccaattaatatcatcaattactatgtcatataaagatatatatatataactcataattttatttttaaagagtgtaattaatataaatatatatatatgtacatataacaaattacctaataagcataagggttctatgaacttgcgaaccacctcgttgttcataatagcatcccatagggctttatcagatgatagtgaaaccactagtttctgcatatatatttaagtaagattaataattaattactcaagtacaacaaaattacattactatttgttatttaggtatacattttggaaacttttacatctatatatatttaaagatttatttttttctttttcttattatgctcatgaaagaaaaacaaattaattaagtaattaaccttaacaaaaggatctgtctgcaacaaatggaaggcttcgtaaagtcttctaattccataggacaacaatattctcggtataggaccatccaatatctcaacgagccattttgagtttgaaccgcgtgaagatacaccacgcataaaactgttcaacttcaacatacaaagataatcaccttaattttttattgaagaaacataaatttcatttttatcctccatgttagcatctctaagggtattatttatttttttagttaaatttaagctaaaatattatttttattatttttactctaatcatcttcttattttaattagtatttgattat

SEQ ID NO: 187425 - DNA, 2715 bp, Cannabis indica
tatcacccatccaacaaacatctgcatctactccaaagcatattttgctaaaccatgtgcagcatggtttgcatttctcttaacatgagaaataataactccggagaaaaagaataaaagacaaagaacatctattattaagtcactaaaactaaataaatccatagatgtaaagtttagagctgtagaaactctcagcgcatcggttttaatatgaataataggaagttgtagttgtagagcccaattaatgctatgaaaaagtgttatagcctccatttcatatgatcgaaagcacccttgcaccgattttgataaagcatcaataacatgtccttggtgatttcaaacgattactcctacccccaatactttatccgttgaattgactgatgcatcaacattcagttttagctccaaaaaatcaggtggtctccaatttataccatatggttgccgtagaggcagcgtgccattcatagtatcttggttactcgtatgggacgaggtgacttagagagaaggttgtttgttaccatttgtagctctcatgaatttgtccaagtaagtactgaaaaatgtcaaagtatgtataccatctcttcgatctcccccatgtagaaccttgtttctttcattctaaatggcccacataatgcatattatcaattctaaatctgatttaggatgtacagtggataagtggattaagtagtcaccattatacatgttgtgagcattgcgatagtcaatagagaactttgtttgcttccaaactgacttcactatatggaaagtgaataaagcatgcccaattgattcccaagcattagtacgcatggaacaagatgctgaagtaatgacttttctttttcttaagtgttgctgtcacaggtagagtagtttgcatcactttccaagcgaagattttgatttttgatggcaagttgagttgccaaaaatatttccactaggtcgtgtgagtgttggagactaaagtttcattactttcatcaatattacccgccaagtggaagcctgaattaaccgtatacattccagttgttgtgtggtgccaaatcaaacgatcttgagttggaaagaaggtcagcggtatggtgacaattctctcgacatcaattggcagaaaaaattgattaggagtgtcagattccattctcttttttctgtaatgaagtgtgccactgtgagtgaagaaggttcaacataagagattactttgaagttattatgacttgaaatccatttatccataccagccagcacattgaaaccattcccaattttaaagcgcaacccttgaaggagtagttctcttccccaatgaataccttgccaagtcatggaaggtgagtgtccaaggctagcttccaaaaagaaattatttgagaagtaacgatgttttagcagccggctaagcaacgagttaggtatctcataaattctccatgcttgtttagcgagtaatgcctggttaaaatgaacaaataaacggaagctcatgcctccttcaaactttgacttacatagcaattctcattgtttccaatgaatccttgaaccatctttatttgcaccccactaaaagtttaccatcatagattttaattggttacaaaaagtaatcggtaatcggaaacagctcatagcatatgtaagaattgattgtacaactgctttcaaaagtacctattttccttcaattgagaaaagtttatcattccatgcatggagtttttaccttattcgctctttaacatcactaaacatttttttgtcacgacccgcataagcaggaagtccaagataacgttcatgacattcaacaataggcattctcaaaatatgatggaacaagttattggctgcttgtgaagtgttcggtgagaaagacattaccactttatttgtgttcaacatttgtcctgatgctttatggtaagtgtctagaatcctccttatagaaaatgcagaatttttggtggcttcacagaataatagactatcatcagcaaaaaggagatgagaaattgatggtgaatgtcgtgttaattagagtcccctaagatttcccaatgatttttcatattgtagcagcttggaaaatctttcagaacaaatcaagaaaagataaggtgatagtggtcaccttgtctaagccctcttgttggttgaacataaccaactgctttaccatttaacatgaaggaaaatctagtggagcttaaacacctatgtatagtctcaatccaactgttatgaaatcccatcttgtgcattacctcattgatgtagacccttgttcccacgagttttgtgttttaggtggtggattagctcaaaagcaactaaaatgttatctgtgataatttaataattatttatatttatatttatatataaaaaacaactttgagaaaataatgttgcattctctaattttattaatttttttattatatctaatgtcttttcattattaattatattaattatatttttattattattacacataaaattttttttttttattttttttaacttttattatttattcttatataaaactcttttcttttcttttttttttttaaagcatataacactcttttcatagtcttataattaatatgtatgaataaaattcatttacatgttttttttttttgaaaagaaacctaaaaactttac

SEQ ID NO: 187426 - DNA, 2207 bp, Cannabis indica
gattgctttcttggtttcatttctcgctctctctctcactccaaattatgtacattaaacactaacaaaaacaaataaacaaattaacaactttgccccacaaaatatatattaaggggaaaaatatcccaagaaacaaaagagaaaaaagaaaacctggaaacccggatgatgatttcctttaaatgcaaggaagaaaaaagtatgatgatatcatcatacacacataaatatataataatgtactcattgtttaattatgagatcccaataagacggcaacatcattgcattgcatcaaaccataaatcttcatatataactgaatactgattattattaaattacttctaaaattcaatttttatataaagtttggtaactaaattaatgatatgaataatttctcagtttgaaactagaaccaaaagctttattattattaattaatgcctaaaccaaatttaatgaaatgagcactactacacattgcaatttgcatacaaaagaaacaccaaaagtgtcaccaatctctttctctctttctctatacataaaataacctaatatatgccaaaaccacaaaccaacaaatataaggtcaataagaattaatacaaaatcactatatacataaagaaaataaaaaaaaaataagaagagataatttggaggatagatccaacttgttcattcattcatttatattatttatcattttttttggagagtaactttcatttctcaaaactatacaaagcaaaactcatcagcataatctaattctggttaccagaatcaattttttccggttttttttttccttcctatatttacaactccaccaacccatattgatatttttcagaaaaaaaaaaaagaaaaaaacctaacaaaccagtaatctgagaatagtcagagtaaaagtcaggaataccagaagctgcccaaagcctctcattaagagaggtttgaagatcgtctttaagaaaaggtgtcctacacaaaggacaagtcttttggtcatatcccatccaacggtccaaacatcctttgtgaaatatatggcaacagtttgtgagccgtcggatctcatcttgaccttcaaactcgtacaaacacacggcgcagctctccggtgggtctaccagctccgagaacttaaccaccggcaaacactctcggatcagaagggctgaaactgagtcgaattcgggtactcgggtcatcatcgtggttggagagtctgagaaagaagaggaagaccaggtgtttgaatagacgccgccattgatgatgtccggtgaatcgatgaaatcttgaagacccagatagctgaaaaggattgaaatgaactttctgatgaaacccagaaaggaaagtgtgtggatgaacagttttggtatgaacagctctgtgtagcccactggaaaccccatttcaacaacaaaagagtaaattaaattaatattactttctaaaggtttcagcctttggttatggtgggtactgggtttctttctttcttttcttttttttttggtgggggttcaaatgaagaatgaatgaatgaatgagagagataggggtgagaatagaagatgaggattggtttatatagcagagagagagagaagaaggagaagaagagagaggtttggaaatgtccttaatgggctttcagcttttaatggacaggacagccaaataggacataaataattgagatattattattatttttcaaaactagtgtagattttaactgctgtcatcttcatgtgttgggtttgtgtagtttattggtttatttggttttttttttttttagtaaaaacaattattagtacacatatgtggtaattttgttttcgatgcaacttactattggttagaaaaacatgggtggcattaaatgctctgagtgatttgtgaaattaatgagataccaaacaaatgtactccacaaaaatcaatcaacgaaatgattgtaaattacttacacaatggtaattgatttagttgccaataacaatggcacttactttgagttttcttctttcgatttagaagttgttgcaaagttatagctgcaatagagcaatgttatgataatgtcaaacagcataacttaatattatcggaaatcataccattacacaatacacactacacagagcacaccacaccacaccagttgagtcatg

SEQ ID NO: 187427 - DNA, 4124 bp, Cannabis indica
agcaattttttatattatttattctaatcaaaatgcattagacctaacaataaattataagtgatatgtcaccctaaaaaaattatttatttagttaattatttttgagaattaaggtttaaatgtaactaaaagaaatagctagttaaataaaaaagctcaaattccacatttctaaaaagtgttgcagacaagggaagcagagagagaaagctttgcagagagagagagagcaatggctgatgacctctttgagggtctgcctccaccttctgcaaacccacctccttctacggagcaacaagaaccgctactcaactcaaaacctgctgtggttgagtgcgacgctccgattccagtccttaaaagcgccctcaagcgccccaagcccaacgaatcaaacccagaaggtatttccctgttctctatccgaaacaagtaatgttgtttctaaattcttgttaggtttctgaactctttagataaaattaggtgaaccctttagcggaatgggagagatttagcatgaggataactgtataattgtttagagactcgaacagataaaaggaaatattgggacagaagtcttcaatggataatatcactcaattgggttacaggatgaaactctgacttagctcaagcacactgttaaatggtttcaaatgggatttaaattctgggttttactattcgatcttgaaatgtgtagaaattttaatttttagtggtttaaaaacaaaaatgatggctgaagttcagtttgttgtacattctttttcttttatttacttaaacgtacaaagtttttcaatttaaggtgaagagtgtaacttgattatcagatacagcccctgagaagaagttaaggtttaaaacctcaacagatgtttcggagaaacaagtaatagaggctatgcaaaaaattgcttcacatattaagactcctgcaaagtttgctaaggcttcaaagcttgcaatacagctgattcaagccggcaacgtcaagccagaaaccagtgatcacttctttgctgtacttgaggctgcaatgtcatcatctatttcttgtactgatgcttcggttcgagcggattatcatgcattgttctcggctgcaaatgacgtctctgaagtaaggttattgatttggactgtaacatgagtgttaaaaatagaaggaaattaatgttgaaggtatctttactcctttattttcttttgcaatgcagtgtctaaataagaagcaaaagaatcaattcactacgtggacaataatggcagtggtggcaaatgatttattcactgatgacagttttgtggtaagaatatttgttttagtaatgttatgatactaccccctttgtattttctgatacaagtgtagtttggattccaattttactctttggtcttttgtgaaattggaaatagttttcaaaagcagcttcacggataaaggaaatcatatctaatcttccaattgcaactgaagatgatgacatagaggaagctgctgccctgaaagacgaaacagaaacagcaaatgaggatggtgaactaaagacagagaactcaccagttgaggaaactagcaagcaagagtctgatccgtttgggcttgatgctcttattcccagtacagcaaagaaaggagaaaaatcaaaggggaagaaagatgcaacaacaaagatcaaagatgaagaagacacaaagagagtccttaagtcccatagagtagcattgattacttgcttagagattgctgcccggcgttataaaattccatggtaaatatgcttacacaatttattaacttcttattcttaaatgttaatttaaggtagtttatatttatttctctttttgtgattgtttattcatgtcttttaatttgcaggtgccaaacagttatagacatcttggttaagcatgcctttgataatgtgtcaaggtttacatctctacaaagggatgccattgagaaactttgggcgtctatacgagaacaacacgcccggagaaagcaagggaaatcagttagtgggaaacttgatgtaaatggctttgaatggctgcaacaaaagtatgctggtgaaaagatcagtatacgacgtgcagttggtggaagtggagctcgtcgtgctcaacagtggcttggttgaaagttaagggtttttctcggattgcgggtgacagccattcttttacagagatagtaaaaactgtaactgttgtttaaagaatatgtggttgcattgtaaaattacataacaatatcacatcattacttgttgacacatgtatatttagtgtccttcctttcaagaggaaatcacaaagcatgtggctggaatttagcctcgaatatgatagtaaagaatggcagaagttcgatcttattgttctcattttgtatctatacatctgtatagaatatttacattgtagccaggataatagagtaaaagctaccaataatcaccacaagaacaaattccttttttgaaatagtgaaaccggttacgatctcttaccactattattctgccataaaattttgacagaagcttggttgcagcatgacaattgtcacaaactctcggattcttgataatccacattggagtacctgcagtcacaaactctcggattcttgataatccacattggagtacctgcagttgtactgataggactgaatgccatgactaatttttcactatgataattaagagagatttccttttcttcctcatcaatattctacaacacaatcgatgtgtcaggacaatgacggacatgttatttgtgctgagaattttgttaagtactccattgatcaaggactagatgatttttaaaataaagaatttccctatgttatttgtgctgccttttattgcggatacacttttctcatagtttttttttttggctctttgtagtgtaataaaaaaagaaaaaatctaattttttttgtttataaaaactatgagcaacattgtcatagtacaatgtttcacatccttattgaccatattgaaacattgtactacgacagtgttgctcattgtttttataacagaaaaatttagatttttttttattcattactaagaagaagaaaaaaaataaacggaaaaaacgtgtttgtggtaaaagtaacacaaataacataagaaaagtccttattctaaaattactaactcggcgatcaataaaggacttggctaaataattttgagttttggaaaattatttttctttcttcgataatttttttaagtataaatatgagaattttgtaatatcactaataaaaaaaaaaccaagaaaactttttccctagaatttttaatttattacgctccgagtctcgtggaaacccttcaggagtgaagttccgccttcaacttcctggttctcgttctctgctcgtcggccggcgtcgccgatcaacgatagcctccatctgcaagtcttgtcttttgtgacatggtgtgattgattccggtttgtgtttggttgatgtttttctaggtgaagtcttcttctttttgagagtcttggttcggtgggttctggattcagtcttggattcgtttggttgattggttcgtttggttctggggtgagtcttggttccggttttgtttctgggttgagtcttgatcggttggttcgtttagtgtgactgtttctggggtggtgactgggttggtggcgtttctgtggtggttttttgggtgctgctggggtgcgacgggggtgcagttggtgggtgaaggggtgcggttggtgtgtgacggaggtgcggttggtgtgtgacgggcgtgtggctggtgtgcgtttagtttctagatcatcgtgtgtcgattggagagtggctgtgttgttggtgggggttcatcaaggatcaatactggtgctggtgatagtcaaaggatcgatcaagctgctaatttaaagcacgtaatcaacctgctagtattataatatatattatattataatataaattgagtgtttgtttggtgggatctgtccaaggcagtgatagtccaaggaaaagtattactctttagtggtaggagtcaacacagaagagtaaaaaaaaa

SEQ ID NO: 187428 - DNA, 4599 bp, Cannabis indica
gtaaaatttaaggctactgcaaaactttgtggtggactaacggcaaattttagtaattctgctccaaagataatgttttactctgctaggggaccagatccagaggacaactcacttgatgatgctgacattatgaaaccaaacttggtagctcctggaaattttatatgggctgcttggagttctgctggagctgattcagttgaattccttggtatgagtttctggtcttcaccagttgtgaatatttttcatttatataaatcttaatagtatggttaatattaaatagtagtaataacttttgtaatttttttggcattgacccactaggtgagaactttgcaatgatgtctggcacaagcatggctgctcctcacatttccgggcttgctgccctgattaagcagaagtatccaagtttcagtccttcagcaattgcatccgccctttcgacaacagcttctctatatgataggcatggtgggccaataatggctcagcgtgcttatgccaatccagatcaaaatcagtctcctgcaacaccttttgacatgggcagtggttttgttaatgcaactgcagctttgaatccaggcctgatttttgattccagtaagttgatacttaccgaacacattgaaagtagttcggctctgataggaatttcctatcaattaatttcagaaatagaattaagaagaagaagaatgagaagaacaatgatttgctactaaaatcccaggtcttcgagagcctggtctctccttacagttgttaaagaaattactccacacccataaaatcctccacttacattatttatatcacatagagccataattccctgtgactcaccccacaaccccacactacacccaattacacttacacagccaaattatcccctgtggcagcaccactcttagatcccctagtcctttttctagcatagacaaaagtgatgggaggcttatcaataccgccggcctgaagtttcaccttgtcctcaaggtggaagtgtggaaactgagcttggatgacagcaaaatcttcccaagtagcttcaaatgcagggagatgcttccacttgatgagagcttgagggctggttttatgtgtaccagggcggaaggcaagcaatgcttcaggttccaacaaccactcaaggtccgctgtgaggtcaggagggaggaaggaagcttgctgatagggtccgagagctgctcgcagcaaggagacatgaaatacagggtgaattttggcgtcaggtggaagttggagtcgataggcagcaggtccgatacgagcaacgatgggaaaagggccaaaaaatcggggagagagtttctcattcggtcgtcgagcaacggtgcgttgacggtaaggacgcagcttaacataaacctgctcaccaatctcataagtcacatctcgacgactgcgatcagcttgttgtttcatccgctgttgagcacggaggagattctgtttcaacaaggctaagatatcctctcggtcacgaagcacctgttcaaccgcagagacacgggtggtagtggagtcaaaacgataagaggaggtggatcgcggtgatacagagcacgaaaaggagtcatgccggctgcggtgtgatgagatgtgttgtaccatactccgcccaaggtaccaaggagcccattgaatggttaaaactgcaaagcacgaagataagtctccaaacagcggtttactacttcggtttgaccatctgtttcggggtgatatgcggtgctatgcttcaaagtagcccttgggagcgaaataactccttccaaaacaactcaaaaaaaattttggcacgatctgacacaatcgagcgaggaaatccatggagtttgacaacttctttgatgaacacggttgccacggtcaaagccgagaaggggtgtcggagaggaataaaatggccatacttagtgaggcgatccactaccacaaaaatggcgtcaaaaccgtgagacatcggaagaccttcaatgaaatccatagagatatcctcccatacttggtccgggatgggtagtggttggagcagccccgccggagattgagccaaatatttattttgttggcaaacagagcactcagccacaaacttctgtacatctttgcgcattcctcgccaatagaactccgctgccagccgctgaaaggttttgaagacccccgaatggcctcccactttgctactgtggtactgttgtagtaacaactgaataaacggtgaggcagcaggtaacaccaaccggccacgaaacttgagacagccatgggtaagagaaaaacccccacaatcttgaccccgagataattcagacataaccttggtgaggctggggtcagcagcaatgtgagattgtaaatccgaagtggaaaacacagcaggaatagatatggctgccaaagttacctcagaagtgacacgggaaagagcatcggcggctttattttctaagcccggcttgtactgaatatcaaaatcgtaacccaagagcttagttagccacttttgatgttccatcgaaaccaaacgttgctctagcaaatacttcaaactccgctgatcagtacgaaccacaaatttccgacccaaaagatacgggcgccacttttggatagctaggacaatggccatcaattctcgctcataaactgactttgaacgagctcgcggagaaagcacgcgactgaaataagcgatcgggcgaccctgttgcatcaagactgcacctaatcccactccggaagcatcagcctcaatgataaaaggaattgagaaatctggcagtgctaaaaccggaaccgaacacatagcttgttttagttgttcaaaggcgtcttgggcttctggagaccaaaggaaagcatcctttttaagttggtccgtaagagggcgagcttatgttcccatagccttgaacaaacttccgatagtaccccgtgaggcctaagaacccgcgtaagtccttaatggtggtcggaggaggccacctgaccatggcgtcaattttacttgggtcggcagccactccctctgccgagataacatgacccaaatactcaacttgggcttgagcaaagatgcacttcttccgattagcataaagttgatgatgtcgtaaacgatcaagaaccatgccaaggtgggtcacatgctctgttaatgaaggactataaacaagaatatcgtcaaaaacaaccagtacacaagtacctcgaaaatcacggaatacctcattcataagagcttgaaaggtggcgggtgcgttggtgaggccgaacggcataactaaaaattcgtaatgcccctcatgtgtgcgaaaggctgttttctccacatcattaggagccatacggatctgatgataccccgattttaaatccagcttggaaaaaactttggcgccatgaagttcatcaagcaattcatctataacgggaatgggaaatttatcggctattgtggctcggtttaaagctcgatagtcaacacagaaacgccacccaccatctttctttttgaccaacaaaacggggctggaaaacgggctagtactcggttgtgctatccccactcggagcatttcttgaaccatcttctcaatctcccccttttgtatttgagcgtatcgatatggccgaacagagataggacctgtgtttggctgcaaagtgattgaatgatctcggaaacggggaggcggtaaacctgggggcatctcaaatacatcttcataacggtccaacaattggacaataggggttggaagtggctgtggagtacggtcctcttcaatagaacaagcgccaatgtgaaccaaataagcttcagctccgctatccgctgttaacatcaaagcttttaaggagatgggtgatttacacagactcggatctccttgtaaagtgacccatgtgccggccatctcaaatttcatcaccatcgtcctccaattaacttgcatatttcctaaggtctcaagccatttgattcccaaaatcacatcagcacctcctagttctagcggaagaaagtcggtgatgactcgtatagcccccaaatctaattccacttgagcgcagataccttccgttctcaccttaccgccagtgccaagcaatattccataacaagaagtggcggagatcggtagtcccacagcagtaaccacttccatagatacaaaattatgggttgccccactgtcgatcaacaccgtcacaggttggttgccaatttttcctgccaatttcatcgtattggtcgtcgaaattccaatcaaagagttgagagatagtgtcgcgagagtctcttcagtggcttctgtccccccggaatccggagaaggaggagaactttcttcaagtggctcagaatcgtcctcgtcagctgtgagaaggatctgtaatagcttttgctcacactctcggcctggatggaatttcttatcacatttaaaacaaagtcctcttgatctcctgtcttggtattctgcttccgtaagtcgtttgtaagcagtggctgcagttgaacgactactgccccctttggttgtt

SEQ ID NO: 187429 - DNA, 1567 bp, Cannabis indica
agattaacaccattgcctctgaggattcgtcttataaaacgttttactggaaccttgctatctctgatgattcagtatgtatcgaaccctgagttgccggtgccattgaatgatgtcacatttgttttgaaactaccggtagacccttcattgttgcaagtttcgcctaaagcaatgcttaataggtctgagaaagaattgaaatggcatattgctgagattccacaaaagggatctcctggtaggttgagagcaaggatgcctgtggatttaaatgatggtgacgaagagatggatatcgttgtttatgtgaaattctctatacaaggaaagcaatcgctttccggggtttgtctacggcctgccactgaggggaagactgacttctatgaggttaatcacaggtttgaaaatggagtatatatgtgcaattgattcattatgaactatgattgtttctttcattgtagatttttcatgtttgttcttatttttcattgagggaattttgcaatatgatttgtttgttgcattctctttaatattgagcttgtaagaaaaggtattcgattaagtgtaagccttttttggttgtactaacacttgttctacatattctttttcctttatatatttttattgaattgagaactcaatacctcactagggagaattggggtcttctagaaaatttgcttgttcattgtaatgagaatcaacttgagttctgttatacaattgttgttgattaaaatcataggtttatatttatgcttagctcctatgttactcatattctaggtttgctttttacccaaaaggggctccaatggtcaagtattcttgattttcttctgcattttctctgcatatttttattttcctgaattctcttattggtggtaaaaattcaagtttgagttttgatgttttcatagtgaaatttgtattatacaggaaataagccaaagagaaagttaaggcatcatatataagtttgtcattgtaataaaatggcaaatgacctctcccccaagagacttttttatatgattactaggttgagttaaacttgagaaggaaatatgataattaagaattccgaaagcattaattttttttgataaattttaatcacattcatagcattgattcaattattaaaattctatcatagggttatgatttggtagttgtgatgtgagtgaatcagtgagttttcaaggcacatttaattgtgtcaatattatttcaatacttgcaaaattattaattttttttctaaaaagtttgcaaaataattcaaaaatacataaatactacttagagttaacaaatacttttaaaatataattctttttattttaaattgaaaaatattataatatatatattattatacaactaattcaatctttcatgtcaaatacaaacaattgtcctaaaatgcaaaaagggtgaaaagagataacagtatgttttatagttaaacatgtaattaaaatggtgtttttttctaactaataagaaaagacaatttttttccaaaactattttcctttttttt

SEQ ID NO: 187430 - DNA, 1803 bp, Cannabis indica
tatgagactcgatacttaattaccaataaagtatgacactgaggaaggtgttaggtaccaataaaacattttaacaattctctcaaatagcaatagatgacttgtcttagtgaaacaactattggactaataatcatctttagcaaaaataaaagaactgttggactaatcataccacacacaggattcctcgatcggatggtaatgatgatcccatcaaattctttttcctttgcccttagtttactgctatgctatcattttttggcctaaacatcatttgtctaattagttttcactcttttaaattttctatatatatgcttagatctataactaagtagtttattaacagctttgctgccaaaataattgagatttaaggcttttatttggaagagttggcatagtggtccaaattctattttgtccaaatcttgtagggaagattaggaaacaattaatgtctcagtaaaataatacctgtaaggaagagatgagaagattaaaatcatgtattcataacttgaattaaaattgtttgtctggcccaaaaaagaaagaattaaataaacattatctttacaaaagtacttgtaaagtctttaatttatgtcaaaaattggttattctacaaacaaagctcgtcaataaattaatcaagagcctaccccagattataaaattggaatttgactcattacaattttttacttttggcttaccttttattggagtgaagatatctattcatgtggacctaagtgaatcatgtgttcaatgggaatctcattatcatgacccttttattatttctcttattctcttgtaaatatatttaattcaaaaaatttgagcctcatgcataggagaaactttttctaaaattaaaaactagagatatatgctggttttctttctgaaatggcctaaaactatgaccaaatattaggagagaaaaaggacaaaaattgaaccaaaaataaaagtaatgtttttcttttctcacacaaaaggtggagaaagaactttgaatcattagtgcaagtgaggaacaacaaagccccacccttttgaaacttgtggggaagttaatgatgtattaatttaggctactcttcaatgtgggtggattttattggtctatttcttttatttatttttttttctttttgttggggaaaaaaatatacatgtaattcaatctctcacataattgcatgtaaagaaccttagctaaatgtatggagctatggaattatttcataaatataaaaaaaaataatgataaatttttacattttacagatatatttttttataaatatacagtattattttttttttgtttctgaaaaaatattgttttggcgttactattacacaaacgcaacgtgatttattttttacaattatacagattgttgtttttcttacaagaaagcaacgtaaaagaaatattcttctgtaaaaaaacaaaaacaaacaaacaaaaaaacaaataaaaaatccataaaaattaaataataataaaatcataaaagtatatttgaaaaaaatcggtgtaaattttcctagtattaggattgtgccaataattttcatctaactataaagcccatcaaaatatatgtagaaaatattgttgggtcaaatatatattaggcttgcttaacatgaggattaaggttagagagcccatgtttatttgaaataattgacataataaacccataaaatcccatcaaaatcaaattgtgctagtggtttcctttccttttctctctctctctttcctcttct

SEQ ID NO: 187431 - DNA, 1631 bp, Cannabis indica
ataacagatttaatgaggacctctccaagcaggtttaggggaggactctcccatacccttactattctttctggtatgggtatctaactgcttggttattttcctttactttctttctaattacaaatgttatgtcagaccttttcgatctcgtggcggtggagctaatggaagagcaagttgacaacgcgactcaggaaactatttagatgaggaaagggttgaggagcaagagcaacgagaaaagatcattacaaaagtagtctacaactcctcccaatgggaaatggacaaaatcaccaataagttcccaaactatgaaatgctgaagaagtattccaaggaatgaggggttcacaatgtttcaggcttttgttggcatagtctttcactctctggagaatcgcctatgaaatgcaagtatgactttggagcttagagctgtgcgcatatcgtgtgtggagcgcacctaccattgcaaagttactttgtgaatttttgtgcaatcgtggggatctcaccattatagctcattctgcaagcttacaagttgatggtcaaatgatatattctctgtgtaaactagaaaatggaggttccagaactagagtagaggagatactgtattttcatatagtaagtcacagcccatgcagaagaaaaattccaagattgggttctacaagttggaaaagtgttcaaaaatggtgtgtccgtccagcagcaccaagtacgtcctagacttctaggactactggtttttgttacttcaggcttcccctaaagagggttccaactttgtccctcttcttctctactctaaggaaagccttttggtattttttcttcttttaaacctttccttctatagcatgcaaatcactaatgatgaaagttttaatcttatagccaatacaagaccttctccttcatttgcgttcctggtgaaaagggatggactataccagaatatctttccactatactgaaagtggaggagttggtcaccacaaaaaatatttgaagtgtttggctacgtgcttcgcactaaagtattgagccgtatagtgccctcagtcatagccatgattcgccgacagtgaaggaggcaattacggatatggtagctgaggtgatgtggaaggccataaaactggataagaaatggctggtaaattgggagcaagctcatccatatcccataacagaagaagctgagttggtggatcactttaccgatgtttaacccaatgaaagcaccccatgtgcttgcatgtccaaccgaggtaagactccattatgtcttgattacgttccatatctggatgggatggctcacatcaatcaaggaggcttgaatgattgtttcttaaatgtagatcctcataggtagattaccttgataaggtagatgagattgtaaggagtccaatgttagtttttagggttaatatcagaatcagagcgaaagcataaaataagattttggttttgtaaaaaaaaaattagttgaatcttataagaatttttaatcctaaatctcaatacaatatcacataaattaaatctaactaattagaattaggattttacttcttcacgcctacgaggggtgttgacccaaactctta

SEQ ID NO: 187432 - DNA, 2577 bp, Cannabis indica
gtcaacatttcatgttaagtagaaaaacaaaaatatcaccatactacttggaagtatgtgatcaaattgggcatgtatccattcttaataagtaatgaatactacccaaccaaaaaaaaaaattccatttattcattaattacattgcacaatgtaagaaaatttttcattacattactttgaaagttccaaatgtgatgttttttaataaacaaagtgtagattttctaataaataaagtaatttttatgacaaaattactttttttaattaaaaaaaatcaattaaatgtgtcacatttgttacaaaataaaatcaaagaatcaatatatatggttatgcaaagctaaatagtggaagaagctgagttttttcttcatattattccaaaatttgcttttgactttttttatccatgtgcaattagcaagggtgtttaggtaatttcccttcaacccatcatttagaccgcgtctaaactttgatttaccattatacccttttttatacacctgccaaatggtataatgtctttttatttttatttttttaaagtctaattttaatttgattttttcttagacaaatccaattttaatttttttttttattaagaatccaatattaattaagttaggagaaaaaagaattaattgttggtaggagaggagagattcacatcaaaagcaagcggtgcatgtccttaattgtcattttgaccaatcagaggggtagatcttggacatacattgggtatttaagacaacccaaaaccattttttttcttcagactcttcttattctcttctctcgttcagaaccaaaaaaaacttaactagcaaagaatttcaggaggtaatgttactgtcaagctttaaatttcatatctttgtgtatatttttgctgtgatttgttgggttttgtgtgaattatggtttattgttttgtttttccacgtcggtattggggagaatgagaaatggctgtgttggtctctgattcatattagatttgcttttgtaggattgagttttccctttcttatgatgggtttgttttttatgtcatgagaatgcagatctaacttcagtttttgtgattcaacgttgttttggggttagttattgtatttgagtataattcgtgatacttggcaattggatctgattcaattattagttgtacattagaatttgcggttttatcactgttttgtgtataaaaaattgttctttgttggttttttccttcgtgatgtgctagatctgatgtgttaattatggttgatcaatttatagaccctttagctggaatggttagttgatctcttgtgagatcatatatatattgctctctattatgttatcttttgtctttaaactgaatctatacttatcagctttgatgtacacatttaactcctacttaggtatctaaattttggaatgaatatttatcaatgattttatcttgaggcttaattcttctagctgttgtttgaatattgggaagaaaagggttgggagatttgagtcctacatgagactagatctgggaaaaagtattgggtgaccatttgagttttcatgtttaataggaagttgagtgtatgtgatcaatatttgatttgaagcattatgaatttttttattgtccttttgatgtatatgaaacttcattttggacaggttgtagagtggtaaaagagaaaaaatggtgaagatttgttgcattggtgctggatatgttggggggccaactatggctgtgattgcatataagtgcgcctctgttgaggtggctgttgttgatatctctgtgcccaggatcgcagcttggaacagtgaccagcttcccatctacgagcctggccttgatgatgtggtcaagcagtgccgtggcaagaacctcttcttcagcactgatgttgagaaacatgtcaaagaggctgatatagtctttgtctctgtcaacacaccaaccaagactcggggtcttggagctggcaaagctgcagatctgacttactgggagagtgctgcacgtatgattgctgatgtttcaaaatcagacaagattgttgttgagaaatcaactgtcccagtcaaaactgctgaagctattgaaaagattctcacccacaacagcaagggaatcaaatttcaaatcctgtcaaacccggaattccttgctgagggaactgctatccaagatttgtttcaccctgaccgtgtcctcattggaggcagggaaactccagagggagctaaggccatccaaacattgaaggatgtttatgctcattgggtccccgaagaccgtatcttgaccaccaatctctggtctgctgagctctccaagcttgctgccaatgcctttttggcccagagaatctcctctgttaatgccatgtcagctctttgtgaggctactggtgccaatatttcagaggtgtcatatgcagtgggcaaggacaccaggattggacccaagttcctcaacgctagtgttggtttcggtggatcttgcttccagaaggacatattgaatcttgtgtacatctgtgaatgcaatgg

SEQ ID NO: 187433 - DNA, 2962 bp, Cannabis indica
aattatctcatcattatatataaacataaaacacatgaagttgatatatgaaaatctcatgtagttgttgatatattataagttgtactaactacatagaactatatagattcgttcttattataaggttttattccacattattaatttaatgactaaattaagacatcttactaacacaccacacacaattagctaatattatgagaaagtctttatatatagtagaacattaggtagctcaccattctatgagtcttgcaaaagtgagctcaaagagtgtaatcatagaataaagaacccaataagtaagccattgttgatcatcactacgagacttagtctctatggccttgattgaagcatgcctaaaaataacaccaaaaaaatcatatgcatatatattatcaacaaacaaaccaagaaaagaagccataatattaacacttaacacttacagaggataaagaagagagattaatggcctgcaaattaatcaaattaatgagaatcaaaataacatgtagaagagaaattaaaataagataagagaaatgtaattagttgaagacatacaaagcaagaatgtcaaagttcttgagcacaacttggagaaagttatcattgttcccagaagaagagcccattttgttttggcatatagactatagagagattgtagtgagtagagtgagtagttttactggccatttcttaaaggggtttctttttttgtggggtatgaatgaatgtgtttaaaaaatgatctgaaaaagaaaaaaggttaatgtgaaaagttgactatggggacctctttaaggactaataatttactggagaatatgttgtacacaagaaaagaggcaccgatttcttttaactttatctttgtgtgtgttgtggttcacagcaaataaataatacatctattttacaatgtcacaccttaactgtcatacacaaattataatgcttcaaataactcataggggtgttttagggtgttcgtctaattgttcacactgtacaaactgtctgcaccgtatcacaccatatataaaatatgatttgaaattttttatagtgtggttgtggtttgtaagtttactaaactgtgccatttgtggttttgaatttaataattgtaattcaaactgcagttactaatttttgtaatataatttttatttaattttcatataagaataaatatatgtaatatgtgtgtatacaatattatttttttagagacagtttaatataataccttgatgattatagtatataagttatgatgttaaaattttaataagattttttttttgataatttattagattgatttttgaagtttcattataatattatttaataatgatgatagtgtaaactgttcaaagcgcatcacaccacactgtatttttgcggtgtgatttttgcattttttaagatttcacggtacagttgcagttagagaaattaaaaaaaccttatatgcaatttggtttgaaagaaagattacaacctgcgccactcgcactgcgaacaccattattgaagttgattatccattcattttttttttcaaaaaaaatatgcatcttcattaaattaaatcatctctagctaattaagaatgaaatttcaataggtaaagagttcctactaaaaatacaatcagtaacacgaatagaggaacgtgctaaagtatgcaccactctattcgcagatcgttttacaaaacaaattaaaacagaaaaaaagttcaaataacattgtcttacaaccttgagttaaaaccccatatggagatgccataggcttactcaagtaagacaatccgtttccaagatcacactagacctagctttccttttgatccgactcaatgcctctttaagtcccatagcttcaaccaagagtagctgaatcggaccaaaacaacttttctaaaatgcttcaatagccattcccaaagagtctcttaccactgtaccgaacccaattaggccttcatcttgaaaaattgcaccattcacattaaccttgagattagtaaacataggtgaggtccaatgctcagttacctctcttgaatcatgatttaaagtgtgcatttgaaacgtgtttgagcattactctagttctcaaagctgagtttagctaacaacacaatctcatcaatggtgggtgatttatgattccacactttcttatttggatgcttccacttcaatagtagttgcagctgaccaatgggataaaccttcttgaaaccagacagcaaaagaagcttgattatttgctactactgcaataccagtttcctactagtagccttgagccactagacaagtaacaaacaagtgaaaagcggattccgaagctttactacaccagggacaatccgaatttaattgaacatgcctagctagtcaacgccatagtaaaaaatcaaacaaaaaattaatcgagattttgagattcaaaaattctcacaacaactcgcacccccatgtcaagacatatattcaacttaaaaatgtggatgaatcaactgtttaatgtgttgtttactttgaaaatcttcacttcattatagttttcagtatttcatgatcgcgaagatttggtgggatgtgtgtgttttctttttttttacccttactcctcaagtaggcgaggtggattggatccatgggttgctgctctactggttgttgcctacctgcattctaatttaattgattgcaaagatatggagcattacgattcaaatgctcgcgcaagtctaattgtttacgatttaaaatgctcgcgaaggtcagggtcacgacgcctttggtcatagtggcttactgaccttgttctcgaataacttttggattggtagctttgagagttgctaatgctctcgtgatcatcttagataataacatcgcgatcctccttcatttttgcg

SEQ ID NO: 187434 - DNA, 2941 bp, Cannabis indica
ttttttttttaaatatttatagtagttcgccatatgatgaattcataattgagaaatcttagtgttattattattattattattattattattattataaaaatacacaactttttttgaatttatacataattataacctgctgcttagaatagaattaaatgttttaaatagtatattatatattatcttttatagtaccctaattatatatatatagaaccttaaaaaaccggcttcaaaaagaattaaatgtttcaaatagtagattatagtcattttttatatatatctggataaaatatgtatagtaaaatctttttttttcttttaaaaacaaagaaaagtaaaataaaaacatatatattttttcttaggtgtctaaattcaaatgatataaaaaaagatctaataagatgacaaaataaatctaatgcgtactaaaggaataaatttattattgataatattgttcctatataatcaattgtaagagatattttatattattgatttaataacttacccatatctctttcccttgtagtaaaaaacatttgatatgcaagtatcatcaacatcaaacacccaagcatccatgccatcgtcgctgagagttatgtcaccagcgtaagccaatatttgatcgatgataaagctaacatccttttcgtactgcccaccgatcatgtacctttccacataactaaggcactgcgtcggcactgtccgccatccccgcacattgtttgcttcaaccgccaccctccagcttaggcagttttcctcttgtactggtggaacgggcagagacggcggtggctgccgaacgcaattcgatctgccccagtggttcggcttccattcgccgtttgttttcgacatcaacgccaggaacattagtatcagcacctcacgtactctttgaaccatcgttcgaatcatagagagatatatgtatgttatatctatctctgttatttaatataaatttcagttctacaatctatacttcttattatgagttatatgtatatgtatttagttatatatatagagatatttaagctttggaaaaccaccttaaataggcttgtcatttctcacaaatggaatggaattacttgtttgagtacctcacaaaaacgtcgtaaagttgatcagaaaatatatttttattctctaagtggcgtacgtgtaatggcagcatctttgttttagggcattcttattggtcattagtggtgcttagcacctttaaacatgtcgtcttgcgattggctagtgaaattactcaaaattattatattaaattatataagattcaatacttaattaaaccaaaaaaaatattgacatgaaaaatgctaagcaactaattataacctagcacactaattataattgacaacaagctgaaaatagttggtcagagaaggtgttgggaaaaggaaagtcaaaataattaaatattttaaaaatataaatgtacacataattattaaataaaaaaatattataaaagatagcaatactcttataaaatattataaaaggcactgtgccaaatagaaatgctgttataaaatactagaataacatatacatatatagtgattaattaattaatgagtataaaacagatcttaatatataaaccagtgataaggtatatatgtagatcattctacaatatccgctccttgcgtgtggtgcgtttaatgctcttacttttgccggcctaagaaagacctgctcattatcgtaaagaaaggtataacatatcttggatcctcgtcctcatcacttataattatatattatataatcgagtacatataaattttcactatatcttacaatgggtcgatcggtttcaatattttggtaaataacaatttgaatcttgcatcttgatgaataaaacgtaataatacactcaacaatagtattgttgatcatttgagcaaagagccaaactcttcccaaccttgcctctggtggaattctttttggtactttaacatcccttcgaagataaaacattttgccttccaaggccacaaagaactctttgctcactctcacaaacctacacaaacgaaccattgtcccctccccgatttgttctagaagcggttttgagctaaaaaatttaagtcatgccttatttttttgcaaatgtatcaagttttattagaaaggtatgccatattaccaatatctaaaaaatatgaccaagaaaaaaatggagttgtttgtttgtttggcttggttcatttggcatgacaggattgagcatatttttgggaaaaaaataaaattggtaacctccctggtcttttggagaagactcgattgatgctcaccaaatacacccaagaaaatgagaatgatcgagctctcattgattctcagactgccacacctaaggcgaatgcaacttgggtccctccccctcagggtctagccacactttccatagatacagcaatcgaccctgtgaataacaagtcaggtttagcaggaatcttacgcaacgacaatatatggggaaactatagcagctctcacaattcccttaccttgctatggagcacctcaagttcaagaagcaaaagctcttattatctccctcaagtggttccttaaagaaaactttccaattcacttcatagaaacagactgtaagaacatacgctcttaattcagactctgagttggctagtatttttggaaatcttattgcctagctcagaaaacttttttctctctgcctaggcaccagaattagccatgttcgcaggactgcaaacactacagcccttaacttggccaaaaaggtgcttaagctttatgaagatgcatgatggattggggatgaagcctgtaccataccttcaattttgtctttcctttaggattacttcttctttcctct

SEQ ID NO: 187435 - DNA, 3095 bp, Cannabis indica
taaatttttgttgagactaaaactcacaaaattttaagttgtcactaaaataatttgttgtagtggtcataggattgttggtgattgggaacactttaaataggaatccattcattccttcaattagagttgattagctgtttttttgtgttatattcgatgcgtgagcatgttgcaaatattttctctcctatacgtggaaaattataattcaatatacgcgcttaagttttcttcccttgaaccctaatgtgttttcactagtcagtacgtagtcattattctgcatttagaaaagcaaaatataactttgtaaaagttaatagtaataccatctatgattattacaaagtatatatatataggccacgatgtggtttggtagctagtggatgattttgtgttgtaattacaaagtatatataataccggtcttctcaggaatggttatcttatttcttcggatatcatgtggcttgataattaaataccccagtcaatgactactacttcgagcatgctattgattatattcgaatttctctctttattcgaattatgcctacgattttcgatcggtatagtactaataataattaattgcttcattatttctttaaaaataattagtattagtaataatcctttagccacaatataattaaattgtgattaaatattcttttagtccttttccacttgagttacttgctacgacaaatattctatacgggtgattctcccacatgttatagcgtcataatatttatgttaataactgcatatttattttgatggatattgcagtaacttataaaacaactccaacatacatcatttgatttctacaacattatatatatatttaaacttgtaacatacattccgaaaaattacatgatcaaactaataaggccagtatgttaatcctagaaattaagaaagtttctcacgcgggaaagcgattcctcgtcgagggaatattacatctattttgctgaacaaaacatttattaacatatacatatctatatatgtaaatgtaagaaagcttggtcaagggaacaaaaagagccctaaacatttatatatgatatatatatatatttatacgctcctacaagcgctacacagatcgatattcgataatatactgtatatatatatgtattagctctacgatatgctgttctacgtccctatatatatatatagtacttcatcatcagtattattgtggcgtcgtactaattagtattatacgtagaccattcctagctgcaaacacaaagtcatattccgatttaattagaaatgataatccggcaaaatatttttaagtggtacttattattataattttgtttgtataattgtttgttacctagttacaggtggtgagtcacgtgttacccttaggtgtcagtaataaagagaccctgaaaaagaaattattaggagaagataattaataatcttgctatggtcgtcgtataacaaattatagaaaagaaaaaaaaaagaaagaagaaagtatatattccttctaacataattaatctcatcaagtatatcttaccctgccaccaatttcctctagaaacactattggaattatttccatttgagtcatcgtcagatccatctttcttgtactgatcattaagaaagcaatcataacactattaataccagatttaatattattttatatataccctatgtaataattaaaaaaagaacaatatatatgatcataagagaataagaaatagtgtctatattcatatatacttacgggatgttgagattcatgagtagtggtcctagtattagtagtagtcttgggagaataattttcttgaccaccatagtagatggatgaattgaaataacagggctcaactgtttcattttgatagatggaactggaatctttgcttgtcacgccactactttcaccttttctactttgatgagccacattatctgaaaaaaaaatgtcaaattaatattttgtaatattgggaaactaaatttatattcatgaatcggaatatataatacaattaatccagattctgtatattttgaccaaaagagtccgttcatatataaaagtattgccatttgagctaaattcatcaataatattcatggaagtatgaatggaatgatttttaaaaaggtagaaaaagtggattaaataatatgataattcatttttaattattattttatttttatatacaaacctgatctttcgtacttgctacctccaccttgatttccataatgatcccgcttcttctcttttgcaagcacctattttttcaaagtcaaaagaagagtgttagaaagacgcgatcgaaatgaattcacattaataaaggcacataattcaatatatatatattgtatatatattctttactaaatacacaatcgagtatagtatgatagaccaaaaaaacaaatattgtttcaaaatatatacaattaataaccctaattaataagttggttagtgttacatgcagcagtaaattaatacagctgatccattaataaatatatgctgatgtacatatcataaaaaggttgatctgtctacatttccaacttttaaacatttacaaacaaatgccgacaaaagatatggtagtctaatttcattattaatttatttatgcatataaaataaatgataaaaagggtgtgaattactcaccgttgatggaggtgggaaaatagagccaaagtacaagccagatgaggcagaagttgaagaagaagagtctttgggcccaaaaagatgatccaatgaagaggatccatgactaccactttgcttcttgttgttctccataagtgtttttttctttctttttttgggtgggtagaatggttagaagtagttggatatttatatgtgtgttgtaatgaagagtatagtatatatagtagtactagctatagcctagtgctttctttgtcaaccaacgaacaaaacgactcctattgatagagatatataaaacttttcaacggcctggttgaagagagactagtaccttgaagaatcggataaggtg

SEQ ID NO: 187436 - DNA, 2737 bp, Cannabis indica
gaataacgatattgttgtatatgttgttctcatctttcctgaatattaatgaaccttatatgtgcattctttttgttttgataggttctatgggataagaaactcaagactgttgttaataatgagagttcagatataattcgtatgtttaattccgagttcaatgctatagcagagaatcctgatatggacttatatcctccgcaattgagagcaaaaattaatgagaccaatgaatggatttatgatgcaataaataatggtgtgtataaatgtgggtttgcaaggaagcaggaaccttatgatgaggtgtaaaaaattaatgatgaagttgataattagattatttatggtttaacatatgctttttatgttttcctaataataaagtaccttactatgttttgcaggctgtgacaaagctgtatgaagctctggacaaatgtgaggagatacttgacaagcaacgttacatatgtgggaacactttgaccgaagctgatattcgattgtttgtcactttaatacgatttgatgaggtatgacaaagttatttttcagaaatcagtcaatcctgcttgaaaatcagaaaataaattttagtatcaagagaatgaagaataatgataatgcatgactaattcttaacattaatattatgctctttctgatacattacttagtcatgtcgtatgtaaaatgaaatgtcagtttttaggtacctctaaaatggttatgcaacatttttagattgaattctaaaagatgtttgttttgggagagaaatattagcttcttgagagctgggttttcaccttctttctctttttatattattcattccttgagttctgactttctagccattgtatttctacttggacttagagattaggatgtagaaaaacagatctacttctgcatagacatatatttcttatacaagataaacttattttacttctatgtttctttttcaagtgttcgtaatttcaaatgtttcatatttattaaatgacagaataatttttttcagattattcttaccattgtgtactaggactaggaatagtgaaagtttataaccttagatattgaagtttagaatatcttatttagcatcatagtgtagaatggttgagtagcttagccttatgagttttcgacaattacaggtttatgcagttcatttcaaatgcaacaagaaactgctccgcgagtacccaaacttattcaactacaccaaagacatataccaagttcctggaatgagtagcacagtcaatatggaacacatcaagagacattactatggaagccatcctacaataaacccatttggaatcattccttctgggcccaatattgactattcttctcctcatggcagagagaggttttctacttaatctgctgtgtgtttgtgcccagttttgttatgtttgttttaattgtacacctctcttaaacttcatgttttgctgtatgtgttcattatcaaaattgtatggttgctttgctatcttttcaaaagttctattgttacacatggagtttattaatagtttttccaatgtgatagaaggcttgccgctgaaacgagggaaatttaaatgagaatttgcagtaaataaccttaaataagtggatgaataagaggaaaattatttggaactttctgaaagttcaaataatttattgcattcctgcctatgataatttgaacgaaactataaatatatgataattatctatggcaaatgaaaatgatcaaacatcatccaatgattttgacggcaatcaagtattaaaacaccagaagtctatagaataaaatttgacaagtctatgaaaaaaaaaaaatacacttggaactattaaaatattcttatagttatcaagtaccatcgaagtctaataaaaattgatagttcctttataaatctcgatgaaacatcaagcctccatcgaactgaaatgtattagtttcgatgcaaagtgcagtacaaaagaaaaccataatatgttgcatttaaagtgacaattatatatgcattttgatattacccaagaaagttgatgaggatgctcttggtttttccatatgtacctgaatggagttacaaagaaaactgggttccaaatggaaatgaggggttaagggtgccttaaaatacttgatgattttattgctgcaaaagaccccaaaagaggaaaacctgctactgagaattgcaaaagaccccaaaagaagaaaacccctctttttgtatcctgctactgtttctgcagagttgccaaatcctttggtaatctttgctcttccattaatgaagttctttttttaaacaacaataataacaatggtattgaaactctgtaacttaaatcacattttagaaattccgaacttctcccaataccttatactagaatttacgcttacaaaacaatatagacgtactttagagggcgcttgttacttcaactaaaaaactgtttttatttttaaaaactaagaattgtttttcattttttatttggatgatgtagaaatacaaaaatctatataaaatatatgtattttgtagaatatgattagaaattaaaaatttagggaaataatgaagaatgaattcggtattgtccacacatgacgatgtaaggtgaaaatcagaataatataaagaaagcataattactatgtaattaaggacctaaacaaaatatttaataa

SEQ ID NO: 187437 - DNA, 9337 bp, Cannabis indica
ggaggaggggagagcctcctctcctaaatggataaaattctatcttagaatgttcgaggagccaacaaccaacaaaagcaaagtttggtgaagcaattgattcatactcaaaatgttggtcttgttgggcttcttgagacaagagtcaaggcttctaaacttggaaccttgtactctaatattttttcgggatggtgttttactagtaatatagcttggcataaaggagggagaatggtagtggcatggaatcctaattccttcttcattaacataatcaaatgtacaagccaattaatccacctacaagtaactactttggatggtaagaattttcttgttacatttgtctatgcttttaatgatgaagagggtaaaatatttttatggcaggatttaaactcacttgctactcaagatgcttgggtagttttgggagactttaatgacattttagagcaagaagaaagagtgggtagtagggtaatggatcataatctccatccttttagagattgtgtttctcactgccagttggaagacataagaagtagtggaaagttcttcacatggtgtaacaaacaacatggtgaggatcgaatatactctaaattggatagaataatggctaatgtgagctagattgatgccttcccaggagttgaagcaaattttatgaatgaaggaatgtttgatcactcagcggctctcattacatttcatcagccatcaaataatgggaagaaaccttttagatattttaaaatgtggagctctcaccctgattatgcaaaccaattgcaggaagtttggaagaagacataccagggtacgataatgtatcaacttgtggccaaattaaaagctttgaaaccaattttcaagagaatcaatcaagagggttattcagatttacaggcagcagtattaaaaactaaagaagcaatggaggaatgtcaacagaagctaactttagaccctttcaatcaggcactgcagatagaggaccaggaaaccaaaaatgctttttcctaagctcacaaagactatcagtccttcctattgcagaaagctaaaactaatcggacaatagatggggatgataatacagccatgtttcatgctagcattaaagtaaggaggaaccaaaatagaatactctccattatggatcctcaaggaaactgaattgaagaccaggctagcataatagaggtgttcctaagctactataaatagctccttggcacaaaattggcaaacagaaggaaagtcatttctagtgttcttagaaatggacccaaagtaacaagtcaacacagagacattctctagtaacagatgaagagataaagaaggccatgtttgacgtaccaggaactaaagcacccgacccagatggttactccagttattttttacaagataattggaatttagttggaggaaaaatttgcaatgctgtaaaatcttttctccaatctgggaagattttaaaagaaatcaactgcacaactctcacaatcataccaaaagtcagatgccccaatacactaggtgattttaggccaattgcttgttgcaatgtggtctataaagctccaacaaaggttatttgctccagattaaagcatatacttcctgacattgtggctcaaaatcaagggagatttgttaaaggaagattcatagcgcataacataatgatctgtcaagatcttattaggcactatgggaggcaatcgactaaggctaattgcatgatcaagcttgacttgcaaaaagcctatgacaccattgaatggggcttcctagaagaggttctaagggctctttcctgaacaatttattatgcttgtaatgaattttgtcagaaccccaaaattctctcttttcttcaatggatctctccatggattcgttgaatcaaagaggggattacgtcaggaagaccccttatcccctcttctctttgtcattggtatggagtacttgacgagaatcatgaagaaagttggcagcaaggaggggtttgctttccatgaacgatgtgaggatataaaactcaatcacctaagctttacagatgacgtattgatttaatgcagaggggattatagaagcattgttcttatgcttcaaggactgaaactcttctcggctacttcaggtttgcagccaaacaattccaaatctgcaattttctgcagcaacatggatgaacatgaggtatgctgagtgctggatgtatcaggtttttcaaggcaattcactccttttagatatcttggtgtccctatatgtgctaagaaaatatctaagcaggagtgttcggtctcgatagaaaaaatgacaactagaattcattcttggagcactaggaatatatcttttgctggtagagcagtcctcataaactctgttctttcagcaatttatgcatactggtgtcagatactcaagttaccaaaacaggttgtgcatgagattgaagctatatgtagagccttttttggaaagggcaacacatgatgcaaggaactggtttaatagcttggactattgtttgtcaatcaaaattagaaggaggatcaggttttaagaagctagcagaatggaacgtagcagctctctttaaatacgtatgggcattggcaaacaaagcagacaatctctggtttaaatggatacatagcgtgtacctcaaagaagaagaatggtggggataccaagtttcgagtcatggaagttggtattggaaacaaattgtggcagcaatagacacaatcaaaactcttactgctacacaacagtttgcacaaagcaggtaccatattttggaaggttataacttactttgtacaattcaaaacagtgtccattggtgtgatgaagtttggggaagaattaatatccccaaacacagctttatattgtggctagctgtacaaaacaggctcaagactaaagatcggcttcagaaattccaaattacttcagatgctgtttgcactctctgtttgcagcatgatgagtcaattgaacacctgctatttagatgttcttatgcacggtattgtgtggagaaaatcaaagagtggctgtcatggagaacaaaagcttatgatctacataagctcctcaagtggattcacaaaagcaaaatcagcaagtttaaaaagagggtattagctgctgccattgcccacttggtatactcgatttggtttgtaaggaatgataatttgtggaacaaacacatagaaaataaagatcgatgtaactatacaaagaattaagaatagtgtcaagcatatagtagaattagtttggccaaaaaagattggtcaagaagatagagattagtttcaaaagttgtaaaagttgtacaaaatttgatatgagatcttttttatcaaaagatgttctctcattgtaatagaatgtaaaaagtttgtggattaataataaacttgatgatttataaaaaaaaaaaaatagaaaatgttcgagatatgaacataatgcactataaaaacaccgtaatttttttctataccatcttatttatttatttttataaaaataatttcttttaacaaaacaatttaaaaagctaataaattttaaatttcttaaattataatactacatatacataaataacacacacttaggtggcaacttaattttatgatacaaaacaagccttcttcgagacaaggccaatctccacaaactgctattgcataactattcagatgatgaaaatagtaattacaattatttagcttatatatcagttctaattactcaagtctcaacactgcttgagttacaacaatggctcactctcaataactcagcttcaggatgtaatccttcagccagccggatttcccgcgttctcttttcctctgttgtgcctttgctcatgtttgttcctgaacgccgattaccccttcgttcggctcgctgttgtcttcatgagctgctctctcttcctctagtcgggccacttcttttctttgtttctaggctgcctcaacattcaattggattgggcctagtgcttgggcctcgctaacattactccccccattgaaatcgaccttctcctcaaggtcttccaatccatacatacgcagaaaatcatcaaagacttcctaagtggcatcttcgggactgcttagagaccattgaaccaacacttgctttgtaagaacattgttaatctgatgaactcgagctgcaattactgccactgggaacatgaccggtttgttggcaacacaaatctccggaagtgggaagcaagcaggtgggggtgttccgatataaggcttcaacaatgagacatggaacgttgggtgtactcggcttccttgaggcaacttcagtgtatacgggacttgacccacacaagccaggatttcaaaaggtccaaagtaacgtcgactgagttttgcattcagccgcttggccaccgtagactgtcgatacggttggagcttcaccaacactaaatccccaatctgaaactcgatatctctgcgtttcttattagcttgctggcgcatcctattctgagcttgctgtaagttggacttgagtttctgtaagatctcatccctagataacaaatcgtcttccactgcttggattgtagtcgcgcctcttgtataagaggaatggtgggtggagttctgccatagacctcttgaaacagagtcattccgatggcggagtggaagctggtgttgtaatggtactcgacccaagttaggaacttactccactttttgggatactcggctgtaaatgcccggaggtactgctccaagtaacgattggtgacttcggtctgtccgtctgtttgcgggtggtaagcggagctcatcttcaacttcgtgcccatgaactcaaacaatttccaccagaaagcactagtaaaaatagggtctcgatctgaaacaatggagcgaggcataccatggaagtgaatcgccatgtgagcaaataaattcgctactttagttgctgaatagtgtgtcggtagagccccaaagtgtgcgtacttagtgaagcggtcaatgacaaccagaatattagtgactagtgacacccaatgaattcgtcagcccaacaataaagtccatggccaaatcttcccatacacgttccggtatctcgagtggttggagcaaaccataaggtgcggtcggcgaatactttactgtttgacacaccaagcaagcagaaacgaactggcgcacctctttgcgcattccaacccaaaaaaaatttgctgccaatctgatgaatgttctatcagcccctgcgtgaccccggtaggggttgagtgaaattctgtaatcaatggttgtttgagtgcagaatgttgactgataaagagcctattccgaaagtaaaggaggccatctctgacggaatactcattattattgagctggcccagtcgaaattgatcaaggagcaatcgaacatcagggcaattggtattttcttggcgaagttcgtccagaaaatcaaaacggcaggttgtcaaagctaaatggtgggagtattctgcaatttttggctagcgagagagtgcatcggctactgaatttgtgcgaccaactttatattcaatggtaaactgaaaaccaacaagcttgccgatgaattgttgttgctctggggtttgtataacctgtgaaagtaactcacggagactcttgaggtcggttcggataataaagtgtcgacccaagagatattgccgccattttgacacagcttcaataatggctcgcatctcacggctataagcagaggcttcaaggaaacgagcgcccaactttttactgaaatatgcgagggggtgtccatcttgcatcaacactccgccaatacccacattagaggcgtcggtctcaatcacaaactgcttagtaaaatctggcagctttaaaactggtgtctctgtcattaatttttttaaaagatcaaatgtcatagtcgctgctggtgtccacttgaacttatcatgtttccgcatatcagttaatggtgctgccacagtcgcatagtggctcataaaacggtggtaataccccgtcagacctagaaatccgcagagttgcttcaatgtttttggtagaggccactgcatcatcgctgtaatcttgggcaggtctgcctgaacaccctgtgcagaaaccaaatgacccagaaattcaatttttgattgaaaaatttgacacttactagccttggcaaagaaatggttctgccgcaatagaagtaggatttgccgaagatgcgacacatgggcctcctccaagttgctgtaaaccaagatgtcgtcaaaaaaaaaaaacgataacacagtcccgcaagaagggctgaaacacatgattcatggctgcctgaaacgttgacagtgcatttgtaagaccaaagggcatcactacaaactcatagtgcccatcgtgagtgcggaaagccgtcttatggatatctctaggatccatacgtatttgatgataacatgctcgaagatccaacttagaaaaaatgacagctgcgcccaattcatcaagtagttcatcaatagttagaatagggaaccgatccttaattgttatgctattgagcgctcgataatccacacaaaaacgcgacgagccatctttctttttgactagtaacaccggcgacgaatagggactgttgggttgaatgatcccagctgttcgcatctcattcaccaattgttccataacatccttctgaaaataagggtaccggtaggggcgaacattgactggtaacaaacccggttgcaaccgtatcttatggtcgactggtcgtaaggtggcagttgtttgggttcagcaaaaacatcagaaaattccgccaaaagtccctcatccgctgctggaaaagaggcatcaaaagcccccaaatctaatgtactttcaataatcccgttcgtcacagcccggagtggaaacagtccacgaacttcacctgcccgcagcaacgttatgaactgagaataagataattggtgtggtgaagcatctcttgacctagccagcttgacaagactaccgttccaagaaaattccatcgttagttctttatggtcatgtacgcacggacccaatgtttgtaaccattgcattccgagcaccacatccaaaccatagatcgacagaatgtacaagtcaaccacaaacaaatgtccctgtaaaatcagctccacatctctacataacttcgagcagatgagaaaattatcgttacccatgtagactttgaaccgttttgttttctcccaaggtaatcgtaactgtgcagccaacgactcctgaatgagattgttattcttgccggtgtcgatcaatacttcgagcttctcatccccttgtttggcttgaatccgaaaaattcgaggattagaagaattagataaagcattcaagctaacctcatcaacctggttatcatcagcttctacgatctcctctgcttcctgtaaattcaatgtaccgtgttcgtcctctgtaccgcaaaaaaccatgacatgattcttgcacttatggccgacactgtacttttcatcgcacgtgaaacacagaccacgctcccgtttatctctcaactccgacggcgtaagccgtttaacaagcagaattgtttcggtgctcttgttgctagcaactgaatgtggacgtgaagtattggtagatgatggtggaaaactcggtcccgagctcagtggacccgagggcaacgatggcttcagtacccatccggatctcgtgttgctggtgcgagatcgagtaagcatatcgtcatttcgatcttcgaacagctgcgctttggccatcgcatcagctagatcacacggccgtgaaatcagtaattctcggcgaatctccagcttcaatccccacacaaaaaaattcaagaacatctaatctaaaactctcgtgatcttcgtcatcaactcttcaaattcttcacggaattgggaaactcgacctgtttgggtgagtttggcaatctgtcccaacgggtcatcataaatcgatgctccaaatcgaagccgcagagctcgaatgaatgcatcccaatcggcaaaaccgcccccttcgccatccattgaaactaagttgatggtgctccgtctaagtgaaaagcaaccaccgacagtctcagtaaattgtcaatccggtgaagatcaaagaatttgttgatcttatatatccagtcatccacttcggtcccgttaaatctaggtaccttaacccgcaacgatttaaggatggaattcacttcacggcactcgtgttcagcatccgaacgacttcccccagaacggtgtggcaacggaatagagctgctgttatcaactccctagcccggcgacggtggaggtgaaacctgcgacagtcgttcgtctaagagggcacgtagtttctccatttggaggttggctcgttgttccagcttgaggtcaaattctttgctcatattctggaataatagtgcaatctcctcgttcttcatcctgagaaaaaaaaatggaagtcaatgaaagcaccatgatacaaaacaagccttcttcgagacaaggccaatctccacaaactgctattgcataactattcagatgatgaaaacagtaattacaattatttagtttatatatcagttctaattactcaagtctcaacattgcttgagttacaacaatggctcactctcaataactcagcttcaggatgtaatccttcagccagccgggtttcccgcgctcttttcctctattttacctttgctcctgtttgttcctgaacgccgattaccccttcgttcggctcgctgctgtcttcatgagctgctctctcttcctctagttgggccacttcttttctttgtttcaacattcaattggattgggcctagtgcttgggctcgctaacattttaataggtgaggactttaaattaaaaaaaaaatagttaaaattatctgttaaatttgtatgtgaattatgcgtttaaatccgtaaagtgttgatgtcaaaaaaaaaaaatccgtaaagtgtttccacatattaattcctccgcagtgctccaatagaacttacaaagatggcacgtcggcctttcttttttaaaaaaaacaaagaaaaaaaaaaaaaagcatgtcggctagtcattaatcgcatgaggatatggttttctataaatgaacaaaatatagataaaaatgtcagcaaaaaaaatatagataaaaatggcaagagtacagcttt

SEQ ID NO: 187438 - DNA, 4789 bp, Cannabis indica
ggcttcgggcgcaacttgcgttattttattcaatccaatcattcttcatgttgtatttctatggtgagacttttttgaaaaaaaatactacttcgtatccaacctatattcttctaaatataaagatatattatttatccttcgctatgaactatgactggtgttggaccagccagtcattgatttcatttaagaatgaatttgacaatgagaggaagaaaggtcacctgtgcagcctgaaaccagttcattactacaatggtaagaaccacgccaaatgtgtaacccaaaaacgcactcctaaaatactggccttgtttccctctagaaacatcaaatcgcaaagccagggctacaaaaatacctgaaagatgaaatcataacaattaaatattttcggatgtagaattaattacattaacaatttgaaaggaaagctaggtaggcaacaagataccatataaagtataaacttctgttcatgcaaaactcattttccacaataaccttacggcatgtttatagtaaacaaaatcggagtaattcagtggaaaatggaatgaaaatacagaaaaatatgaattataattagcaactagaatgagacaatcatttcatgctgtttacgcaaataaaaaacataacaggaaagctttgaattgacaaaactgacattttaaataagagaataatacatactagtattttgccacaatagtttttgtcctagtattcacttcctaattttagcaagcacatgaatgaaaattattgccatataaactatacccatttaagtaaacatgctattaaagtcgggagatggcagcttgctttgtcatttaaatttccaaactgtgcaacactgtttggtgttaatttcgtaagtagggacatctgaactaatgttctttattcttggattatcaacttattttataagaaaagttagcccaaactgggttggaaccacagatctcttacccacaaccaactcaaccacatcatacattttccaaattctaatatttttaccaaaaacattattttaaaacagtaatatctttatttatggagtggtatatcctgttactactgctatgtgcatatataacagagtaacacactatggttcacggcaatagaagtccggtagaaaatagtcataatatcagcaaaagtatcataccagggatcactatgtcaccaagtccaagcatagaaaatgggcgtgtagaatcccctgtaggaaacaaaagctgcaagaggggaaaaagaggatatgccatgaaatgtaggctgtgatcagagcatcagtcatatatacctgtgtcacaaaattattagactcagttggaatacaaacctttataggagcatcgaaagacttcgcaacgctaaccataactggggtgaagaaaacccagaaaatatcatacacaaaaagtccagcctgcaaaacattagatggagaactatgaaattttaaggggggaaattgaaaagggaatatctttcgtatatttgtatcataaaatgaaaatttaaaaatgtttcctaattagctatacctgaaggtttataaatgtttttataagaaaaacttcaagttgaaaattacaacaaacttctaaaacacatactcctttctttttagttcactattcagaagatcgatatcacagcaagaaccaatgcatgatgataattacataagctaaaagttttgccaagcaagcatagcatagtaattacaaataaatttgttataattcacaagttcaatttcttaccaagaggatggcaccagtcttgaaagaccctagagaaagcatttcaattccctgcaaataacaaaaaatttaatcctatgagcacgattgttgtacgctgtctagggacatcaatgaataacaaagataataggcaaaacatagagaaaactgagggcagaggcaatagaaatagctagacagtatctgctatttgatattgaacaataaaatgataagaataaaactagaacactaaggtattcaagagacctcaaccctcccaagaacacattacaatcagcataccctcattcactacccctcactacaatgacccatatacccttctaattcctatattccaccactcctgaggtctatcaacgatgcacaataactaatagtttggacgtgaaatgaaaggaagaaaaaaatggttgaacaaaccttttcatgacacaaaagtaacagcaaatactctaaagaaaaaaaaaatacatgacaagatgattgcatattactgacagcaaaaaataaatcgtatcaaatgagtgtaaggtggcaaaacctgaatgcagaaggccaagcctaatatattattagcaagccaatgcttctgtgaagcataccatgcacagaaaaaggttccggggattgcagcaacaacctgagatcttgtgaactcaatctccaaagctgtgtaacaaaggtgtaaggaaaaatatcattctgcataatgcaagtgagataacgtcaactagatcaaattaaaatcaagtgttgtacgagctaaactatggaggcagaatcattttaaagacagcaaagatatttccaacaaggaaaaaggaaccactcaaagaagaaatgaagaatcaaaaattttcccaatcatggcaaccaaacctctaggtgattatgagatcatacttgtcgaacaagtacactccagcaaaatgcataaacacaattagccagcacaaagtacaattgacttcaacattggacagataattatttagtgtaagaattcaaaaataacaagaaaaaagattacatacagcggaaatatggaaagcgccatactataaggtcctcattccaatgcttaggtaaataacgtttgatagcaggtaacaatgttgccctgtacaaaacaaattcaatatcattaaaaccaataaaatgtttccatagtcatacaaatattacaagtaagaaatggacaaatggatactacagcaatagaacatacgagagagcaatgatcccaagaacaaagaagtagcttgtcaatacagcgttaaccaagtctttggataagaacttaaagagtaaaaatagcgatagcagcatcgcactcccaacaaaagggaagcgcatggcatgttcatttgacattgtctcctgcaccagtgaagatccaccataaaaattcaatcttgttcatgaaaacagttcacatacaagatacaacatcattgctgtacttacagtaggcggcgttggcttcaccgatcgatagcagcccacaaaaacagtgaggcaggcagttaaaacaacatttaaattaggatctaccttcacaacaaggggtgctaatgttaaacctgcagaaacattttattcttagtaagtgaaatagagtaaagaccttacataccactgagcataagagtcggaagcagactacagtaaataattttaagtttgaactattcttatcttttctaaattaaaccactcacagaccttctacaaaaacatatagtcgataaagaaacaaatgggtgcacatcatggcaccaaattccaacgatcccccacagtctaatacagttaattatgacaaggagacaaccccaccaccatattttgcataaccctatttcttataaacaatctatacatcattaagttggcaccaaatgctagaaacagttctaaatcttggcattgcactgtcgcacaaaccttactttctctcaataaggctgaagatctgcaaagattcctaggtgaaagagcgatactaatcttatttatattaacaagagataccagatcttttactttcctcccagtggcaccagtgacttacaaagcaaatataaatgcgtgattaaaataacataattaaacgtgaaaagcaaacacggcaaacctgctaaagccaaattcgctacacgctcaacgttcttcatctttagttaaaactctaaaacgaaagctttatccaaaatgacccttctccgcaatcaaaaccctacaaaggaaatgaatcaagtcgcgtcaaaactaaaaatttcccagatcacacaacaaaaccttaatcccaattcggtcataaaatatataaaaaattattgtaaaataacaagtacacacatatatttttcgaatcaatataattgcattgaagaacaactgctcctataatagcaaacgaaattatccgcgtaccagttacagcgatttccccctctcgcagatcggagaaggtaagggtagcccgaagagagagagagcgagagatagagaaatatttggggattttgataactttgcaaactttagggctttaccggaggagggaagccatggtcgagttattgagcactggagcaggttaaaagtcgtgaggacatgacggtgacgtaaggtttataactgccaataaaaaatcggttttcctcaagaaagtaaaagctgaggcatggtctgtacaacgtggcgttatattattggttagtgacgctgggatttgagaatgagctgttacgtttagtgtggctgtaattttttatccaactatgatcaaccgcaccgtattagtcagaatattgacgcgagttggatccccttaaccaagccacgtcttatgaggtttcttagccaattgtattgtgccaaatcatactatgaaaactcaaaatatctttcagctttattatttcttttttatactgttcaactttttttttgttcagtaattctttttttaagatgattgt

SEQ ID NO: 187439 - DNA, 2375 bp, Cannabis indica
ttttatattcaaatttaattatattgatgaaagcagtttaattgtattaataaaattttacataattttgcaggctatccaaccaaacaacaaataattcaattatctagtggcatgcctactatgcacacatcaaagttaccatggaatgttggtgaccttgctacacaaaagatggtgtttcatggttatcttaaagtaagtgaaagtttaaaaatgatagattggtggctttgcaatacatcttatgacatcgaaaattctgtgttttctttacttcccaagcttcttccaataggtccattaatggaaatcgaatcagctagtcatttagatactaatccaagttcacaattttgggtcgaagattcatcttgcttaagttggttggatcaacacaagcctcgctcagtcatatacattgcatttggtagtttcacaacacacgaccaaatccaatttcatgagcttgctcgtggacttgagctaactagtaggccatttctctgggttgttcgcccaggatctgtgtcaggtgagcaaaaattgggactcaactcacatggatttggaggcaatgacaatcttagaaaaataatcaattgggcccctcaacaaaaggttttaagtcatccttctattgcttgttttgtgagtcattgtggttggaactcaactattgaaggtttaagtaatggagtgcctttcttgacttggccttattttgctgatcaatatatggatgagagttatatatgtgatgtttggaaagttggaatgaagcttgtgcctaatgaaaatggaattgtcacaagtgaagaggtgaaaaataaagtggacaaattgttgtacgatgaagatatacaaagaagatctttacaattcaaagaaataatgatgaagagtatttctaaagatggtcaatcttcaaaaaacttgaacagctttgtcaaatggattaaggaggcataattattaattgggacataccctaggagtgatatcaatatgtattgcgtactaatactatcttttttttagttgaaatacttaataatcttttcttgattatcatatgatgatgatgtgattatgttgttagaaatttatttgtatgataggaaacatatatatgattattaattaatcgaatatatatgcactatgaataaaggaataaaatatttcttgacattgaatttttgagctttaatactacacaagttttgaatctgcaaaagaaaaagaaactgataagtacagtaatcggactttcaagctctctctactctctttaaatggatttactatgtttgaataatagtgagctcaaagatcgagatcctatatttatataggtgagacattccatcaaagtctctgtcacaattaatcgtcataatattttgataattaatttataaaactaaatcataaaatttgataaattgttacctgacaatatataaaatatcaaccaattaattgtgtgcagattcaataaatataaaattaatattccttgtctctcatacacgtttaaattgattttatacctaatatagaaaatattctaaaacatgtaatttcaagaaatattatgggtgtttgagttcaaactttaaaaattattttcacttttttaaattagaaaacatattttaaaaaattaatagccatgtttggccaaattttttaataataattttctgaagagttgaacatcggactggttaacttgagttttgggtaaaaaaaaaaagtgaacttgtacctgctcgttcacgtgttgcgggttgacctagtcaactattttttttaacccaaattaaatataattatttttgtctattttattaatttatgaaattaaacataacaccttaatttatattaaatgcattaattccaaatccaaagtacaaaaatcaatccaaaactaaaaaattatcaaaagtcatacattaaacttcatgtccatgataataaaaactaaaaagtctcaaaataaaatgtgaataaaaaaagtctatactctatagtccatagtccatacatacttcataataaatttgagtaatatattaaaaaaacaaaaaaaaatcaaaagtgattgggtttgcgagttgaccagttatcaaaaccaaaccctaaaattgtccgttcgtggcaccaggttaaacctgactcgcccgcattgagcgagttttttaaaatgttcgggttgaccaagttaggtccgagtgggttgaacgggtctgggtcaaacccgataaaaatgttcacccctatgttatacctaattttcgtaaaaaaaataaagtagctactctcccgtgagagtccacaagccaagagtatcttgaagacaccca

SEQ ID NO: 187440 - DNA, 1493 bp, Cannabis indica
aatttatattgtgacataaaggttacctttgcaaataaagaagacatattatttgtaattaatatgcatttataaattagtagtagctagttgtatatatatacacttactagagaagtatgagagcagactaagatttttaagccaaacagttggaagaatgactagagttgctgaaatagcgaagatttgatgagagctgagatcaaatattccttccaaactcatagagatgttgtttgagagcaccgatgtcatattgtcactgatcatggttataaactccacacaactaccctacaaaaaccaaaactattcaccttttttttatgtgtcaaacaagattaattaataatatatagttcatccgattataaaagagggcttgtagcttggaaatatgtttgaaagccaagaccaaggaggatcattgggtttcaggtgtattgaggaatagtatgtaggttctattggtaaacatgtttggtctttggcacagaaaaataacaatctttgggccgggtcaaatgagttcatgagtgtatatgaaagatacaaattggtgggattatgaaagcaagcagttggtataattggactcaaattgtgattgtgaagaataaattgaaagctaacttttctaaaaatcagctggaaaacatgaattactccattaaagaaacttgttaaagcttgttcaatagcccaagaactaagctgggggttgccaagcatttggaatcgattcagcattctaaaacattgatttatttcctggttagcagtctataacaggctaaagatagctgatcgttttcaaaagcatgggacccaaagcatgaatacttgtttcttatgtggcttcggagatggaaacacatgaacacttgttcttcaagtgtagtaggtagtgtgttaacaaattctctctaggtgtgaaattggttcaaaacatgtttcacttcaaaggaattcataattggataagaaggtcaaagaagagaagggttagaaaatgctcagtttagagagtgaggaacatatagttttgtgggaaaaaaatttacaaagtgttaatagctttattcaaaatgtaaagattgtggtgaattcatagtctgaatattgagaacataagtgatatagataaaaattggatgagaaaatttgtttgttgtaaggaggttgggtgtataggggttgtaggatgttataaatatatttgatgtacatattggtccaatacaaatcagtttatttacccccaaaaaaaaaacgattaactaataataacaacagaattaaagaataatcgaattggttggtggtcggcacttacatataactcgaagtacaaaacaatctgcataaatgaccaaaatttatccccaaaatattagtgttatttgttataaaacatacatataagaaagggaattactatataaggtaaactacaattgtgtatcttgaattcgtagaatttagtatca

SEQ ID NO: 187441 - DNA, 4973 bp, Cannabis indica
ggtttgatgaacacccctaggtgtagatgagttggagtgactagtatgactaggaattgactcatatggaaaggtaaactcatcaaacacaacatctctcgatatgtacaacctaccactagtgtcaagacacttataccctttgtaattgaggttgtaccttaggatagtacaaagtgcagatttgaattccaatttatgcttgttgtatggtctgatatttgggaaacacttacaaccaaaagtcttaaatgtagtatagtctagtttagtgttaaacaggacttttaggggtgatttgtttttaagtataggagtaggaatcctattatgaatgtaaacagcagttcgaaatgcctcatcccaaaatttaagaggtaatgaggcttgagcccattttcaacaatgtgtctgtgctttctcttagtcaacccattctgttggtgtgtagtgggacaggggtgtctatggtgaattccttgttcagttaagaactttgtgaatgatctaaattccccaccccagtctgtttgcaagactttaatagatttaacaatttgcgattcagcttcaactttaaaatataagaaggttttgaatgcattagatttttgttttagcaaatagagccaagtaaatctagagtacacatcaacaaaatggatataatattgtagccattatatgaggtgtgtgggaaggtccccaaagatcaaacataacaagttgaagaggctcacttatgacagtattggaagcttttggaaagagaaatttatgtatcttactaaggcaacaagcagtgcacacaaaaaaaggggaaattttattacttattggcatattgcaagatttgagaatagtttgtacaactttctcagaaggatgccctagtctattgtgccacaaagtaaattcattctgcacatttgaattgcatctaagacaacttgacacaatggttgttgtgttatttaaagtgacagtgtaagtactcttagtttccagggtacagaccatgctcttgggttgagactctagaaattattgaggcttgacacactgatttggactagaagagataggcccaacttgtgtggaatcaaaagtatatgggccattcttgtgcatccccatcagcaaagtagtatgagtcatctcctccttgacaaaacaaaaatcagcatgaaattgaaaataaacattattatccctggaaaacttggacacactaatcaaattcttagttattttaggaacatggaggagattgtttaagacaagtggttgagattgttgaattgtgaagatcctctaccaccatattgttgctatttgaactttttgaatgcaagattagcttccatatcaggatcttgatcattgatcattcactgtcaagttggcactagcttcaacatctttgctagtcttttcaattctagattcagaagcaaggagcaaggcttcgatctctccaactgtgtaatttttcaattcgagtgttggatgatatgatgaaagtatcatattcacttggaagccccttgaagattgcagcaacatgatcacgatcagtgagcgtttccccaacaaatgcaagaagatcaacagtttgtttgactttcaggagataatcgttgaggctcaagctccctttcttcaggttatgcagtctagtacgaaactcaaggatcttagatgagacttgtagggtgaagtgcttctcaagagcatcccagatctgtttggctgagttacaaccaaccatgcatacgcgtgaggaggctttttgtcatcgatgagagaagccaggaaaccagcaattgatcctggacctcctaatcaggatagactggattcactctgttctgtattcgataatcgtcactgagaaattcttcaggtggaggctccttgatgaattttagcagacgatttcctctgatggcagccaacacttgttgtttccacaacaagaagttgtgatcgttaagaccgatcgaaagaccgtgattgaagaacacaggttcttgatttggtcgaggtttgttcatggtggcctgagctccagtcaaagcagcattgttgctgttgtctcccaagagtagccatattagctgtgagcggagggaactgctctgataccatgttgaattgcctattgaattgtctcgccattaaagaactagaagcaagaaacaatgggaaacacaaagaaaaaaggaataagagaaaaggtagagaaaaagaattggagagaaagaagtctcgaactgttattgatgaaaagtaaagcttatataaacaagcttacaacaaacaaaacaaaataaataacaactaacaacgtctaactgaattgaaacaaactcttaacaaccatgacaactcaacactaactgtttataacagaattaactgtcttaacaaccattaattgtaacaccaagtatgaatcaataaagattaaaaaaaaaggttattctatttagggaataaacagttgccactaccaagcaactgatcgaaccttattaaattggagtgacttgcaatctgttttgtatttataattttattctcttgattagttaattaagttatgtcactaattatcattttcatttttgatcgttttgaggttattaaaacactaaaaaacaaattatacacatataaaatattgtctacagtgatagtactattaatatagagagtgcccttcaggcccctcatgcattaggtcccgctgtcctatcttctttatttttgttattgtttatatgtatcccaaacatatatattaattaaggtgtctcctttgtgcagcagaccttatttattgatatagtattattaacggtcaatacacccacacatatataaaacctagagctacacatagcaccgtatatatactgaattcatacagcgacttactcggtcaaactttgaagtattaaattaacatggaagagtagtattcaaacttgtaacttagacatggctaatgcctaaatgttataacttgcactgtatttctgtaataataatatataaactaggtacataagtcaaaatttacgactgtcatatgaccggcacttggtactagtttgatataatgtatttatacaaaaatatatatgccatatatagagaaaatgtactcatggtttgtacttaatttatattattcaacacatattcatgttatatatgtatagttaagtctacaaagataaaccgttcttgattaaaaagaatttacatatgtaatagagtttgaattgaatgagatattgccaaaagtgtatgaggacataaagtcaagaataatatatatatatattgggagtgtgtggtgtaggacatagaaattggagggataacacgtgcaaaactgacaaggttgaaatataggctttatagtgttacatctttacatgtttatggccaaacttaatcatatcgtttcttgtctaccaaccattcctgaccttccacctccagacacacgtgtgtttacagttacacacaggagtactatgctgctatacacaaatcaagagagagggaaagagagagatattgtagccaagtctaatagagggaaccttaaaagttctccaggagcagtatcagtcatcagcttggctaagggtttcacctattttgatcaggttgcatatcttctccaacaaatttgtcagttgtcacacacacatacacacacatatatatatatatatgaaattatatattctcatgcatatgatcagagcagagaagatcagccaaaactgaaaaatgtcagcacaatcagctggctcttaatggttaattccttgtcagttgtcacgtaacttttctactatttttttttccacactgacttgatcatctcatgatctttccttttttcctttttctaatttatcattctttctatttaacacacatactacttgctcaaaacagaaagttttataccatcacaattattataccaataatagtagtagtaatagtaggaaatcttatcatgcatcagagcccaacttttcaaattacaagacctacctaaagggctagcaagagggcatattgctaaagctgaccagagtatataatacatttatatatatataacttattaaagtagtgatcagtgatgaacactttcaaatgaacagaaatatatggagccatcttctaaataaatgtgagccaaagaataatgtggtggggtatatacctagtcatattatagtagaaagtagaaaggtactatataatatatttatatataacctctccggccctgagtgagtgtgatttatatatatatatatatttgtataggtacatgatatgataccatgatgtgctttctcaccatcattaattattatgtatttttataaatgatatgatttgatgtttttgttaccattattattatcttagttgagtgccaaccaactatgtcccctcgtttcagttacataatgcatttttgtgggttgttccggaacaggcgtacctattttttttgtacatttaaatacatacttgcatgtattaatttatgatcatcatatatatactacatcaatctcatcgatcgtttatatatgtaatatgctcaataatatatatgatgtgtatatatctaaataattgattgatatttgtcaaaaaaaaaaaaaaattgtaattgatatacatatataatttaatgtatgtatatttatatcctaataatagacactttagagatgaaaacaaattacaaattactatttttattaagagtatatatatattatttgctatattatagtatgcaatcagatatagaatgtaataaaactttgtttatttatatgtttgtttcgatgtatgatgggaaggagggtcatgtttggtctaattattctcaacatgtgtacaattatttcaaaatt

SEQ ID NO: 187442 - DNA, 1199 bp, Cannabis indica
tattatacaatatatattgatattaaagacgtttaagtccacaaaaataataataatcaagaaaaagaaaatcaaaagaaatatatgacaacacgtcaatatttttcttatatatatttttttatttccaccatttattatgaagacgattcgatcgctgccattactgaaatttagtatcagatctagttaaataaaagtatatttggtaataaacttataaaaataagtagattttaattaattttaatatgtaactattttttttgattaatttataaagaaaagactgaatttcataacaaatactcacaagatcattataaagacaataaatatatacatatttattcttgcacattaaataagagtaagttaaaaaatcaaactctttctttgtttacatgtacaaacaacatacataaaaactaacccaaacacattatgagataatcaaaacttgaaaaaaataatctctcctatagaaacatgaagtttcaagtaggaaaaaaaaaaaagtcactactaaacttaacaaacccatcaacaaaaaaaaaaaaagaactaactatgatcatctttattaaacaagttagaaaaattagacttccatttactcttactatgtctaggtgtgagtggtccagaagaagaagatgaagcaaccattctcattctctcaatcaaagcctcagtgttaccttgttcagacaaaatctcttccaactgtttagtgtcaatcatcaatttcaccttccaaaccccatttccgcccgagggcaacacttgcatcatacccgagttaccactcgccaaattatcaacaaactcagccgacgctgaatgagacaatgaccttttcttcttatttgtcttatcagcatcagcgtcagcagcagctatgtattcagctttcatagtattattactctttaacggaagaaggtagtagaatttcccttctactaaattctcgttttcggacaagggtgatgatccatgaccttgtttgaaaataccatatccggggtgagaattaagaacttcataagctaatttaggagatttaaactcaagaatagagcctgaatctttgaggacccttatagaggaagagttcttcttaggactatttttatcacatgaaacattggtagaagtacatgattttggagaacaattccccatttgaaaaaaaa

SEQ ID NO: 187443 - DNA, 1084 bp, Cannabis indica
ttttgtaaatttttcaaaataaatgagtcaatgagcccaggtttagcaggatcttttcaataaaatccatgggcttaaaaccagaaatgggttgggcttttgtgaatcattaagaccatatgagtatgactggtaaatatcaaagactgaagacaccaatctgatattgatgatcaagtcaagtcaatgttatatattttcatatttcgtaacagctagcagaaattcccaagtaaaccgttggagcatagtaaaataaaaacagagcatttagaaataagaatgaaaagaagtttttttttttttctttttcccttttaatataaattataaaaatggtgataatacaagggagacaaatattatataaataaatgagaaaaatggatataaaattaaggagtcctagcgtagtgaagcaccatgagatgatcagttgtagaagaagaagagtctggaagcaaagtagtcacagttggaccccatatgttatctctacttgctgcaacgtcaacatgggtagaacctgttgccctctacatctgatctctatctgtttcattttcacacgtgcacaacaaccattaatcaccattacatctttaaatacacatatacatcatcaatggcaataagtaaaaacacagatagttgacaaacaagcaaacctagtgcatctaaaatattataataactagaactttaatttccactaaatgacacatttacatgtactaaaattcaagggatttaatctaatttacaaaagaattggatacttatggattattttttaatattgaattatttaatatttattaattcttttaaataactcacaataaaatagcaaaataataataatagtaaaaaaataatagaagtccgacaaattagtcaattgcagaaaatagagaaagaacaatagtttttgataaaaaaacaagaatgcctttcattaatacccatgatttcgagagtctggatctttcctaaaagttacaaactaaaaccaaattcttcacaccaattcttttactattctttcctatatatcataccactacccccattacaattacac

SEQ ID NO: 187444 - DNA, 2117 bp, Cannabis indica
gtaaccacttgacatttacaatcactactatacaaaccaaaacataaacaagcagattaacaaatatatacatattctgttcaaaattaaggatattacaaaagaaaaacatggaaacaagagaaacacaactactcattaattctcctatttgcttaaacaatttccgctgctgctgcatggaatctgttgaaagctgaaaatgttgaaatgtaatgataagaatttgtcaaaaacgaaaaagaatgaactttgttatgacatacatagaaaattacctcgtaggaaactgcagccaactgtatcaatctgtacaatattaggtatgtgtttaattttagaccaatcattccctgttcctgtcttgcaacgaggatataacaaggtacaaccaactatggagaaattagtaagactctggggcagtccttctgctggtaagcactctagtttatccaaaagacgaagattcaatacttgaagagaggttaggtgctgaaatcctttgccgtttagagctttaacgtttccaaataattcgattgagagatttcttaaagttggaggaagcagccattcctctggaaataatgaatcatcagccaattctccaccatatttatggaatactaactctgtcaatgaggagaggttttgtaaattccatttcatgcgattttcgatcagcatatcacatgagattacatacaaagattttaatgcacaaggcaataatcccatttcagaaaatgattctacccttgaacaatcatatatgataaacatttcaaggcaaggatatgcagagtccatatgtgtagtagtacatgttgttgttggaaatatactcaccaaatcatcacaagattcaatgtagagatattccaaagatggaaaattacaaacaggtaatgccacatttaacttctcacatcttgctaaataaaataactttaaacaagggaaaatcacataattcacatccttcatttgatcatctgtattagtaaacggccaatccaacaaagtcacttcaacaagctctaatttgactaacaaggaaaatggcgcacacaacgaaataccacaacattcttcatggatatgaagaacacgtgaaattctaagatatttgagtgaacttagcaactgaaatgatagcagtgacacacaacaattgtcacacatgtttagagcaacattttccaagttacaataagatggatgtgttacccaattcgacaagcttgtaccgccataaccattgattgtgagcctcttcagatttacatgtggctgaaatgcatcaagtacttctttggctttggttgaatcatcaacttcactgttcccactcaaaataagctctgtaagatactttttgttcttcaagtcgccttccaaaacatcactcacattcttaatatactcaagccccgaaacacacaagcttccatgaaaattcttcaacttacctagctctttgattctggatccatcattttcacacaaaacaaaatcacttaatgtgtgaagatcgatgttgcaaatatttggcggcatctcttttagtgacgtttgtctaatcataagatgacgtaaattgattagcttagaaatgttggtaggcaattgggtgaggtgacaacatcctgacaatattagtgtttccaaattgtacaacagacaaactgaagtaggtaattctttgattcttgtgtaggatacatccaaatacctgagatactttaacttctcaatagaataaggcaactctgtgataccagaatcagataaagaaagtgctcttaaacgttctccttcctttattagccccatttgaagtgctaatccacttccacatgacaatggtaaagctaataggctgctcaaatgattcatgctagataagttctcaagtaccatgtcattctcgccttttgttgtatgagaaaaatagcgaatcttgctcgaaagcgtatgcaagtcttgacaattattatcatagtgaaaactacactcccctgatacatgcattgctagatcatgtatgagatcatgcatagaaagatcaaagttattatcttgcccggatctttgaaaaaatgatcttgata

SEQ ID NO: 187445 - DNA, 4236 bp, Cannabis indica
ttttttttttttttttaccaaaaatatgattttccttttgatttctctctcccctgagaaaatccaatatgggtcgagcttaatgtagggggagagtgggacattgtttgattttttggtccaattcccaatccaggtcgatctttggatttaagttttctctccccgaattcttttcttcttttaggatcgactctggtttagggatttggcatttgattatttcatgaattgatattgtttttgtttttactacaatgggttgtattagctctaagcaaccggatccaacgccgtcgccggcgatggacggtgagaattcggcgaaattggattatgagaatcggaaggaggagaaatcggatgatcgtggatgggagttgcggaaatcgaggaaggaagggtctcatggtaggaattcttttagcttcaaaatggggttttctcatcgttacgttgatgccgaactcatctctgctggttggccgccgtggctcagtaccgccgccggagaagccattcatggttggatccctcttagggctgattcttttgagaagttggagaaggtaaggaaagaaatgatttttatttattgaaggagaaaacataatacaataaagtttgaaattagaagagtcaaaacctattaaatgaaaaatatatatatttaaatgaattttttattttaagactaatttagaattttgttcttgacatgtactaaataaattttgtttccgaacttttaaggctaattctcatataaactattgagattattcgatttaaggacttttgtccaatttcgtttaatttagctaacatagtaattatccatctaccaagttgtgttctcccaatttgatatctatcatattgtgtcacttaaatttggatatataccaaatcatgttctttaaacgtttgttacgttaaatttatattggtaaattagtcaaaagtctttaaatctaacaatttaaaagcataatttgatacatattttaatttagaatgcaaaaattttaattaacttttaatattgtttgcattaattatgaaagtaaatttgaggaaaaggcatattttttacactagaaattgctattaaatttgaggccaaaccaaacccaatccaatcctacattgtttttattgattttagttttgttgggtaacttgtgaattgttgaaattcattatagatttgtaatgaataatttaattgtattattcatctgggaatgcaatgtagattggacaaggtacatacagtagtgtgttcagagctcgagaagtagaatctgggaaaatggttgcactaaagaaagtccggtttgacaattttcaaccagaaagcattaggtttatggcaagagaaatattaatcttaagaagacttgaccatccaaacatcatgaaattggagggtctcattacttctggatcatcaactagcatataccttgtgtttgaatacatggaacatgatcttgctggtctagtctcttctcctgagattaaattctctgaagctcaggttagttttttgtctgtcttctttagttatctactttgtttattttttctttgaattattcatattttcgcctattgaactttttacactaccgaattgtgctccttctgtaatatggtcagagtgagtgaggtggtggtttggcttagaggtgctgaagttgataatggggaataaaagcattgctaagtcgaagaataagggctcccaaagaactaaagaatcgacattttattttatgatcactcattttatgataaaattgagtagagtgtgacgaaaggggacacaactttgtagtgtaaaaagttcaggggtgaaattgttaattattcattttcttttaaatctgtgatgtgatggagagatctgcatttgtataggtaaaatgttatatgaggcagctattatctgcaattgagcattgccatttaagaggtataatgcatagagatattaaggtgtccaatattttggtgaacaatgaagggattttaaaactaggagattttggtttggcaaacattgttaatgcaaagaacaaacactcactaaccagccgggttgttaccttatggtatcgccctcccgaactcttgatggggtcgacgagttatggagtatctgtggatctctggagtgttggttgtgtatttgcagagctttttctaaggagacctattcttaaaggaagaactgaggtactcaaattgttatgtattttgatgcttttcatagatgtgtatggaatttcaagtttgtcatttttgtggggttcaaattacaggttgaacaattgcataaaattttcaaactctgcggttctccccccgaagaatactggaaaaaatctaagcttccacacgcgaccatgttcaaacctcaacatccttatgacagatccttaagggagagatgtaaagaattcccatctactgctgtggacttgattgaaacctttctttcggttgatcctcaagatcgcgggactgcctcttctgcacttatttctcaggtatctctattatggagagcatacttcaatagcacaagctcattattatgtcatcttcctctgttgtctcaactaatatgcttcgtctttcctattcacagtacttcagaacacaaccgtacgcctgtgatccatcaaccctgccaaaatatccaccaaacaaggaaattgatgctaaaaatcgcgaggatgtcctaaggtaattctttctgtaaaaccattttagtgtcatgagattctctggcataagaaagaggacaattcgaacgaaagaaaataacttttgttttccaattgccagaagaaagcccggagttagacagtcaggagcaacaaggaaaccaaggagagctcgtaaagcctatcaacaacagaatggagtcaataaatttgcaccaaaagaggtctctattacacacaattgtattaactaatcagctttaagctaatgtagaattggcctaaaactgtttgatttgttttttatgagcaggagacccaagaaaacgctcaaactgggcgcagaaatattgatgatgggccagttgttaaagaaaaaggaggtcatctgcgtagagagttgttcaaaccatcattcgatacagtatcagagaattaccagtaccatgattcgggtactaaccaaagcggtggagacactactttctcagggccagttccagtctcagcatcaagtggctttgcatgggctgcagcaggaacaaggcgaaaagacgatgtcacatcagcagtatcagacggttcaaagagccaattcagtgcattagacccctcattcgcaaaatccacctatgtgttaccaaagcaagggactcaagactttgcgcgaatagtaaatcccaagggtgttcgaaagcagcagcagcagcagcggagtctaagccatcaaacagagtttttcgatacacctgatttatatcactcccaagatcatgtttaccaaaagattgcttcagcaaatcatgtggtgagtaagaaaaacaaactcaattgtagttattgtgcttagtatttctggtttgaatatgaacctgtatgttgaatccatgtataggattacaatcatgggggagaccatatcgagttttcggggcctctactgatgcaaccacatagaatggatgatcatttacataagaatgagaatcaaatacggcaagctgctcgaaaaacaaggtttgaaagaggtaaaaatagataggaaaaactgaatttggctagttgaagacaatgaatgtccattatttatttaaatgtgtttattttcatttgtttttgtttgcagagaaatgacatgcagagattaatatcataaaccagatttggtccttgtacgtacgtagtagcatccaaccaaaagccattattatttgatgtaaatattttgtgtaattgatagacaaatattttgggaaccaatctatttactctcaaaaagcttttgattttttttagctcaattttaaaaaagagaagaaaaacaaaaaaagaataccatcaatcaaaattagttacattttgcttaatatatataaatatataaagaaggaatacttattattagatttgtgagtagaagttatttttatacttttcaattttattatcttattaaaaagttcactatacttcaatttgttatggttatagtgagatt

SEQ ID NO: 187446 - DNA, 6535 bp, Cannabis indica
cttccctttttataaatagggttgaaaaaactagcctctaaaggctaacattgtagtagtgttagtacatgttagttttattattattagagtacttaattaggctcccctggtatcgtatatggtcggcacaaaactacaactagtgcttatcacgtacaaagtagttgcccatattaaaatttgcaactaatatatgagatcgatggttctagagctacacttaacaaaacaaaaattcaataggaaaataataagtctggataattttctattcaacttattgaaaaagatatagacgtgcacgaattataatacatacgtatttattataattacagaaaaaaaaaatcacaaaaattatttgaagtatcgaaaatataatcaaataatttattgttcacatgtataaataggcactcaaggaaagggcaacaaatgctcgttatagaagtttctcataaggaaaaatttatttatatgttgtgtttgtgacaagttttatatgttgttttcattaaaaaaaattaaataatagaaaagaagagtttctttttttttaaatttttttttttttcttaataatccatgagtccacaaataaataaattttatgtatgtgatctcccatgaaaactcaaaacggaaaatttgatacagatccaactccaatgaataaagaaagattaaaagaagagatataagagaagatatataattatatttaagacaatataaactcttaatataaatccattaatattattattttatgttaatttcaaatatctttgtacattactcgaaaatatcatgtttttttattttttggtattgtttagcatgactttagaagagcttttagggtgtaaaagtagctaataatatgtaagttggatcatatatctttaaggaagaagaagggtagtaaaaaaataatattatatttcttttctttttaaaataataataaaataggctgattttcaattcttcaccattaaaattgagaatggatgggagatgagcattgcatgaaattttacaagttgacttatcgaaaataaaatatagatcattttagcttaataaagtaatgaagatatagagtagtctctagtgaggtgagaccatctaaaatcgtcctcagggcatgaccaataaatgttaaagaatcaaagatatgcttaattttaggagatagccactataggctattggtaaggcgagtttgatggagctgaatgcgactacatttgagttgcactattgcatctaacgattcgagttaagatctttcaagtatagataaaagaagctaagaaacaagaagattgtctttaacatctcaatcaaaaaactcatcaatgagacgaacagccgatctatatcttcagttgtcttgaaactatggtggagtaaaagtaggatcaagaaattttaaaggatgtttgcttttaatagttgcatacatacacttggtgtctctataaataaggaatgattgatgagggaggagaattggtagccaattggagccttaagctttggaggcttgagtcacccagaatgattaagaagctaatttcaatcctcccattaaaacaaaagggcatctaataccaaaaaaatttaaagaaactccaaatctacaaaagaaaatgaacacaaattagaatgggtatttaaacttttaagttttctaactctctagatggagttgctgaaatatagaaaaatgagcaacgatattggaatcaagattttttattaaaaagtagtgaatcatatcatgttaaatcaatttaattttggcaaattacttgtcttaatttatattaaatatgctaattatttttctgattcaatcaaaggtttaaatttttaataaataaaaaattaattgacgtgtcaaacttaaattagtttaacacagtatgcatagtacaccactttttaacacaggatcttgaatcacgaggttggggtcaatactatttatttatataggtaagactttttatcaatattgacatctgccacaattaattgtcaaattttttaaaaataattaaaaataaaattggtaattaacataaatataatattttttatattaatcaataaaaattgtgttaatatagtaatcctataatatatgattttgtatggtaatattctaacaaaaaaaagctcaactaaatgaaactaaatgaattgagcttttttattttaaattattatctaaatgaatgaatttacactgataaatagatggagtttttacaccactataaatttttaatttttaattaactgtacagggaagaaaaattttctaaaaatattatatattttttaaaatactgtgtactgtattaagttttcactgtctgttttattattttacagttgttttaggatgttttatcaaaagatagtacttttgtaaaaaaaaattgtgtggcagtaaaattataaatttttactcaaaatctaatattttttataaaaacccttaaatagattagtccttatatactcaagggatctatttatagcccaattgtgagaaaattaaatcttgtaaatgggcttctaatatgcagtttgcctacaattcaatatatagctggactttaactttagtatgtattcatgggctttaataagcattctttataacaaaggctaattcattctttattttatttattctgtgtgtaaatttattagttaaaactaagcaccagccacaatttgtgggcaaatacaagagttgtcaatgcatatatgagaaatcatgttaaaaattagacaatgtggaaagtattatactcatattttaagcaagtaatctggttacgacacatgtaagaaagttggaaatgaaccagctcggactataaaaaaataaatacacacaatcacttgcctcaaaaaataaaattagtaaatataattaaacctctctttttaaaaataaaagcaagctgaaaataacaactactatcttataagaccagcgagatgaacaatcaatgtcgaaggtccatcttaggatacatagagtatacaatagaacgacagttagttggaaagagtaaataatgaattctttatgagttttcaacttaataacccacatacttgtgagtatgttgaaagactaaaggatgtacacaaaacgcgatttatctcagaataatcgcaaatgatacaggatgacagcatctcgctttgatatactcgatcagttacaacattacagaagagtgtgagaagcatttctaaagatcatacttagggatgaaaattgtcttcaaggtaaatatcataagatgatcctcaatactgtgagatgtagaagtttaatcaacataaccgtgtttagataaagcaagagcagttatagcaattatttgttttatttcatgtgttgcaaatatgaaatgtgagaattattcatgtttgatgaacagttacgaggataagatcctaagagaataactgttaccccaaaacacttataaatagaggaggatctcccaaaatgcgacacgaccaaattgagaattatagagaacaatttaaatattgtatcatgtattctataaaaaactcatcaaatcctaataataagatgaactcgtgaatatgaagaattatcttcaaaactacgtaaaaaaaccttcttgttttcatatatatatgtatattattgctattactatttattattattattcttatgtttatttactaaattaaggctcatttattggttaacaaaaattagcgttaacagtttggtgctttcattaagagtctcgtaaaaaactcaaaaaacgcaccttccttgagtaatatttaaacttttccttttttctccattcatgtctgaggattcccctcaaaatgatgacactcagtcgagaaaacaactcaatgtcctcagaaagaacaccagaattcccagagaacaaatacgactaagatcccgcgctcgggaaggggaaataatgaaggaggttttgaacaaacgagagatgaaatccttgaaagacatagtcaggatgcgtacgatcctacaagatatatatgtgctattggtggagttagaaaacagccaactccgatagagattgatagaatcaatcagagaaatattaagttggaatgcagactagggttggaagagcagcacacagtgatgcaccccctaaccaatccactaagcgaccacgaggaagatttagaggatcgagaaccgggaggaatgaggaagcttctagagataataaccacaaaattcccacaaatcctcaggatgatcaaccagagaatatgaggaatatcctagtggacacaggaggtccccaaaatccaagaaacactaacaatagggaaactcaaccaaatgatctaggaacttcacgtggtaacattaatcatgggaatgtacaacctgacaatctagaggtatcccgtatgaatggagataccagacaaacacgacatggcaactgaggattcacccaacataatgcgaggaatccaaggggacatcccaggtcagggcatccaccgagacactggcaaaggccaaaacaaaacaaataagatagcatgtatacctactttgagtagggaccatgtatcaaatctctttcaaagacgaaggcctacacgagaagatcctcaagaaacggaatcaagtactggcccaagtgggtcaaggacacgtggtcaaagtagatacactaggtcgcatgcacgagaaaggcaaacacgaagagaggaaagtatttgttgccattatcatgatgaacaagagaacatgagtaattcgtaaagttttcaatctaaaagtctcccaacaacaagattagttagtaattatgattgaaaggatggaaggcgacgtgatcttgatcttcatgaacacttaaatcgtacacaacccgacttatgtgagcatctgaaccacaatgttctagatctatgggatcgattgaattagaacacaacaaatcaacaacaacaagtcgagcaattggtcatgaattgaaggaaagaagggtaacccaccagctaatggtaaccatagaagaaaaaaatgcggtatgcaagatgaaagacttggatcctaggattcaagatgaacacaatcaactcaagtcaattgaagagttataagaagtgaatttagacccaaacgatccaaccaagtatgttaacattggaaagggtttagggaagaacttaaataataattaatcgtattcttgaaggcaaactaggaccaatttgcttggagccattcagatatggttaggatcagtatcgacccaaatgtgatttgtcaccatctcaacatagatatctcatacccacgaaagcaccaaaaagtatgtcctttagatcccaagcgacagaatgctttgaagggagaggttgacaagttgttaaccaataacttcattacagaagcattttattccacatggatcgtgaatcctgttcttgttccaaagctgaatgaaacatggagaacctgcatagacttctctgacctgaataaagcgtgttcaaaagattgctttcaattaccaaagattgatcagttagtcgacgtgacagtagaatatgagctggtgacctctatggaagcatatttcggttacaaccaaataaaaatgcatgttctagattaagaacacaagttttgttatcaatatggggttatactattacaaggttatgcctttgagactcaaaaatgctagagcaacgtaccaacacctcgtaaatggtatgttcaaaaaccagataggtcggaacatgaaagtatatgtgaacaatatgttagtaaaattaatcaagaatgaggaccatgcaaaagacctcacagaatgcttcttaatattgaaaaaattttgaagttaaacaccaaaaaatgctcatttaggatttagggaaccttcttagttttatagttaacgcaaaaggaattgaaactacctctgagaagataaaagcactgttggaaaggtgaatgctgggttggattgacgaggttgctcgaaagttggggcttggtgcaacaatccatgaccgccatggtcttcgtttagcttttgcagcgtctctagttcaaggaatcttatctcctttgttggcagaagttttggctatccctcatggtcttcaactatgctttagattggatttcatagagacagaagtggaaagtgactcccaatgaatcattcttacattgaataaaaagatgtgttgcttgatgagtttggaaccattttacaagatatttactccattaaagatagtgttagagtgcttaattccaacttgcttataacttagctaaacttgttcaagtttaatggtcgagtttaccaaattgtatttgaatttttcattgcttttcaatgagaatctcttttttttttttattttaattcttggtgaaaattatgagtgccacgtgtccatcgagtagttaagagttaga

SEQ ID NO: 187447 - DNA, 893 bp, Cannabis indica
atatatatataccggtacctgtgttaataattgtaaagaaagagtgtatgaaatgtactacttgaatataccaggtagcaaagctagtaatgctgctgagttgttcgagaaggtttcacagaatgtgaaggtgaagcgttacagtgaggctcttgatgaccttaatgctgcaattgaggcagacccaactctttcagaagcctattttcaccgggcatcaattcttcgacagctatgcaggttcatcctctgctgttactatgataatgtttagttagaagcttctttattcaactattatgtttctgagttcatttggtttttattttctcatcccattgtgattttctatggttggatgttaattatagactggacacatctaccattacaacatctgacataccatctgatacttctcccaaaaaaaaaaacctttataaagagaagaataactttgcaagagaagaaggaaaattattgaaaaccaacttgtcatcctaacaccgaaaattcaatgatatgattaaatgaactttaaaattagcaccttgtctttaaaagcaaaaaattaattatacgaaagagtatattgtattggaagtttatttacagtatacaaagcaatttattttcctgaaatagaaaacatgagtcattcagcgtttactagttctgttcacattgttctccttactttttagcttcaacggctgcccaccattgacaatcaatgataattgttcatgttcactgtaattctcaagttagtttattcttcactttcgtcgttattagtaaaatgagtgagagaaaatattttaagattacaaaagaaatgtcttatttcaggttttttagatagctcgctttctctcatctctctctctctc

SEQ ID NO: 187448 - DNA, 3381 bp, Cannabis indica
gagagagagagagagaggagaggcatacctttatgggcatcgttcatgtcggaacatgcgatgagcaagtaagtactgagtagtaccacttgaatcgtcatcgtttcagtctgaactggtggatttggttcactcttgagctctgttccggtgctgaaaaaaccctaggtccgtgttctcttccgacccttgaatttttcagttgttgactcaactctgcgattgaatttgtacgcatttttaccatagtttgtcatgactttgtctactatgaagctttgttcatgaaaagcgaatacaagttttgtccatatttctctctttatatatctatttatgaaatatcattcttcaactacagagggacttgatatgatcatgacgattatatttagtatagttggaaattgaagaattagaattttggttcgatgtaaattgaaacttgggatttttattttttttaagctcttttcaattatattcatattggaatttattgtgtggtagggacaataaattcaagttagggtacaatagaagagaatgcaattttattgttaatatttaaatttgttattaaaaatatgattaaggaaaaacgattttcgcatcagtagtctaaaatctaaggtgttaaggttctccaagtgggttgtgattgttatggcaagagcagcgaaagaaggtggttgtgattttgttaatgtgaaaggaaaacaaaatcttgaattctacttggagatttttttttttcagtcggatgtccattttctgctataaattaggaactgcattatgtctctctctagagtccgatggggaaaaaaatgaggtgttgacattcagagttagctgatcatggtgtaggaggaatgtaaacatgaggtcgggacaatgctgtatgaattgggttgaaatatagtgaaattatggacatagcagagagtttctagagtagatttcttttaaagtttttcaaggagaatttgtaggatgaatttgagagagtgcgttcatttgaactttgtagaaaggtaagagctgtcagctgacacgacacattaatattagtgcaggaatgatgttaagggctatagaattgagattctttacatgattgaggatgaaaactagtagtatgtagaggaacctaattatcaggagaagttgaaaattatgtattgactgtagaaccaactaactttagaaaattgtatttttattttatttttttttctacagtaatgttcattccttattcattgttaattaattaagctttttatggtaaacttgttatttcggagtatcgtatttaattctggcttccgttttattttagtactgtcctaatcactgctttttttcttgtaggttttatatgtatttgctatttaaaggcttggttttcttcttttgaacttggatcatatgtttggccatttagtttgattttatcatacaagggcagagttactagttcagagttggatgatcacttttgtgaagattctagagtagagtttaatgacttaattccaattttattgcctccctagtaaagtgtttgggatcatatttctctttatggcctcataccttttctgattgtgtttactgctggttcgattacctcgatcaaaagttaactgatttcagatttatggttgatagatctgattcgagctgttattagctggtatctaatgttttgagatccatttggctttagaatggttcaattgataaagaaacgtcttgatgaagtcattgggttcatctgctttgtaatgaactaaaagaaaatgctactgattttgaacaaattgtgcattatattgaagcctgcctccttggaaaacgttgtatttatgctatctggaaaacacagtagcaaagtgggtcttaacgttgttatatagaataaagcatggagtatatttcagagaagaaattcccgcttgatgcaaatgattataaattatatgaagaagttggtgaaggtgtcagtgcttctgtatacagagcactctgcgttccacttaatgaaactgttgcaatcaaggttcttgatctggagaagtgtaacaatgatctggtatgtatgcctccttttaactctggatgttcatgtgttttttcaaatatgtcttggattgttctttttgatttttaacaacatttagtctttaaaatttatctttttatatttgattagtttatgcatctatacatgtcatatattgatgtatgattatgttgttgaaatatatgtttcaataaaactgtaattcagattcttattagagaaaagtaaaaatagtcaaaaatatactccatgttagtgatgctctcaatctgtagtgttattctcttcatgttgagttaatcttaaatgtgaggataatagttaaattcagctttttgagcatcatattttaagtctttagctttacaactatttgtctgtctgtagacttgtccatgattttgtgatcttcggttaaattcaacattttgaacattatttttcaactctttagctttactgttatatttctgttgatttgtccatgattttgtgaattttgttatattcagctttttgaacattatttttcaagtctttagctttactactacatgtctttagactctgatgacttgtccatgattttgtgatcattggctcaagaatgttaatttgtatctgttccattcttattttgctattcaggacggtattcggcgagaggtacaaatgatgaacttgattgatcatccaaatcttttgcgggcacattgctctttcaccactggccaccacctttgggttgtgatgccatatatggctggggggtcatgcttgcatataatgaaatcttcatttcctgagggttttgaggagactgttattgctacattattgcgtgaagttctcaaagctttggtttatcttcatgctcatggtcacattcatagagatgtgaaggtatcatttcatgatgtgctgaacttttatttatccatggcttattattattatttattatgttttttttttgtcgcgggaggggagtaattgcaggttagatgttataataactattgtttttaagtgtctaaatggtatggttggcttctttcacacaagttatttgaagaataacattaaataagtattttgaggtgaatttattaaaataataataatcacggtcacagagctgatctaattagtgcttttgaagggagtatttttaaagatttctattacctgtaggagtcttagaactattaacactttagtatttttaaagatatgcttaaggatatttttgtcttatatgaatgctggccttagtttaggaatgggtt

SEQ ID NO: 187449 - DNA, 1336 bp, Cannabis indica
aatatacaagttatatgtaaaccttggaaggaaggagatatggggtttaggaagctattgcaatgaaataaagcggttctcagaaaatacgggtgggcagtagctactaaataagacacacttcgaattaaatgggtgtataatatgtacattaaaagtgagaataggtagaagtacagatctactccacaaagtagttggtattggcgccaaattttgcaagtaaaggaggaattcagaaagattattggcctccatttgtgatatgtagatatacaatcaaaaaaggatatgaagcattcgttcctcaacaagaagcaaagacatggtatggtgaagtttagggtcgatttatcatcccaaagcaaaagttcatcatttggttggttgtgataaataggctacaacaagagatctttatttcggttcaatttcattgataatgaagattgcttgatttgtgtgcaacaaaaagaaacaaatgagcccattaggcgaagctaagctgccaaaatagaaaagtgaatgaactaatcaggcagttcaacgaaagggtcgtgtccaaagtggaagaaccaccactcataagagacccccttcgaggaaagagtccctatgtcccagacggaattcaatggcctatgggtcatgggcacaccttgcggccagtgggaccaactgcgtcccaaacaaggtcggctcaccagtagcacaatgatgatcaaatcttgcccgaaagggcatatggaagactaaacaaagtcaggccctgcccagagatgaagagataagggaagacattccaccaaggcaaggccggagtaggtcccatagtggggagtcttacaccaatctcaatgagaacattgccactagtcaccatagtggtgagcgcactaacccgagaactcataataatattgggtacaataacgacattccaccctggaatgctcaaacacattctgaccctatgcccaggaactctgtgtaaatgagtggggtccaagagttgatggatacctttcgaatgagttaaaccaaaggagagctaattgggatacaaatgatgcaccccaaaataaccaactccttatcaacccaccagtaaagttggtcggcagagggttggcaggacatgggttagcaggacaagggttaactcagacaagggctggtcgaagtggaacgttttgtgcaagaacagttggatcaactcaagaacctgatacaaggcctgttcaacccaaagttgtccgacttggaacttgacaaaactcgaagatcaccttttttttgcacatatcaacaaaaagaaactggtttcttcatcgag

SEQ ID NO: 187450 - DNA, 1783 bp, Cannabis indica
gccgttgtccaacacaatctgcacattaataaaatacatatatatatatatataattgtccaaatttacacaaatatattatatgtatgtaataataataataataataataataataataataataggaaaaatcatgttacatatttatcaaggatattcaacgtcacgggctgaagagcaagattggagtagtcgttgtttgctgattgatctattgttgtatcggtcacgagcttatcacgtgactgatgagtagtactgctcataaatacgataataataagaatgtttataatcacatgatgatgactatttgccccatttgatcttctttgaaaattcatcatcatatgtgaatatttagccttaatttagagaccagagtctctaatcactgattatattacacacaaatctagagccttttctttttgtttttattatatatatatatataggatcaggaattattaatatgagaaagatatcctgttcactaatatttattctgtcatcttatatatatatatagtagtttcttatatataataaaaatcaataaatccctctacatatatgggtgaacctagagctacataggtagacaaaccaataatttgttaatttgttttgaaatatagtttaattgttcgcttcacgtaaaaaattgatcagacattatcattttattgactaattaattaattatttcataactgattaaaaaccaagattgatttatatgcatagttatcttaattatattaggcctaattgactacaaaatattttgagaacctattcagagtatgttttcgggttcgatttcttcttctgtttttaactaatcgatatgtatatatagaagttattaatttttcttcttctgtttaattctatatatatgtgtattaataaaatcgtatatgcagatttatatagattgtgcactgaataattactgttattcatatatattgttactaaagtttatttcaatgttcgagatttcttatttattatagttattatttttaggaaaaaaaaagatatttcaatatgtaattcagattttcttaagataatctattagtgtattactcttacaattaaggtcctaattaattaattttagattttctgtgttcacctttttttttccctttttctttacgtgtacacaatatattatatattgcattagcatttagaaaagatttcttaaacaatttcaattttcttaacttcccgattaacatgattatctgtcattgaataaaataattaaaaaaaaatatcaattttataatgaatattaattagccgcatattttaattctaattttagatatgttgcattcaacatttacttgttttatacaacacaattgctcatcatctcaatttattatagagataatagtatcagtgataataagatctccttcccttacacaaaaaataaaaataaaataagatctcttccatattcacaaaaggatgaaataatcttcatgtaacgatggaattcattattttaaaatctcttccggccgaaactataaaatgtgactataagacttaaccttggtttaacatttttcttttgtgaattttaataaaatataactattatttaacaaaatattcataataattttttaataaataaatattatttcattattttaagttcaattttaatgtataagatatatcgtaaaaaaatgattaaaaaatttataaaattttgtaaaatagttttgtaggaattttaaga

SEQ ID NO: 187451 - DNA, 2127 bp, Cannabis indica
gcatagtatatagtattctatgctttcagataaattagttgtgtgatcgaatgcaatttgtctataattttttgtcatctagtgtgttaggtcttccaaaatttgtcttaatgatatttagaaaataaggatgattattcattaaaaaaaatttaattcatgcaacactaacgcactcaacagttaatgatgtatacactatagttgaatacaatgaccttattttcaatttattagaagaataaaatattttattaattaagaagagatatcgcttaattaaaatctatatttatcttatttcttaatcagtgttgatggaaaaatttggcaaatactctctcactagattggtgagtggaaatataagtttgagtaaggaaacagagagacacaggaatttataaaagttcactccctgtgtcgtgacgataatgaagctacatctattttgagttttaatttctggcgagaattacaaaaaaattggctaagttaagagctctaatttctagagagaaagtagagagagatgctctgaccttatggacaattaaaagaatgttccaaatgaactagaggagctctccttttataagaaaaatatcctatcaaaatattaataaaataatacaaaaaatatgaaaaattccctttgggttgatgttgtccattaatgatgatctaatggtcaaaaatgactcttgattaaaatcatcaatttttcagagtttgaattttgcccgttggatcattttcggataatctgtagaaaaaattacacttggaaaaatttgggaacaagttttggacttgaaatccttcgaattgcgatatgagtgtgagacatgacatgaaagatatttggaagagatttaaaatgcaagctgaatcacatcaatcggatcaatgttgagggagttattgtcattttacagaaggatgttcatcacccaacgccgaggttgacatcctagcgcccaggttgacatccagcgcccatgttgacatcttgacatcaaattagacattgggtaagtgaaaaaatatcccagacttatattgttttgatgcctaagtgatatgttgacatcacttagttagattttttatagtagtgaagatgttcactagttgtcagagatgtcactttttggtgaaatcagctagactcaaaacttcttgattttgtttatattctaccttgttgaaagggtgaaatataaaagtgtgaatttgatctgtcataagtcgtggtctcatttactacaaaataagtagtcagatgctcgagatagaatcaaaatctaataagcagagcccaatgcaccagaccatacatcaatctgggcgctaggtgcttcccgagtggcttcctaaggctcatttggatacttataaaaattacacttgtgcacagaagagtgtcctaccctatttatgatcaaaataagaagagtgtccaaagcaaaaaatttgtttgaggagcggaaacatgcgaaccaagttgcatgtcaacttgtgcacagagcccaatgtccatgtcaacctagacagtgggtccctgtttctaacctctggcgatctcattttctccctaagatcacttgtatctttatctttttgaaaacaaaatagatgcccaaaacactttttgggaaaaatgtctggaaatatcccaggttgacaaaatgtcaataggggcaataggcccaacattagtgtcaacctgggcgttgggttcaaatttcttccaccgaattgttttgtttgattcttgaaaatacttgtatctcagttatttttgaaaatggagaatatgcccgaaagacttctcaaaaaaactgattggaagtaatcgaggttaacaaaacgtcaacttgagcactaggcccagtgcctaagtcaaccttggcactaggccccaaatctcgctcccaaatgactctgtttatttcccaaaagcaaccaattattacttattaacaaaaatggagaatattcctgaaagaattcttatgaactgctgttgagaatggcctaggttgacaaagtgtcaacctgggcgcttggcccaacatctaggtcaacctaggcgctgtcccagttttggcctctaggtctatc

SEQ ID NO: 187452 - DNA, 2922 bp, Cannabis indica
tttttttttttaaaagaaaaactgtcaactgacgtcgaagcaaatattatttgcttacgtggcaattttctattagtgaattcttttagacctaagcaaggagaaaagatttggctccagagaataagttaagctctgtttctctctttaattcgtttcaggcaaaaagagggaaattccagggcggagaggttttgagctctgtaagaatgaagctttagctttaatggaggggaaaagacaaaacgccttaccttttaagctttagagagagaagtttccactgtcaaaaacttgttaggaatggagaatagtagcagcaccagcagtatcactaacaatggcgttttagttgcgaatcagaaaaagccaagtgagggaatccgattggagaatccatttactttgaaagtgggtcaagtatttactggctttggctttggttgcggtattggtatcggcgtgggtcgccccataaatctcggtactgccttttctcgttgttcagttctaattctttccgcttatctttttctctcagaagatatagttttatttaataatggattttcggaagctctttaaatccaaagatggtgaaacccatttgaaaccagatgctaagacaccatgtacttcacttttctctgttaaattttgtatctttagactgtacgcagccgattttgtggctaaagagtataattttttttcttcgaaagtgtttgtagatatataatgacagtgacaatttttgagatttttgttattttcaaattagaatttgattattatggtggtattcattgttctgatgaattggattaaccgtgtgccaggttctattcctgtattgaatgaagttatgagtgctgcaagaggtgcaacatatgcattttctggtgctaccagacatgtaaacgactcagtaagtcaaatttgtgttgttatttgtttttctttttgaataggcaaacctctttgcttctatgactcgaaatcgggaaatgaaaatggtaatcaaaagctttaacactaacaatatctctttttcttcaagtttaagaagattggagctaagaacgttcaagctggcgtaggatgtggagttggttttggccatggttttggaattggtatgtaatgattaagtatattttaggaaccaattattgatacaactttcctcttaaaataatagtttgtcttaaacattgtcctcacatggcaggccttgctttgaaaccgaccgcattgcagaaaattcaggtttcttttgctgtaagtattatcttctcttatgtgtaatgcggcttattaatcattagctaatcatagacctgaaaatagagttaaaaatatttgctagctagccatgtcaaaggtgatgacgaagttgggtcttggttcccaattaccttttggtcaaggagtccttccaagctcattgcaaggaggtatgagcttgctgaataattcttcaagccaaaatccaatgggaagtatcatgcagttggcaacacaagtaccagacaatgcatctcaaggcctgactggatatgaaagtaaaagtaaagattcaagttatgcaattacttcatcgaaaaacccttcaattgaaacaccctatggtagtaggacagaaaaggttctcagcaattttctacagaatccagttctgaagggagagacaagtgaactaaaagaagtggtatgttatatatatggatggaacaatatcactaattattgttagcttttgtgtattgcacacttctgcctgttttaaaaggtttccatgtgttattgcttagaatgttttttgtttattttcagtttttaaccttctgttagactccaggattagtaggagagggtatatgagttattgtattagggtagtgattgggagggaataggacagtatagatagaagaatagggggagagtgatagtatgcaagaattgagtattactctttgcatcacaggggcctaaaggctccaatagtttgtaaccttcttcctctagttcaataatgctcacttatattttttactgtttggctactattctattggttttcttgagttcagagcatcacttcacatcactttcttcagtctataattcgttatggtttggctggaaatgttaccaaccaaacttcacctcatagaaatcgcctttactatttttcttttttgttaaaaaaaaaatgtaattgtatttattttgtgctattttagaaccacactgatagatggaacactgatttgtgaacaaattctcacaatattttcgttgtgtgtctgtcatccaattgataactataactgctattactatattactggaagaaaattatacatcttttcttgaaaaggctgttcagacctgttgattttttatcgattgcctgctcacaaacttttggaaacgtctgaacaatttctgaaaattatagaaataggtgatgtcttctgttcgttaccagggattgtagcatcgattagttatatagtcttgagaaatgattgagcatcctgaaaacaacttgctcccctcaacaaggcagattaaacacttttttcatttcagctccacaataaagaatagagatcctgcatggattgcatatgcttttcttgggttttctagtaatgaatgtgtatgtttcagtatgtcatgacactatatgacaatgttgcacaccgattaaagcatttgtttccggagagtagagggagtattgtagagtatctttactgatcatcacatccttgattgatttctgggattataatgtatgattttgtattttgtaggatggccggcaaaggacagaaaacaccatgcttcacatggtaatcttcaatgcaaaacaattgatagcttagattctgatatgattatggtctc

SEQ ID NO: 187453 - DNA, 837 bp, Cannabis indica
ctcaaaaaaaaaaaaaaaaaaaaaagagaacatattggatcagtaatcatggaacgagtggataacgtgaagaaataggttacctcacaaatgtaagagcatttcttgtggaaataaagaaataaagatcattaggcataagaaaattattatttgctgtgatcatgacgttgtcatgtataatatagaatttgcttatttgttgtggctatggatattattcttaatgatagtttatgaatattaggttgatgtcattgtgattattctgaatttgtttcatttaggaatggaatttggtggtaatagtcaagtattgggcaagttaaaaaaggaaatagacatacatagatgaaccattttatatttgtttaaaaatattaaattagaataatttttcatatttagctgaaccaataataatatattctaatgctattatattttaatattttctacaagtcacatattgaatacgtctaaaattcaaatatagtttactgaaccaattacattttcataaacatgttttcagacactaaattcagatttttatttcaaaatcagtaattacagttttccatcatgaaccaatctagattctataaactacaaaagaaaaaaaaacccgttttcagtactcatttctataaatagaattttgaaaactgaaaacagaacaatgccaaacagtcctattttctattttctatgttctcattgttctactttgagtaatgattcactgtagccctattagctgaagaagggcttggtaaatattacaattcaccctagttaggatctgttccaattttacgacactttttttttttt

SEQ ID NO: 187454 - DNA, 1882 bp, Cannabis indica
aaaaaaaaatagaagaaaataattaactaatgttgcccacgtggatgtacacatggcgccacttggatttgcaacatcaccatagatatgatccgacgacgcagatcgagcgaattcgtgtggaatctaaagaaaaagtgtgggaaactgataacggtcacgttccctccagatatcaacaaaagcgaggtccacgtcatcacgcgccactaatcaaccaaccaaaataagccacgtgtcataagtgtttaaaatatgattgcttccaaggaattcttttcttcttcgactctcctaatttgaaacggagtagaattcattgtcttctccacaaaactccatcaaattctttccgttttctagggtttcaagcagaaccagcaatttcaatggaggtttccgggttccttcctcgacgtgtgtcttgcttttccggcgttgctaccaccgccgttcaatcctccaatccgtcggttagggttccggatcatcgagtttctggggtttcgttcggactcagaagcactccctcggttttaaagagtgggttttgcgatttgggtcatttggagtattattccaaagctacaattaggtgtggtggtggtgagaagaagaagaagaagaaggataagaaggacaaggttaaggaaaagggctatggtgtacgaaccattgagaagaaattgaacttgcttgaggcgttgtccatctccaacaacttcaacgcttcttctgatatggatcatcaagttcagaacaacttgatttcggtatgactatctatgctattgatttttaatcttctcttgaaattgtcctgttttattgatttattgtatatattaatgacttaattaggaattgaacactttatttgggtttagattgaagtaaattgcttagttaattaagacaatttattggtgattcatataattcagatatagaatgatgtatgtttgattatactacttcagaatagcaattcaacacttaattgggtttagattgaagtaaattggttagaggctgatgatgagttttatgctcaatttgcaggaagctgcaaatggattgcttacccaacttgaacagctaaaagcagaggagaaggaattgaagagaaagaggaaagaagtgaaagccaagctaaaagctgaacgaatggcaagcatgatggatagtgaatcatcatcatcatcatcatcaagtgacagcgaatgtgatgaggtggttgacatgaaccaactgaggaatgaacctatttctcagctagtccaagataatgacttgccaccgatgcctgaagactcactgaaactgttgctgtccctttcgagttcagtaactacaaattcaaccgatgatgctttgattcgcaaaggcgtaagtgaacttggcaggccaagtactagtagctgtggcagtattgggaaggtggtggaggtttgcatggggaataagtgcaagaagtcaggaagtgcagctttagtcgaagaattcgagagagtgatgggcgctgagggagctgttgtggggtgcaaatgcatgggcaaatgcaaatctggtcctaatgttagagttgttaacagggctgctgatgaatctgttagaagtgtagccaatcctctctgtattggagttggtttggaggatgtaaatcatattgtggctaatttatttagagatgagaccaatgatttggggttggctgcatcagtttagactttagaactagatgaatgtgaatagagaaatagatgtttccttcaaaaacttccatatttattcaagaaatttttttattttagatttgctagtgtagttacaatatgcaaactttggcccttgtttttttttttttaatttaatctacaac

SEQ ID NO: 187455 - DNA, 2301 bp, Cannabis indica
aagcatctcaaagttattactaattatggtaatcctgaaagaatatcggatttgaaggagtcgttgatgtggatttcgccttctttagaaacattgtctattaatgaaaaacgtatattttagtttaagaatgactgtcgttttttagttttagaaaatggtactgttttccgttatgagattctgtttattttattagtagccttgtactgatgatgaacttgactactttactttaaatatgaatgagatatttctttcttatgttttattgtgaactggttgatattgtcttactcattaattattattctatgatgagtatgtagtataaagaagagaacaattggcataatgtatggattctcattcctgagcaaggggaaataagtcttcacaaaataaaagtgagggaagaaatgaatttaaggcaaccgataaaccttttatattgttcaactgtctcttcttgtttttgtaaggaactcctgaagatgtaaaacaagaaaatttctggaatatgtacaggagacgcctttgccttcgatttatggtgagatcatcccttttctgctaagccaagtaaggtattatcatgctatacttctgtctaggtgtgatgagaattattaaaatttctgtttatttgatccaaagttttgattggtgatcattggtagtattagtctctgtatttgtatgagtttatgctagaaattcgtacctagaggaataactcttggatcttatgaatgtgctggtcaaaacaataatctgatcctgtgaccttcactttgattaagattatcatcagacctaatgtcttgttgttgggcaacagagtgtatataagaacttatacatacattatttgtataagtgaaagtgtttctttaatacataaaattacaaaaaaagcattgatttcataataaaatatgaaaaagatgtgatggattgaattctagaataccagctatttgggatattttggaagttatttgctatagtttttgggaagaaaagatttgaattaaatatattatgaacacattcaattagcttgaataatagcttatgacagcaaaattattggtttttatagattaacgaattgaaactttctggtgattctctgtgcagttaagctatgatcatatggcggtaacctctacattagcgtcgggcgcccgcgttatgttctagtttctaggttgttacagtgccccgcattatgctctattttctaggttgttacagtgttgttgctggtcttcgagctgccaaggacatagccgaagcctgaaaacaacccttgaacccgactcttgttaaatactttttttttttttgaaattaaaacgtgcattgatagataaaattagacctcacggtcattacaaaagatgtttactggaataaaggatacatataaacaaccatactgattgtgggtaaaagtccactttgccacattatgagttataaatttacaagttttaccaatactagaaaataaacaactaacaaactaaggagatattctttagcaaaaggcagagtagttcataatctctcttttagcctccatgctattgagaatattgatcactgttttagagttgctctccacaataatgaaattgcaacttttaacttttgccgtgtctagtcccaaacaacatgtaactgtctcgccacaaagagcatcagaaaaatctaattttgctgtgcttaccgaagccaactcactttcgtttttggctcccacaagactttttctcaactcaacttgttttgtatcatgatttttacaggctcacaccatggagagctataaagattgttatttcttttcttgtttgtttaagggttctagctaaatatttaataataagaacaaaaaagatataaataagagcttataatattgcataataattaaatatattacattatataaattatatgaatagacgtaattatagtataatacgtatgtattaattataagcacaagtatatgtatatatgtttatctacgcatataaatataaatatatataaatatatatataaataatagaatatacaaatttaagtaattcgacaggatgttatttatctatgtctgcagtagcatttaaatgattatgttttattaataaataaaaatttatagatttaagaattatttttaatgtgtgtatagtggtctcagttgaaatggtgtctaaataggtattttggtaaataaaatagtattaatgtaaccttgtttgtgtaaaaaaaaaaaaaaaa

SEQ ID NO: 187456 - DNA, 2885 bp, Cannabis indica
tttttgaaagagaaaaaaaaaaaactcatgtttgagaccatcccctattgcctcccatcccctgatgagcaacttcgagaactttcctatggaccactttctcctcctattccccattcctaatttttattttttatttttatgaaatggccccatttctaattttatattgccaaatgaagaaagaggtagtgacaaataaaaaaaaaaaatatttatatattaataatgaagaacatatacatataaataaaatatttgctccacaagcaagatctagaactttcttccattttttttaaccaaaaatctcttcctatatttttgaccctttgggcaccaaatccacagcttcccacgggtccttaattaaacacactattatccacttcatataacggcttcaacgactttcccaaaagaggtaaaaaaaaactgcatacatacagttaatagctctaagaaagcagaagcagaatcagaagcagccattaaagctttcaaattttctttcttttttttcatatctttcacagttttctttctcttcttttcatttatatgctgttgacttttagctactgattctcataaggacatactttttttattttattttttgaaaaaaaaacccatttgagttcttggtatgtttgacctatatttcaattcattagttcctaatatcgaattgttcgatcaaaacccatctgacccattaaggccattgaacaaagtaaccaaaacccaagaaaagttttgtgagtggcagtttcaaggtatgaattttttatacccagttaaggaggagtaccctagtagtggtgggtcgtctggctcttcacagtttactattggcggtgagtcacagccacttacgatgcctccgcctcagccaatggaaggcctccacgatgtgggtcctccaccatttctgaccaagacatatgacatggtggatgacccatcgaccaatcggatagtgtcttggagcaaagatggtaccagctttgtcgtttgggatcctcatgccttcgctctgaatctccttcccagatactttaagcacaataatttctcaagttttgttagacagctcaatacttatgtaagttgttttcttttcttttctcactaaaatttttgtttttgaaacataccccagatcgtacaatacaaacttttatagcagaaaaatcatttactaagaactttgctttgttttggaaattgcatataacaagttctatttattaccggattcttctctttctaccctaagtttcgtcgaaattttaatttttagtgatacccagatcggaaaaaatttgatatttccaacattaaaagaaatgagaaagaaaaaatatcaattttttttttgatattattactcaattcatctctttctgcgttttgaagttggatctaaatatcaaattttcagagatacccagatcgatacactttaagtgatcatcatgcagaaataaccatgttgttattttcttctattcgttcgttgaaatttgattaaagaacagtttctttaaggcatttgattgttttcttctttaattaaaaatggaaacttaaatttgctccactcaaaaaggaaaagtcaaaacctagggttgttttcgtatgggttctgaaatttgctccactctaggtgcgtgaaaatgaattgatagcattaattggttgattgtagaatattcatggagaggactgttttttgctttgtctttttctttccattattttctgggctcactccaatttgccagtatttttgtcttttccctcttccgtgtttacagttgcagtgaattgttttttctggtaaccttggttctgtaattttatgcgaaattaaaggaaatttaatgtttgatagaatctcacccatcaattatacaatcaccgtaaatgtctctatcagttactttatgaaaaacagagattttctattaagtttatggtttgggtaaaaaaaaaaaacttgatacaaattgtaaaacaaaatttatttcttcttttctttctttcaggggtttagaaaaatcgatgcagatagatgggaatttgcgaatgaagggtttatcagagaccaaaaacatcttttgaaaagcatcaggaggagaagagcctcttctcagccttttcctcatgaacaacaggcattaggtccatgcgtggaagtgggccgttttgggctcgatgctgaaattgaccgtttgaggcgagacaagcaagttttgatgatggagttggtcaagctgagacaacaacagcagaacactagagcttatcttcaagctatggagcaaaggttacaaggtacagaaatgaagcagcagcaaatgatggctttcttagctagagcaatgaaaaacccagcttttcttcagcagttacttcaacagaaagagaggagaaaagtcattgaggaagccatgactaagaaaagaagaaggcctattgatcaagggcctagcagtaggtccagtgggattgaaacaagtcatggctcaatcaaagttgagcctcttgagagtagtgattatggttttgaagtttcagagctggaagctttggcatttgagatgcaaggttttgggaaactgcgaatggagcaggaggaaggagatgaagaacttgagccaccagagagtggggacagagaacttgatgatgggttttgggaagagttgtttagtgaggatgctaaaggggttgaagatgaagatgttaatgtgttaactgatcattttggttgcttgggttcaagtcctaggtacaaaagctagtggggtttagatcccttccaaaaaaaaaaaaaaactttactactgttttttcaaaaaaaaaaaaaagaggcc

SEQ ID NO: 187457 - DNA, 2041 bp, Cannabis indica
atactaaacgggtcccgtcggggcggggagtgtgatccccctccccgccccgtttaacattcggggataaaaagtaatcctcgtccctatcccgttccccatttagacggagaatccccgccccattaggggcaaatctctgctgggcccattcccgtggggaaaatgtacatccctagtagaggcagttcgtggtggtctgtctcggttttggttcatggtatggtggcgttgttcaatgagcttctgattgggcgagggttaagtggcgacggtagcgatggtggttgagagaagctgagaaggaggaagagagaaagatttgggtaggtgagatttgagggttgttgggttgagttttgggtagatgaggaggttcggtggtagttggtggtctcgatgcttgggtttgggtggtctcaatggttcgaggaagagagacatagagtactttaattatataaattaattagaagtgtaaatttgattgggggtacttttttttaagtatgtaaaacaattttttttcttcaaaattacacatatttaacatttgtaaaataaaataataaaaaaaaagtgtcaaaccacatttagtgggtgactgttatgtgtttggttataatgaggaaatgagagatggcattggtgctagtgaaataaaaataaagaggacaaatgatgagtagtcatgtggtatgctctcacaaagtttgaggttctactttctagtcctttctaggtacacaattgtttttagtctccaaatattgtagtagaatagcatagcatagcaaagaatattgggaagaagagaatgaagattgaagcacattaaataaagaggcgtggtgtgttgtgtaacatttactcactcctactcctaccacattaaatgttttcactttgcaataacgacttctccacatgatagccacatggacaaccacagactcaccccaaaagcttactttgactaaaacccctatatattatgtttttggggactttccaatacacaattttaccaccctattcttttttttattattattttttaagtaatgcattaaaatacattatatattgccaaccctttatcatcataattattgaatcagatattttgcctagtggtgaaatattttaacttcacatataattaaacaatcatttattttcttctttaattttcttttcttataaatcatcaacttaccatgttacatgggacagttaatgcagtcatatcagtacaaatattgcgacatacaattattataatgataaagaagaaagaagttgacttgtacacaatttctaccatttttagttacatatttacttattcttctattgtctctgatcacaacataaaaagaaggacatgcatgagacaatcacatggctgtagtaccccatcctcattcatctaattttagtgaaataaaagtaagataataatactaataataataaaagagtggaagagtgatgttttagtatatgatagtatagtatgtttggcccggtttgccaagctgcaaggcagagcagagcaatggcatgtgattgggcttgttattctcaactcaaaagagaccaagcagtagcagtagtagcagttagacttagcactagcacaagcactagcaccatcaccccccaccaatgtccaaatgtccaatgccttccaattccattgttttcgccattaatttcaactgctctcagtctctctgccactactgttaccctaaataactaaataacttttcatgcatgtgcaattcccattcccattcccttcttgcatgttctcccctagctccccctagcatcatcacccacctcaatctccttctccccattaaatatgttttcactataattagattttcttttcacttctgtttccctaaatatgtatttatttatatatatatatattataaaaaagtgctgctataaagcatttattgtgttcgacacgaatattttctaaattaagtattaatttttattagaatttgctacacat

SEQ ID NO: 187458 - DNA, 5758 bp, Cannabis indica
aattttttttaaaaaaaaataaatttttttaaaaacaaaaattttactttcattttgtgatttaaaaattaaaaagcaaaagtattaccaaacgacaccttagttatgtgtataattttttttgtttttcctctctaataagaaaaacaaggccctccttttgttttcagattcagttaaaggattggttttttgttttttcttaagttttttttttcataaactagaaatttggttgacgtaggaacaaaaagggatagttctttcctattccaagtaaactcgtacggctggacatggatgacgtggcatcatttcagtggctcaacttcaaccattaccaaccaattctctaaataaataataaatattaaagaaacgaccaaaaaaaaaaaagtttattctgtcttctccactgattcttctcttcttcttcttcttcttctcggatttcacaactgagaaatcaaaaatacataggacaatatagtacactagctttaaatcttgtgcacgaacaaggcaacaagcaaagaatcttgtgcgttgacgcctctcctctttaatcttttcccattacagaagcgtaagtgccaaataattgttttttgttttttgttttttcaaaggtaccgacttttgtgattttgttacaattgaattacaccctcttgggctaaaaccggtatataagaaaggaatctctgtttcattgcatgaattcatacgaatctcatttgggtcccttactactgttatggtatttgttccttgcttgcttccttaatcacttttttacacacatagtatttcaaattcaattatcagaaaataattcttctttcttaatctgcacaagatgttcgttattgggttttttagtgttgtatggaattattagagtagttttgttgcttttattgaaccaatgaagtttcaaactttttatgctataatttcttaatgattaaatggggagtttttattttagtagtgtgtttaagtttatgagaattctctatctgtggttctgaaaaagaaggtgttgaggaagtgtttggtgaaattcatgtgtttgaccattgagtaatatttggaaattgaatctatataaaacataattctgggaggaaaaaattcaattaagtgatgggtttcttaacaggatctccagaacatacttggcagccagtcatgactgccgacactacagaaccaagttattggttgaactggaggttcttcttttgtgctttatggctgtgttcaactatggtagcttcatccatattgatatggaaatatgaagggtttaacaaatcaagctctaggagaagagagcatgaggtagaaacatcaggttctttgtatgagtatgaatcttggcagacttgtcttaagggaatccatcctgtatggctactagcttacaggattgtagcttttgtcactcttttcgcattgcttttcgccaatgttgtactcgatggaggtgtaatcttcaacttttatactcagtaagcattctgtccttaaaaacttttatcttttctgcactatactttaatgtcaagagatttggtgtgaaatctcccataacatctatggcattttgatgtatacaaccgagtaataatgcatgcaatgcagcttggagttttttaaacctttcttccctttggcagtatttgagggtgctagaaactgatatacaaacctattcattttgaaaatagttctgtggaattctctcaggtccactccctgagagttagtagaaaacaccaaagatcataatgttatattttaagatgatgcaccaacaaatttgttttttcaagttatctcacaagggctgggaaagctaatgttatgtactaatttgtttttcttataatgtgctgaacagatggacatttactttggtcacactgtactttgcggtatgaacttcaaactaaggctcttttcatctgaaacattgttcaacttcaactttctgattccctttaagtattagatttcaatgcttttgatgttgctgtcattaagtttcttatacagtgcatacattttgcagctgggaagttccctttctatttatggatgtcgaaagtatcaaactaaagtcggtgggaatgcaaataattttgacgcagagcgaggcacttatgttgctcctagccttggagagagttcagaggcatcaaatttgtataaaaatctcgatacccgtgaaggaaatgatgctcataaaactgcaggtgcatggggttacatcttccaaatcatttatcaggtagatttttgtatacccgaatcctcctttaatcacccaagtaacttggaaatgattttttgttttggaaattgcagtgcctctctgttttcaattgctatgttttacttatattagcatttcaaagagtcataaaatccctttgctcccctatgaacaggtttctgctggtgctgtggtgctaaccgacagcgtattttggctcattatttatccatttttgacagccaaagattacagcctgaattttgtaagtaaaaagcaacattgtgctgaatctctatctcattttaacaaattgattcaacttctcaaatctcataggggatgtattggttgattgtttgctatttctgagtagtttcatttaaccaacttgtttgtgtattattgcagatgattgtttctatgcactcaatcaatgcttttttcctcattggtgacacaatattgaattgtttggtacgtaaatacattgcttgttggtgttatagacattttcatcttcttcttcctaattatgcaaacaatcttcttttcgcagagatttcctttgtttcgagctgcatattttgtgttatggacaggaatatttgtgatctttcagtggattgtccatgcttgtgtatcaacctggtaaaaataattgactttttcacttcatgccttgaatgaacacattcaaattttatggctcacaatgctaacaccctttgttgcaacaacaggtggccctatccatttcttgacttatcatccccatatgctcctttatggtatgctcttggcttttaatctgatttagaaagaaaatgttctcaaaaccaacaatcacattactgagaaatctattctagaaacttttaacagtattcgtttcgttcatgtgtctcgtcgatgcaaattttacaggtacatcggagttggattgatgcatgttccatgctatggcatttttgttttgattgttaggattaaaaagctcttgctgttgagatcattcccggagtcttatcagtgtgtgaggtgaggacttaggaggagaagcttgttatgataccatagcttttgtcataattatatatatgtaataggagaagaaaatttgtatctctgcaagttttcctatcactcttatggctatactctatggttcaccttcacccaaaacattccagcagaaaaagaagaaaaagaaaaaagagaaaggaaagcattacatattttgcttatagaaaaattcatttatcaattcttgaattagaatctgtactcaactgtaggtgattatgaatacaattacacaagcatatcttaccaataaaatatacacttaattagattactaatctcttgtgagtgtgttttaattattattctttcttttctgaactttgtgagtagaatatccgcttaaccacaaaattcgtactgtattgcatggtgtggtgtagttaattttattcgtggtgtgtagttatagttaatttttttactattatcgcggtgtcatttgtttagtcatttgctaatatcttttttctttattattaattgtagaaaaaattggaatttaaagcgaatcagatactcctaaatctacaagtacaagtacaacaatgaatattaattaaaaatatatcataatttataactagttcttatttgtatttttccctttttatttgtttgagacttagagaattgtattttgttttgcttgttgaagtactaagattctatttagattttgttatgtggaaagttactctttttctaatatattagttaattttctatcatggttaaccacatcattttgcaccacacctatgcgtggtgtagttttcggtttatgcaaaacaaattgaccatgtagttaagattttcatttaatcactctttttgggttggttaaagaatttatattttctctagtcgtttataccactagaaatagaaatttgacccgcaatgatgaatacctgtgagtacccacctcgaatggggcggaaaatacctgttttggtgcgttatgagggacaattttatttacccgaagcgggttcagaatggtattaggggtaatattacccgttccatatccgaccccaataactagtttctatattattttttaatatttatttgtataattgaatttaaactattggctacaaaggtgatcattgattttattattactgtcatgataaatgttttttaatatagtgttctacacattaatttctattttcaatatcttgtttatttagcatcaatatatgtagttgattatgtttttagcttatttttcttttacaatttattgaatatgaagtataaatcagatctagtgttcaaaactttgttggttttattttttcatagcattactatatttagttccctaattttcagtttcttttcaatcctttatagataaaagcgaataaacactcaaaaagcgtcatcaaagaatgtaaagtcagttgaaaatatttcaaattggtaaaggaaacatccataaacagttgtcatagtacatcaatctttcaagttcaactctcaaaagggctctcgccaaaccatgattaacgacctctctcttgttttctcttcgtttacatttactttgctaagctctacaaactctactttacctgcctttaagctattagcagccttgttgattctgaacatcaggaggcactcttgagaaagctcttaagccataatttctttcatttcatgaaactagggctttacatgctccctaatgaactgctctacttgagatatttcaccctttaatccggatgcctcagcaactgtaactttgttatggcactgagagaacgaaaacacttctcctggtacgccaagagtgaactcatttgcaatatcagcttctgatactgcacttcttgatgctcgcaatttgtcactgatcaaaaacaaatataagaaagcaatatatgacatgttagaaagtacaataatacgaatagtatctttaacctagcgtgaaaatcactgctaaacacagtaagctaatgatttttgtctaaaagaacaattgtactcttctgtaattgcaatggacaatatagaagtagagatcaagtgggcataaccagaaatataaacctctcaataagttgcacaaaacacatgacaaatgttatgttattgaaaacaaaccttaattgtctgtgtaatgaagataagataaaccggtatacaagataaactcatttactattacagagcattatacaattaatactaaaattaagtaattagcgaaaacacagtcacttagaaacaaattaagtcttacatttccttctccatttgtttcctgataaactccttagtatgtgctgtcactttatctgttttgttgcagagaataagcactggaatcttcttcgtcacaacactagccttggttag

SEQ ID NO: 187459 - DNA, 2630 bp, Cannabis indica
taggttgttcttcgagcaaagcttaatgcggcacaaaacatgccttcagcagtaagtttcagatttttctaggttgttcttcaaacccttctaattatcagaaacaattgaacttgccagtcttcagctccactacaacttaaaaacttatttcacgtctttctgcgaaaaactttcctgttattgcttggtctggaagtaaggcaagccataccccagtatcagcaccttcttcagctggaatgttcccagcataaccagtcatagcagtttttacccagcccgggcaatagcagttaatgtaaattttctggccatctggcctatcagatagtacccttgccattagccttgtgtaagcattaacagcaagttttgataccgagtagtcagtaaacatttgtggccacccgcctgcttcccaggtgccttcttctacttgttgtacaaaagtagatacagcaccgtcaatcaattccactgagagcgaattcagatcacttagttgttgtctcaaagtcaaatctccaactctctgtcaattaaagccttgattagtttaaagtgactagcaccaaggtgttcacaacattacctacggaaaatgacttctcaacaattttttgcagagcagggtaagattaaaaatatgaaatggagactccaaaagtactccccattttggaaatcccctgaaaattgataaataacaatataatagttgaataaaaggaacaatagcaagaaaattgtttttcccaacattaaaaaaatgaaaggaaagaagtacaacactctaatttctaatttgcaattatttgaaggccaatatacatttttggggttgttcctttatgagttgtttacttacattttctcatccaaaagttcaacactaaacatatttagagataataagccccagtacatacatgtacatacatgcatgcttatatttgttagggtgatttccttcaaaagagaaaatgtagagaatagcaatactacaagaaacccacaatgtaactagttaggtccacacaagtgaaataggaaagaagaatggccatgactacattgcctacaaagaacaattcttttcacaaggaaatccttagcaaaccataacctaaaacaccatagccacaaaagaaagtatgatatattggtatgggaaaagaaggaagtagattaaaaaaacaatacatacaaaaaccttgcatgcacaacagaaagaggcacacataaggggtaaaaaacattgagtttctacttacatttcgtctgccgtttagtctacctaatcttgagctcacattcacaatcctagcacccacattagaagctttcatcaggggaatcatagcttcaatcatacttttggagccaaaataattggttgctacaacctcccgggcatgttcaagagaattgttagccccaagattgaaattaataccagcattgtttatctgatacaagaaataatacagcactgtaagattaccagccaccacatgacttgcaatggaccgaattacataattcttcgaatccatgtctatcatcttattgacttagactaaattcagagagtattaatattcatttttttaattaattgaaaagacaaggcaagaaaaagccaactttagtagtaatagaagacaattactgaaatttgagatctaaacacaaatttaataaaataaaagcaacatacatggcttcaagtgagtctttttttcacttgtactctatcatctagatgttagttacttcaaattttgcagcacaatcaacctcacacaaaagaacatgcaatgctaatccatttctagtactaaagtcagactactattctctctacagatattagtctcacaagacataaccctgcccgcacacctgagatacgtgtgttgtgtgtggaagggtcccaatatgatttgggacaccgagtaaaaatggtgagacatggctgcctaagagacaagagtagaactgtaggactcactacaaaattatacatgttaaatttttataatgcataatttaaacaagctcttgaagatttgtaacatccattttgtcaatgaggaattaacctctgaccatctcacacaaacacacatataataaaatattctttataaactaaaagaacaaggaaatcattaaattggtgtaagtgaggtgaaatgcacaatgtagaaagttcagcctaccagaatatccaaaccaccatagttttgttgtagccaatcagcaaattgtttgatagataaagggtctaaaacatcaagttgatgaaaagccacattaaggccaccttcttgtaagaccttagcagcttcagcaccaacattactatctctagaagtaagtatcactgtcaatccatgcgtagcgagctgcctagaatgttcaaacccaattcccctattaccaccagttaccactgctatggtttctgcagaccaccatctataaagaatggcataaaaacttcatcaatgtttcccaaatttaacaatttgaaagggaaaaaaagatacccttttgataatattcacaaaaacccaagttggtagtaagaatcaaacaaatggagaagcaaacagatttgt

SEQ ID NO: 187460 - DNA, 1752 bp, Cannabis indica
tttttattaaaatactattaaaacaaatttaacaaatatgtagggagctccctatacattctctattatagggagtcaatttttttttttgtatggttaggtttatttttttaaggctactctctattttagctaatgagtatgtttttttagagaactttgggagaaaatgataaacttcatgggtatagaataataatgaaacaaagcaaagaaattttacttggtttgataaaactaacaacccacaaagagagatatatatcacttataactcaaaattacacactcactatcccaatacactatttactttttcctcactctgagagcactacaaagtcacactcacttttcttttcatagctcactcttcttctcacacactcacatatttataaagttacaaaatttgggcccaagacactctaaaacatggccaccaagatactttaaacttggccaccaaaactaattttcttacaattaatatttacccaaaaaggaaattgcaactttacaaatatagataaataaataatttgagtcaaatgctaataatctccacttggactcaaattctcatgttgacttatgaaattggacaacaggcgtatgtatagaatacgacacctttagaacgataattaataaacagaatagagtactaagtaataattataaaaacacacagaattatagtggtttgaccttgtctagacgaatagtaacaacctactctattttagatttcttattgcaacgattacattagcctgagtaatcttggttaccaaaacgctaaggtcaccctaaaaatattgaatataagagtcagagaattaaagctattgctttgatataaaaatctcaatcctcttaagtaaagctttgggtcctttattaatagtacccaagaactttacaagtttcaatgataaagaattgtggtccacaatctttgatgatggatgtgtgtgtccactccctctagatcaggagatcatgggtcaaattgttgtcatctctagattgtgaaattgtgtgatcaaggttgatattccacgatcaattgctctgtgaaaagatgctaagagtatttgtatagtgtgtaattataggtcacacaccctaaggcctaggtaggtgacctacaaaatctcgatgctaggacatattttctccttagagcccagataggttaaacgccctagcttaatgagtgtgaatctctatccattagagtaacttgaactttcaaatgcgtgttgagccctagggacatgcaagccgcctcctttctcactggtatggctggcaacaccaaatatttgaagtattttaattgttatttcttcaccaaggatgctaaggaagaatattctaaatttaggcatgtaggtccttgttttagacagctaccgactccttctatggcctctagggccaaaatacatagagacatgcctctagaataaaagaatgttcaggctcttgttaagtcagagaaccttagggtggtccagttgtatccttattattttgttgatgttccagaagaagttcctgatgatgaaggtcttatccaagtgaaagttgcagagtcttaagagcatgtacctagagaggatatgtcttctttgtctgagttagttgatgacgaagttaatgtgaacatagcatgctcagaaattttcagatgattttgatgaggttgcttttgaggaagagtctcacttatgagtgtttgat

SEQ ID NO: 187461 - DNA, 902 bp, Cannabis indica
taaagattattaattagaatctatatgtcattaagtaataatttaaattttacatttttaatttggagctcaattttcataaaatagaatataataataattagtctgacatgaaagtattatgaccatatggatatagtatattggtttaatattaaaatattattatggaccaattaaccatatatataccgctagtaactaattttaagttggttaaactaaaaaaaaaaatcaatgaaaaatgagtttaagtaccattttaaaaattataagacattacattgtaacataattagtacagtttaataaccaacttaaatcttaataatttgatgtcttctgctttaagttttttgcgtaagtactaaggcttttccttcagaaaatatatataggtaacacaatatccaatattatttactgaccataagtatttacgattatattttataaacaatttaacccttttttatggaacataaacaagttaagttggtttcattgatatagctgaagcctgaaatgaatcattaatatacggcatttggcttctctataaagttacattattgcacgatgtgtgaatttttaattaaattacaataatttgtgtaagaggacaacgaagccatatcatatcaaaagtacacatgcaaaaacatgagtagttggttttattaggaattttagaattacacgaacgcaccttaaaccttgaaaaaatcacttttttaattcataaaaaaaaaatctcatatttgtagatacttacaaacgaaagtcaacctcaaacacacattattaaattgcaaaatataattaattttgtatctagctagctttacaattttcttcctaattttctttttgagtacattatttagaatgttataattatt

SEQ ID NO: 187462 - DNA, 3121 bp, Cannabis indica
tatattatacgaaatgatgaaacaaaagcacaacaacgtgatatcagcatatgttgtgtttcaaattataatcaggaaaggtccggaaaaaaagtagagtggagaaaattcaaagctagccctcatcagcagcacagccaaaaaatgcctctcctaccaaaagaatattacaatagcaaataacatatccacacccctatggcgaacaaaaaagaattattataaactacaattttcaacccatgaaatcaaagaaataccaagaaaaaaggggcaaataaggccccctcaaattacatttaattcaaaagtatctccctaggttgttgccccctaccaactagaacatgcaattttgaagtggagttcacaactcgtagtcctgatacatctcaatagctgctccccatgggtggcatgccatagggtggcattggaggcattcccattccccccataggaggtggtgcatagcctcccattcctggtcctcccattcccggcataggtggggcaggcaaagcaagaggcagcaactgagcatacatgttctgcaacagtagatcaaattattggcaaaagaacataagagcaatcagaaatcaccattctttaataacatcagtactgtatttttctgcaagtaattacctgctgtgcaataacgtccttctcttccttttctttagccttgttttcgttaagagcttcaattttgtccttcacgagttcatcaaccttgccagtgtattcacggataaactacaaagtgaaacaaggaaggtttaggtaagatgaagtatggaaacaccaaaaccacgaaatgtgaacaaaacaaagacaatacacagttactttcagcgcttacagaaaatatttttgaattagtaaatgtacaaactgacaaaaacagccacagcaaggacaaaaatagactcatcgacatcatcccagtcctcaccacaccaccccaaaacaaacaaacaaataacaaattcagacaatttacctgcaacaggtaagggaaagcgaagtcaagcatattgttcatccatgcaagctcaaggatgacatctgcccgaatcaaatcgtaacaaacaaagagacatgatgcaaagcattccttcttgccctgtataccaaagaagatagatgagtttctcaatccaaaatagaaaatgtatttagtattacactaacaatatcttatactgaaaaatgcacctgctcaatgaaataaacaagcaattcctcagcaagttcacggtcaccagattgagaggctgtctccatggcatctttgtaaagattgtccttctttgacaatgcaatagactgcttccatcgaccagcctttttgtatatataggcagcaactcgtctcatttcaagaagctcgtgtttctcaatctgtacataaataagcaaaactatgagcctaacgtaatttaattcaatggcagagaatcattgagtaaaatgctgtatctaaccttttgggccaggcctatttggtcaaagctatcatgcaaatcaatggattcacgcaatctatcatagtcttcctcctcgacataaatctcgttcaaagcctcatttacagctgacacattgttgctctggactgcaatcatgtaaggcttcaccaggcgcaaatgaccagcctaattttgatatcaaaaaaatgagacaaagaagagaacaaggagttagtctgaaggaagcacaggcgtggaagagagaggtaatattctacaataaaaaaagacggatattgatacagccacaaaaaatattcatacctttcgcataatgtcaacaacacgtgtatggtccactcgaagtgcaagcacattgagaagatcattaataagatctgggtgttcttgcaagtagaagtgcacagccttgtaatatagctcaacatttgcaaccttgactgccacatctttaaactgcatgtggtcccacgcttcgggagaatggttcatgatagttgttgcagcattatcaaattcatcatattggatatacaaataagtaagttctttccaatgttgttgttcatcacaagctcggataagtttgggaatattgagccgagttgagaacaatttgatatgctccatgagcttctctggacgatatctggcatacagaacccccaactctgtaaagatgcccatatgtgcacgttctaatcctaagccactctccatgagagatatcagttcattgaagcatcctctgttctggtaaaattcactcacctcctccaagtcatcaacctgcagaaatcaatgaacacttaatatggaaatgtacaaacaaatgcaagaacagtgcatgctaactagtaaggtgatcacagcataaaagattgtgtttggtctgattttaggtgtgaagaaaaaatgcccaagcatatcgttcaaacaaaaaactgaggtttgaaaaatagaaattaaatatagcatatattataataattgttaccatatcaaatattcaaaaaacgcacaagaccaaagcaaagtcgatgtcagtagactcacaagtcaccgtatagaggtaacagaaaaagacaaatacctgaataataatgttaagcccacaaatttgagccaatcggaactcctctgcatccacacaggcaaagcagacctccttccatgtttttgcactattggctttccttgcagcatcaacagcaccttggaactgttttaacttaacaagtgtgacagctaacttagcccagttagatataaaagcatatattatttttgctgcctcgtatagagcttcatcatacaagcggtcaccaacactctggagattagctacatttggcatgagaataaattcttcaatatcagccagcctgtcaatctttgcgtatgcatatataagttcaccgtccacctttggctctttcaccttttgcctcaccatcagaaggtacctcaccatgtcatcatagacatttacatcctcagcagcacgaataacatccaggaattgagtcgcatcatcagcacgaataaatgactcaattgcatcactcactagtccttccctgagttgagcctttgcaaccctgactccaaacagcatcttc

SEQ ID NO: 187463 - DNA, 6398 bp, Cannabis indica
aaatgtcgttaaaatatttgaaggagactaaaataaaaataacgtaagacacgtctagaagtttgtcgagttgtgttgcggtgtggtgagcgtccaactcagactcaaccgcctcaattggctcacgtgcggggatccatcccgaagtctctcatttcatccaaaaacagaactcaaactcctcttcatataaatccccctttcgactcctcctccacacgtaactaactccttaaaaaagactctctctttttcccttactttcccgcaaagaatcccgacagccaaacgcattctctcgttcattgtggttttctcattctttcttgttttctctaacaacaacaacaacgatgtgggctcaaccgtaccggaagactgatgtcgaggccggcgggagtaggcctctttacccgatgatgttggagagccctgaactccgctggtcttttattcgcaagatttattccatcattaccatccaattgcttgctaccatcgccgttgccgccaccgttgtctccgttcatccgatttcccatttctttgtcagcactggggctggcttagctctttacatcgtcctaataatcactcccttcatcggtatgtaattaattaaagcaaagaacataattcttttttggttatgtgttgattgaattttaatttgggtgtttctgttgtttcagttttgtgccctttgtattattactaccagaagcatccggtgaattatcttctacttggggttttcactatttctcttgcattttcggttggtctgacctgcgcttttaccagctaagatttttcttttttttttcttgattaaaaattgagtctttgtttttttaaaagattgctactttcttcttctaaaagatagccttgttgaaaggatcagataaaatataggagatatgggttgatgcttacattatatttaaggggccctacatttaaagtcacttaatttgttttctttgaatcggcacttttgttaatcattaggttgttttgatagtgccttggttcttgaataagatccccctttgatgttaaacgtgactaggttggctatggctgataacattactcaaatggaatatcttacggcttgttcaaataaccaaaatttgattactcgccttcttatggatcatgcattattgtctttcttttttaatgagatattacggggaaaggaaatgtgtaaaggatataatttaatttggagaaatattaaagggcagtgtgcctagcaccctctaaatattgggtctcatgtaatataatttaacaactattatagagtatcagctaagagttgtctatgcaagtcccttatatcaatgcacattattttgcgtttaataagtatgagaaataagatttaaaacacaaacaatggaaggaatcctttgaaaaaaatttaatttgtcttttcacaattatttttctagttttaatcatctgacacaatgaattatggtattttcaatttgagacaggcaaggtaattttggagtctgtaattctaaccactgttgtagtagttagtctcacactctacacattttgggctgcaaggagaggtcatgacttcaacttccttggaccctttttgtttggagccatgatggttcttatggtgtttgcttttattcaggtatgttaagcctccaaactcattttcttgtttaggctcaaatttatggcatatgggtttctaaatacaggatttttttgctaataacagattctctttccgctgggcaagatctcagttatgatatatgggtgcctggcttcaatcatattctgtggatacattatatacgacacagacaacttgattaaacgctatacttatgatgaatacatttgggctgcggtttccttgtacttggatattattaacctcttcctctcactgctgactattttcagagcagctgatagctgagcagacaaatccttttgctcctttttttccttgtaaccccttctttggtataaaccaattcttcacgacattgtttcttttttccatgtagactattatattgaagcaaatatacttgtatcttaatggtatgtacatagaaacaagatctaattgtgttgaaactattgtcggattatctactatagatcactgtcacttgatgaaaatgtctttatttttgggtttctttggatcaatacttgcctagggtttagaccatagttctgcaaactaagaaaatgtaaccactttgagatcagtctgagcaaaggttcatagtaaaatgaatatgacattccttatatttaaattgagaaattctggtgaaatgatcagtcgaacaatacaatttatacttggctaaactctaggcttaatcttcaatttaaatctgactcgtttttcaactaatttcgataatgtatatagctctggcaggccctgcaatatctccatcattgaccatttgatgtcttaatatcctatttacacagaggcagtaatggaattgatcgaagtcaacaattagaacatgaaactagtctaactcttagtcttaaaagctatctagaagatcaaatatttgttgttttaacgcaaataggacattttgttcaacgattactctttccctcggcaacaatggaaagcagcttggagaccccttgagtccagagttcatagtcactctgagtcttgcactcgaactccacaagcccacgtgcctctgttttcaatccaaagtaacgacgctgatccgcaccatcgaacaaatgtcgtcctggccaagccggcatgtccttacaaacttccagcacaacatctacaaagatttacaaggcaataaggtgtcatgacaaaatgtttcaaccttagatgcttcaaaaaataacagccaagccaactacttactctttttcttcttggtgaatgtcccacctacgtgcttgcttttcattttcagcatcacctacaaaaaggggtttaatcaaacagaacaatgtgttttatgaactattagataagccaaaatggatgatgaatgtctcacttacttgcccagatcgatgaatgtaaacagagactattttccagtgaagatcacctgtgataaagaccagtttgcattagagatatcattcctgtgtggttttaatgggttacaagaggttacaaacacaaatcattatgttaccttttcttgttcgtttgagtagctcagtccccctagctagaagatcttggttccaaacaagtggcaaattttctggagggcatatctctccactgatgttggcattaagttgatccgtactggctttgccacaaacaccgagtgccattcccttctcaactggtatcactgccgcaatgttccacacttccttcatggccctcgccttcagtgtcgccgcaccacgtaaagctaccacattagataaagaaaaaaaaccaacaatttatggcttgaatcttaaaaaaaaactctaacaattgatgtaaaatgccgaaaccatatggaatctttgtgattttttttttattttgtacctctttgtatgcaatacaaaattattttacaaattagttagttcttatgttaatatttagtgtcattggtgaagttgtaacaccaaaattttcatagattctacactaaattagagaaaacaattatatcaaaatgcttggagagggaaagaaatcaggtaccagtggctgctgcagctgtgagagttaggatatcatcaaaagagcggacattaacagcagagctaaccaccgaagcgaggtgttcatggtcagctccaagagactcagcagcctcagcacattgtgcggctactaacgtggccgcagacgccatggctgtgtctgttttggctgcttgctcattctttctcgtggaagatgaagctgctgtggcagcggcaatggcagccacagcagcagccacaccggccaccgagactgcagcgtggatctgagcattttgggctctgctttcctctttcttcttttctttcctgtccttgagccacctccctacagtcttggctccgcctgtggtgggggcattattgacatttcctgcgcttgttcgtccaccattgaataggtgttgtatgctgttgttggaacgaaagaactgcatagtacataaaattaatgtaaactaagtaagctcagtctacagagtaatgagtaaagaaaagtagtgatgtttttagtggagaaactaggcctagaaactggtttatttcactccataatttatgtttcttttcttttaatgaattaacgttgtcaacattattggaggaaggacatctttcttaggcaagcatagcattcattattgtatcaaatgaaatgacaacacaagtcaagcctgactaaggggatataaagtcaatattaactggaatccatgttggttttaatgttgcagcactcctactggggggtttagtatttgaatgaaagaagaacgctgttttgttttttgtgtcaagaatttttataaaacgagtaaagaaaaatatggggaacagagagagacaaactagacctgagacactgattcactttgtttactttttggataataaagtgtggttggttggtgcttcttatattttattactttatatttctactagaatttgaaaaacataaataaataaataaataaattaaactagaccttgacgacgtcgtcatattcttctgaaggagatactggagggctgtctgtctctgtcagagaacctccattcaagggtccactgctgtgggagagtctacccgatgttaatggtgatacttcctgtttaaaaaaacacacacacacacaatatgcatttcaagccaaaaaaaaataaaacaaggagtagaagaattttgattcaaagctttgaacttttctttctcagaacatgtacaaggactgaaatttatcatatatatattatgaaaaaggaaaaagagaaagaaagaaagaaacctctctcatagactgggacattatacggtcgaggacgagttgggaagtaacagaggaagcaaaagaaaactggtgtccggccaatatggggagctcctcggattcttctatgacatcttcagatatagatgtattagtacaagaagaggagctattggaagatttggaggtcatacaagaagggttactgtgattgttattattattgttgttgtttggtgtcagcaaggctttcgagacttggagagctgaggcactccatgacctagatagaaactccattggagctcttggactctccggtaggtgggtattgtattccggccggcgaaagcattttagagataagttctcttccatggaagtagagttgtagtgagtgagactgagaagaagcagcaaaaaggtggtggaatgaaattggtttattgatatttatttatacagggtaaggggtaaggtgtaaaggagtaagtaaggactggtcaactgttgataaagggggtttatctctggctgtctggctttggagtaatggcatgtggggatgtgtactacttttgctgtggcaataagaaaagccaattgtgagttgtgaggagtgaccacaaaggaagagcttttatattagctttcattaaaaactcttagttatgactaattagttatcttttggctgtcttatcacagatttttgagtattaatgttagtgatttgtacaaaagaagagaatcaaagatgcttttgttatttcccccgctgaaggtggggctgctggcctatatgtttggggttgtatggcctatgtgatcttagtatgcgtatcatgtgaatttgtgattaatctctttgttcaaaaagcgctttagctaagattgtatggtgtaattaacaacttttttaaaaaaaaaagaagggttttttgattaacactcttatcgatttcttctctttttctgtcttttctttttcacttttcagcaaactattgtatcggctaaggtcaacaaggactgcctcaattgcaacgcaacaatgttggtgtcacgtttcaaatcagcctgaaattatctcaggcaactggcaatgtgctttcacattgtcaatcgtcacaagctatagagatcagtttcgtgtaaactctcaattcagatggaaatcttctcagaggggatataaagcttagaaaggctatttatgcatattacgtcttcataatagattatgattagccacattaataaagctaggatccaaagtgttagattttgaagttttctttacaattcaacaagaatttctggctcagttttcaaaaggggtccccaaatacagagaaagatacataagaagtttttggtggtggcctaagtgattat

SEQ ID NO: 187464 - DNA, 1396 bp, Cannabis indica
gtcagactcaacgaccactttctccaaacctctttcaaggtcgatctcgactgtcaaagacagtggcaacacaaaacatgagcctgcagcacacaatgtaatggaagtaaaaagaaagagagaggggaaaaatataggacttacccctatagcttgttgcttattccatggcaaaagcaataagtcactactgttgtaggatgcccacttatctgaagtcaactcccttgcactgatagccgcttggtctaatagctcggcagcaaagacaacaacttctctctctactttgggcatcagtcgattactcaaagccttagtgtcaatcatagaatccacgggagtagcagtagaaaacttccctcagtaatctcagctctcttcacggctgagagattgtctaaccctttttggaaggacggacctttctttgccatagcgccttcttaacaaactctctacagacttgagttgctttaaaagctcctaccagggtccttgggctttagagggaattaaaagttagggaggaaccctgagaagagtggtggaaagtggttgactctgttactgcctagggtctgcccttggcagaaacaatgcccaccaattgttcttgttgttgggattgttggcgttgttattgttgctaatggtaactttgttgaggttattgttgttggatattttggtactatttttgtggttggattggttatcgttgttgctgttgttggacttgcggctactgttgttgtagttgtgttggtggttgtcgttgctgctgttggatttgctgctactgctgttgtggttagatttgttgtaattgtttttgttggtttggtggatttggtatcagtggagtagaggatccttggagatcaccagttcccccgggagagagccacctaatcgtatgggacttaggctttttagttaccctataagacagtggcagaggagtcttacgctttagggtctcagaaacacctttcttgggaaacataagcccatccaagctatcttttgaggcattagcgttctctttctcttcacgggctaattcctccatgaatggagcattcgctagggcctgctgtcttggatggcctacttggttcgcgccactcccagtggcaaccaaatctttggacacccctcctatcataccaagagctttttcaatctccgtggaaccagtaggggtggggcctgtagtgttttccttttaaggtggagatatcaccccaacatccaaagaagaagaggtaagggaggccttggcttttgaatccaggaagccctggacttaacctttcctaatcccttggttccccccatcttggcaaaagacttagccaacttatcgttaaaatttttcagcattttgcct

SEQ ID NO: 187465 - DNA, 4920 bp, Cannabis indica
  modified_base (4868)..(4868): a, c, t, g, unknown or other
ttaactactcatagtgacaaatatgttgcctggaacaagttgtgttgttgattggagagataatttgaagttgtttcaaattttatccggtataggagaagaaaataggcaatacttggctgagtagttaccaattaatgacctgttagagaagttttgaacaaaatggacaatgctaccgactaatagttagtttagagaagttgtgaacaattatggtttattcatttgcatccatttagcattgttgttagtatttgacatgtttctgtcaaaactagcacaatttttgaaaataatcttttaaagccacaagaaattctattaaataggcatttcttattaaggtaagatatatatatgtatatatatttatgtaaataaatttgtctttttctcaatggtttctttttttttttttacactcttctcttgtcaatttaagcacttaaataaaacccagaccgtaatgttgttcaatttcaggtcttttatattgaaacgatgttcgagtgtgagtagacttgaatcaaaaattaataggagcagctaaaattagactaattaatgtttttttaagaatattttgagttgagaaaaatattttatgttctacctctgttaaatttcttagatcaattcaatgtgggctatataattcatttcaaattcgatgatgatgacatcccatgaataatcattatagaaagtgagaaggaaatggtgcattagggtatataaatttgcttctgtatcatttgttattaaataaggtactatggtttttaatgtgatgaaaagttttgggtatcttttccatgaacactttcttcctttgactgtctccaatgtttatcttgatttttgactattttaataggttttttgcatgtaggttccacaacttagtttgattttggttgctcaaagcttgtttgagagcattattcagaggtattttttctataattaacattttacttaatttatagaagagtttaaatatcttatatattcatccgtagacacaagttttgtgaattttgtgtgctacggaaggttgataatttgtgtattttagtgaagtagaatctatgaaatatgtgtgttacaattatgaaaggacaacaacttgttttgtttgattgtttatagttgaactggacacatggttaggttattaaaatagggagaatgctgtttgattttttatagttacatttgtcatattttggaagtttttgtctgtattaattttgatatagttgagaatatggtgttaatgtaggttagatgctttttattcttgtatttatcttgtccttcttcaaaaaaatgtaggcattctttttgaattaagatgtgaaagagttcatataaagtactaaggaaaaaaaaattgttgacaagccccaaaatttcctttttggaaagaaaaagggctatgcttgcatttagtaactacttttcttttgcttcaatttagtggaatgccctctaaagaaaaagttagaaagtgatgcctaatgagagtatttcaaagatttcttctagaatatattgatttgatcccataaatagactggggaaatttatttagtgaatggacactatcatgctgttatttcagctctttgtattatcttcctaatttcggcaagtccagtcaagtacgactagattctctaggaaagcaatatcactcgctcattatagtattagtactagctactttgtgcttgaccagctgaaaggtctctagcagtggcttcaatgatataaaactggccatttgtggatagccttccttcaagaatggggaataaaacaattagtttggtgacacacatgactggaaatggaatgtgcttatttgtcacctgtcttaatgtgcagagtagatgtgcaaatgggtgatggagttgagagaatagaaacttatgcaggagaatcaagtgcagttgaagttgaaggtgggagtgatgtggaactacatgaggggatggaatttgaatcagaagaagctggtagagcattctatgatgattatgccagacaaaaaggattcttgactcgtgtgttatcatctaggaaatctgagcgtgatggatcaataatctctcgtgggcttggatgtagaggacttccagacagtcgaacaaaagttgacattcaacagggtaggcaacgagacgtttgcactgccatgattttgctgaaaagagagaagaatggaatatgggttgttaggaaattcgtgagtgaacataatcaccccttggggattgagctacaaaagggtcaccggatacttgtaagtgtattttaactgctagacagcataagttcattccaagactgaggtgtgatatgattgagcaattttatagatttaaagtaactcccaacttttggttttcaatttttttttctctactttgtaatatgaaaatgttaaaatgttaatactgtacataagctttaagtctagtttctgatgaagacacctatgaagggggtatttaataggataatgatactagacagatatatgagtagttgtagctatgtgagttaatgtggtttgttgggcttggttggggtgttagtgttcatgagcatattgacagaaatggaggagacattctggcattgaggggttgggtccttggggatttggattgtggagagtggacggtctcttgaatatttttaaggttgtacctgagtcttacctacagaaaatcattcagctcctatctctttttctctctgattttctcagtttcttcgctactgttataacaagatttaggctcacagtctcgtcgacaagttttgactctttttcatttggattgtagtcaatatcaatcattgatgcagaaaatagagtactcaaactcctacatgtctggttaaccacatgcttcttgttatctgttttcttggttttttttcttctttgtggttatccattttcttgcttttttaactatttgccgagcttaaatggaaacccctaaataattggagttggatagatgtttaaatattattttgtcctttggctggggctattagcaatcacttttctgttcatgtattttcactctactttcgcctcattttttctgtctactgattttcacttattttgaccgtcttctactgttgttttttcttttttcccttcccaaacatgtgtccaattattatataggggttagacatgtttttcattctttttgtgtgggatgagtatccagcgatagtgtattatcttcagtttatagtttttttctacttctacaccaattgtgctttgtgctgattcttacttatttggctgtctttttattgttatttggggagggtaatttgaacttggggcctatagttgtgaggagatgtgtaattaccactaggcaggttttcttactgtgatgttatctttgcactttgttttgtgcttcaaagcaatattttacataaaacattgcactctctgatcacgtgaacaatgttaacatttgtattcaactccttgttcatttaacagcttttttatttattattttcttttacaggatgataaagacaagaaaattcaggaattaactgcagaactgagggtaaagaagaggttaagtgcagcatatcgggaacagctacttgcagttttgaaagatgttgaagagcataacggaaatgtatccaataaagttaaattagtttatgaaaatctgagaaaacttgaatctaagatgcagcagcccctgtgccacagataatttatgcaacagtaagtattcgatccattgaacatttccatacatcatttagcttgtttgatgccacattcagattaggtgaaatatttttagtcttgagtaaaggcatcatattatcgagtgctataaatatgtgtcgggttggcccggcttattttttcttgtgctttttaaaatatgagttgtctaatgcaatagaaaaaatatggaccgtattgtgctgtgccaacaattttaacgggtacgctttgtatttttcctatcgtgatttattcaggccagcctattttccttaaataggtcaacttgttttcttatacggggtttgggttcgaatttgtactttatttttgtatatttttttttttcactaatgagttaattattaaactatatgcatttttttttaaattattcatgcagtttttcaaatattgtaggaacaattaaataaataaaaaaatcactagaattattagaaattgaaatatttacaaatagatgctcaaatttttaagtcactctacaaataaattaatatataattttaatttacattttctaatagttttatgataactatttcactagaactcactctcaaagctagcttaagaggtgcctaaatagttatatactactagtagtctagtactaatcaatcacatacttgttaatgtaaggtcctaacattttaaagatagatttataatattcggtgttatatttgaattttattattatttgaatttatttattatttataaatacatgatttattattattattatagggtcttttaacgtgtagtgtttttttgtagtttatttgtgcttacgtgttgtgtctttcgagtttgtcctgccgtgttgtgcttaagtacataatttttatacagtgtcgtgtcgatttgtaatatcatgctgtgttgtgtctaaagtcatatttttcgtgcttggtcgtgctggtgctctccgaacacgtgctcgtgctgattttgtgtcgtgtcaaaaggtgcagctcgtatttacaacgttaatattacctggaaagttaaaaaaaaaaaaacgggntagtatcatcaatattaaataaaagatggttgttaactgttaagtaatgatg

SEQ ID NO: 187466 - DNA, 5667 bp, Cannabis indica
tgagcttaaaagatttccaggttcatatatttctattttcttttaaattttttaaaactataggagagtgagccaaggcctgagcattttttatctttttacttacctgtaaacattagatacttactgtctagccaaccccatggagcttggtttattagaataagaatattgcatcatttacatacagtattacatttcctccctttattgtcagttcactatcattaacttcttctagtatcaaatttatcatgtaataaagtttctactactgtcctgtccatacaaaaaataaaaataaagtttccactactgagaataattaatagtggatggtttaaatgtgaagaagtgcagagaaaactatgacctcctagtatatgttataatcagcaagcttttccttctgaaagcaagttttcattataacatatattaattaagtttgtgatgttacattcaaaagaggtctaaattttcaatttgtagatgcacgctttcattctttactggatgcatatataactctttttacatgataccaaaggattatagatataactctttttgaagatcaaagagctcacagttctcaatcactattattgtatccgagcacaaaatgtctctttttctatttgtttctcaacacctgatttacaatgcagacgctaaaacttgatgagcagcaatttcttggagaggcaacttgtgcactgtctcaggtattacataattctgttagagttcatattttcttttccttaactgcaaaagaaccttcaggatggtctatcaaacaaacaataaatcaagagaaagagagaaagtgagtgagagagagaggatttttagttctttgagacattcaaacatgtgatgcaaagtcaatggacaatgaaaacctccttgatgctcagttaaggaaactcatatattgggaatttgagataggtgatgtgaattctaaatataaggatagcctctgtgatgttatacacctgtaagtgctcattgtacaagaaaagcaaggtaacttgcttggagagtgtgcttgtggacctagtttggatgatggaaattattaaaattgtgcctctcctaacagctataccttatgtatagattggttttatctgtcctctttcagagaggcactcataatgagagaactacagttctctttatcaataacaagaacacctcattcatctgttatgattaagagattaaaaggcaatcaaggattgattcaatcgttgtttttagcaataaaatcagggtttttattattctgtgtgtgtatatatataaaaatatttgaattaagtatttattttcttatttattagtgatttgtttcctagttttttgcaataattataataagaaatcagcagtgttttagaattttcttctctagtatctttctcacatggtatcagagctggaacacctttgagaggaaagcaaactggccagctttaagctggccttcactgggttaagcaaggatgcgaaggaggaagttgctgcttgaacttccaccggctccataattaaaataactagagaaggataaagaaaatgaatgaaatggtcctctgtgtgttatctaccagtaacagaattttattatttcatattaccttctcctgaaatttaaaccatctaaaatgttcagaaaaagaacattacatttttcaagtactttttcccacgaacatccattttatccatgcagataatgattaaacaagacaggtcattgaccatagatcttatgcacagagaggagtccaccagagaaactcgtcctcgacactgtggaaagattactgttcgtgctgaagagtctgttagctcaaagactacagtagagatgatactaagttgtatagatttggagtacaaggatctattttcaagaagtgtagggcctactgggttcttattttatctcttttttcttatgttttgtccctgtttgatatttatttaaatgtcattactgaatataattttcttgcattttaggacccttttttggtaatctcgaaggttgttgacagagacatcacaattcctatttgcaaaacagaagttttaaaaaatgagctcaaaccacaatggaagccaatatatttgagtattcagcaagctggaagcaaggtgagttatctttttggaggtgtaaatctggtgcacgatatgtatgtacttggatacttccgctccaactggagtagatcccacttcctatttttgttaacagggattgtcccagtttcagtttggtccttgagaatgattgcggaagtgcctaaataacattttcatgtgtattttctttattatatctgtcagttcatttttttaattaatacaaggccatactttaatcataattgctcctagtacttcttttggtaatcttttttgctatgtatatacttccatattgaaaatggcatacaactaactcttctctcacatactaattcaatagcatttcaatctatttttgcatattgaattcttccatctctgtttattgacatcttttttttccccctaattgacaggaccagcaactcgtgatagagtgtttcaatttcaatagcaacggaaaacatgatttgattgggtaaactttttattttgtcgaccttcatggtttctggatttcctgatttgctttagccaggtgctaaaaatgcttatttcctgctttatcagaaaagttgaaacatcattagcagacttggaaaaacttcaattcagtaagcaaggcgaacagttatatttaccgacagctgtcggacatcatcacgagaacaaggttcttacaacataaaccatattttctaaaccctgaacaatcctttgcttcttgtttactaatttctaactggtaatgcaggtattaaagagccggttatttgttgacaagttttccgagagtgttcaacataccttcctggattacttagcagggggatttgaattgaactttatggtcgctattgattttacaggtctgaattatatatcttctatactcaaaggcatctagccactgtagcttttaggttcttgaatgcatttttattaattaatcatttcccttatttatcagcttcaaatggaaatcctcgcttgcctgattccttgcattatatagatccctcaggacgtccaaatgcataccagagagtgagaaatgggttccgctttgtttacttttcacaagatattttttttaaagcgtccctgtaataagctgcctaattgttgttcaggcaatcattgaggttggtgaagtggtacaattttatgatacagataagcgctttccagcttggggatttggagcccgcccaattgatggtccagtgtctcattgtttctacttgaatggaagtagtcattactatgaggtcaattggttaaagatccaagcttgttctttcatctagatgtttgatctattattcgttgaatgcatccctttactcaccatacatatctgtatctcaggttgaaggaattcaaggaattatgacagcatatgcggctacgtaatgtttctcttgcagggccaactctatttggacctgtgattagttacgctgcatcaattgccagccagtctcttgcagatggtggacggaaatactacgttctgttaataatcactgtaagagctagtgtttcacatgaaacattcttcatttggtttcttttctttgtagctctaatggttgtctcggttgatatcctaagctattataatttataattttattcattttagcattctcattatgacagttcctttctgcaattactctattcgggttataaaattatgctatttattgcagaactacattgtattcttacttcataaaataccatttctggttcctgagctctgtttctgttttataaaaactgaactcttataggatggagtagtaacggatctccaagaaacccgagatgccattgtaaaagcatctgatctgccactttctattctcattgtcggggttggaggagctgactttaaagagatggaggtatctatgccagtttgcttggttcttgtctagatatttgcaaacaaacaaacatatactaagtggttctaccacaaatcatattgcatacgaagaaactgatttccttgcataactaatcgtctgatctgctattttgtacagattttagatgctgacaagggaggcagactcgaaagctcatcaggacgtgttgcgtctcgtgatattgtccagttcgttccattccgagatgtacaaagtaagtttcgccatccttcacatttaaatcaaagcctaaaataagtgtcaaaaatttgtttttgggcagttgtaacattccttatgccaggtggagaaatttctgttgttcaagctctactagcagaattgccttctcaatttctgacctacatgcgaaccagagatattaaaccaaatgtatgatcctttaaattgtacatatgaaaatcaatttgccaatatttatcttcgtgcatttgggaaagaaaaaaaaaacttttctttttaatggtgcatggtaaggtccctgtttttgttgtggagaatggttttatttcgtatggtcaaacatttggactggactgagataagatggctgcaaaaaatttccatggcctttatgaagacttggcaaaagttctacacttaaatgacacgacgatgtaaaggattactgggacagcaaacattgaagtttaaggataagagaaaatgttttaattctctttttgaaaagaaaaaaaatccaaaaaaagaaaagaagtgatacaaaatcataaattcaggtcttgaattttctgaaagtcaaattttcaaagttgagcaacagagaactctcctctactcgtctatttctcttgtacacaacaactttggtgtgcatacttttttttttttaaatgaatttgattgattgatccatggtaagctgttctgttctgtcattacttattagtcaattaaagaacaattaaagatgagataaattctattttggatcttttttcttgcaaaagttactaatagaatttttattttgttaaatgataaaatgaattttgttttttcaaaattgtacaagtaaggtcatgaactgagtttttattttaaaaaatataagttttattttgttatttaataaaataaatggtccaatcgataatttttgtaaaatacaaagtctaaaataatatttacctttaaagaagccatactagataagaaaccagtgtactgattgctcagtctgtaaataaaatcccttgctagcgtttattaaagagtattgaaaaccatgtacttcattagtaatcaaaatcaaattcagaattcagtgtgtgatgaagttagtttttcaacaaaatcacattcatcatttttctttttttttaaaaaaaaaccactttactgtatatttatcttattttgtgtgcaaacataattaagctttaaaattacttgctcaaaaacctttgactttcattctatattatttttctaattaaaaacaagcaaatcattccttaaaaatgaaaaatgaaaaagaatacgttgactttgtttttatgaacgtgac

SEQ ID NO: 187467 - DNA, 6051 bp, Cannabis indica
gttatacttttggttggttctctgttcgttttagtcgggatttcattctccttttgtagttgagttctagttttttagttaggtgtttaaatctaaatttagtctattaagtttaattcaaggattttattttctaatacttgttttttcttggtgttgtttgttttttaaggtagtatttttgtattacaagttcgaaactttggctttctgtaatagttatcaacaaagaaatggtgtttttaatgagctgggggtgttgtttgaggatgttatagctttatcgcctaaatttttgggggcagttttgtcccatgtggtttgcgataagaattttgcagcgcatggtttgacaaaatatgcccttcagttagacgatgagctatcttgattcaaagaaatgttgccgctgtttgtggattgctgcaatattaatcatgtgtgattttgatcaccgcataaaaaaaaattaatttagtaaataataaaataaaaattaaattattttaaattaaaattatttatttctgctatcaattgtcacgttgttatttaatgaaattggctcattctattcaaataaaaaaaatatattttttttctaaaagaaaaacatcttcttttttttttctaactaaaaacgttattgactaaaaatatttatttacttaaataaaaatgttttacaataatcaaatattattaaaaaaaaaacttaacaaaataaataacttttgtttctccttaccagataaataaacaataatgctaaggttgttggccttttttcccctctaaaatgctttttttttttttgagcaattacacatatttgtagtgattattttattcttaatagggttcttttaatattaattcagcaataaaataaataattagtagcaataattttattgagatggcataattataagaacattattattgggtactaatggtgcctaacattttctaggtatcgctccacaattagttaacgatatttccttaaaaaaaatattttcttaagttatatgggatccgatacttaattatactaataagagcgatgagagtgctaggtaccactaatactttttagcaatctctaattataataaagggataatattatgtttaattattagatacaattgaacttggtaacaaaaaaagatacaattgaaccaatttaaacatataacatttgtcattctttaaagcatctctatactatattctattagatatgttttaagtattaagttttatataatttaattttaaaaataattatgaaaaaatcactaattattcgcaagtcgacatctcatgttacggttaggtcagcaccaatggttacgctttaaataaacttttgtgtaatgagacaacctctcttcactttttacccattttcttatttggacaaaacattattctagtctcttttttcttcttttttcttttttaaccactctactattcatccatatgggaaggagtggattccaatgttatattattatacttattacatatataaattatagtttgaatatttccattttggggtttggaaacagaatctcactagcagcactaggtgggtaggagaaccttaaattatcatataaatttgaattttatatgttgagatatttatttatgttttggtctgttcacttctggaccaaacttccttaatagttggataaaattagtgaagtaaagttcattattatatggagaaagaggaaagtttaatggataatatgagtggccttttcccactttggcactcttaaccataaccccagatggctacacaaaagttcctctggctttatactcctgttggagttgcataatatatataaatatattttcatatataaaaacaaagaacaaagtccattacaaacgattatgaataaacaacaaacaagttccataagaacaaggataccaactcccaaattccttttaagtgatcatacaattctggtttcattgttattatttaactaggcttgcttttcttttggttagaattggaatcctaaactattttgtactgaaaataattaatgacatgttaattaagaggtgaaaaaacatgttagttatatggaatctgtgtttgtgtctctctaaatgagtttatgatttgagattagaaaagtatgatctatacctctgtgctaatccaaacatgcccaaagtgcctccaatgtgaagcattaccactttggtgtcccttttagtttccttttgactgagtgttgttgccatttcccaagcagaaagagtatacatgggatcaagtaggacaccagttgtctgtgctatgtcttggcaggcctctatctcccctttcaatacatttccaaatctgagacacagatcagatcagtgtggtcttgtaaaatgtaaaatataaactcaatttatggaaaagtagcaaatatgtatgtcttgtcttaacttgtgctttatgtcattttattaaacaagtatatcaaatgctagataataaaagtaaagatagtttgaccttttctttagtaaggaatcatcataagcatagcacaagtcaattacactagattagagctactctaagcttgctccttaaatcttcagtcaaattctaactgaaaatagcttggtgctaacctttattttaactatatctttattctggctaacagtgattgatgttatttttttttaattttttatttttaaattataattattatttttagagagtattgcaaacaaaataaaatagaataaattaaagatgggtgtggatcaaaattatgcatgaatgaaatacaagtaaaaatatagactgaatgtaaggtgataaacattttatgctattaaattaaaattaaaatgatagcgcaatttagggcaacttcaaaagagctccataaccaatctttttagcaaaataaagaaagaagtggactttagggtgtagagtacttcaaccactccctaaattttatgaaagagcataaggtgttccccacaatactttaccaaaatacaaaatttattaaataagaaaaataatctaaattagatcaattcaaaggaacttcctatctaacccttttagctaaaatagggagtggagtgaactttgttagcttaaataagaaatatgactgaacttgaaaagaaaaaaaaaataaggagctccctaaatcagcttagctaaatttggctagaaattaaagaacatccctagaatagctcttactaaacaattcttcaccaaacaaaacatttaacattattatttccaaaaaatcacatgaacagcttgctaagtgtgatgagctctcttactttaaaaatagagcatttaaggagggattgggtttatctaaggttcattgtgtaagacttttattttggatttacattaacattttaattgttttactacaatatgggtataaatagtttttttttttttgctcttttggagttttattgttaagttctctccctaactttatagctacatatagtctcatcacaattgtatgcttttggttgatcgcataatctgcttctaatttagagatcttaggaggaagacttagttggttattattttctcatcacaattgtcccctctctaactttataattacatattgtctcgtcacaattggatgcttttggttaattacataatttgcttctaatttatagatcttgggaggaagacttagtaggttagtattacactaccaatctccagtatttctcaattatctcaatagataaatgagatatattttctatatcattaaattactcatatatagtgttataaattgtatctgtatgcaatattgtatcttagtattttataaatttcttacacactgcacttcctattttagctcaaacgattggatagaaattttctgcagtgtctctatcgaaatttagatattcataacccactaaagatttattagaacttgatgaattgattccataaccaaaggttaaaaaaagaaagctagtttagctgtgaagattataggaaacaactatcaagagtactgcaaacttagaagatgaagagaagcttactttcgcggattgtgacgttctacccaatccacaataccattctctagaatatcatccaatccaattcctatggaatccaaatcaaaatgcctcttgaaattggaaatcaagtgtttctcttgttgtcggtaaccctcaattgtatcagctagcattacagcagtgatctcccatgggagcctgacatgaatcaaaaaccagaaatattgtcaaaatatgatatgatatgcttcaattttaagaacataaaattcaactagtacacaccctaagcaaattgttccaattcctaaaccaacagctgttgtcccagttccagcatctacaacaagtttcaatgccttttcttttccaaataagtgatcttgagataaatactgcactagacgaattgaacctatgaaaatgaaaccatgttatggtaagcttccaatgacaataatcagttttccttacacaatcataaaagggtattatttttctacaaaagaatatatagtgaaagtaaaaacacttccaattacctagtaaagctacaacatccccagcaccttcactaacaataacaacccttcttgtattgtcatctttacaagcttctttttgtgcagattctgaacttaaattgttttgagttagagaagcctccaaaatatcatcaaacctaagaacatggccactacttcctgccacataatcagcatggctctttagcatctttgttctgtcagcatatacagatcttggaatgtaagttacatttccatataatgacgatatcaagttatagcccgtctgaatttcaggctgctccccgcgtaaaagcaaatgtgactttattcctctctctgcacaagaaacagctgaaatataggcaaagacaatcacttagtagccaacacttctcatgcctcattgtaataaagtaagcctccagtaactgcagcgacgaagtaccaacctactgctgctgcgtgtgcactttgacaccctccacatgtaacctggaacaaattgcaacactataagacaatgctgaatagtattgggattcaacaaagtaaaaagaagagtagaagaataaatagttatgactcactagggaacagcctaaaaaggatacaattcatttaaagatgtaaagtccagcactagaactttgaagtcagatcaatctaaacaacatttcctccatcaaattattactgatgtaacagtcactataaaacaaaaattattcaaacatacaaagcagatagtacataatgaaataatctgctgttttctttaaagtaagttctttaaaagttaagcttattagcttatgctgacattcttcactctgaagatgtaccccagattcacatggtctgtggtaaaattaaaaatacaagagggataactcaaataaggttcgagtccgtgttggatacttacactgcacagcaattgttataattttattgtactacaggatcaggcgggagcctagtttcgaagtaaaacattaaaactcaccacatctgtcaccaaatgatcttccacaagaggaaacaatgcatccaattttcttgatttattgccatttactaatggatgcaacaaatcatccctcacaacatagaaagatggttcttggctttccttctcaatcatttcaagaaaagggtgtgttactttctttgaagataatattatttgctggattttggtatcaggttttggcaatgtccatcttctatcaagcaatgctgccacaaactcttcacgacttaatttaactttgggaattccctgaaataaagagtgccattaatcagctataactctcaatacttgtaaactcattctcaaacaaagaaaagaaaaatgactcaagccaatgagttgagcatcaagcaagattggatttttacaaaa

SEQ ID NO: 187468 - DNA, 3209 bp, Cannabis indica
ccgaatgttcccatgaaaaaacctaaaaaatattcacttagtagtttcacgatctggtcttttcattttcccgtaagtcccataccaatgtaggtagtcttggttgggtatgttgggtgaatgggcacttctcgtaactccttgactgcggagtgttgctttttggccagagtcaaggagttaactaattgttataacttgtttttactcttcaaggatgaggtgtaacattcgatggcccccaactgatcccccctgtatttctcttacttcgcctttgcatgggaatttaatcacttgatggtaagatgatgcgaccgccttcatagcatggatccatggccagctgaggatggcattgtagcccgaggggcagtccacaatcaggaatttgaccgatttatttaccccattagcgtagacgagtagttggacaaaacttcgggcgacaatgctctcctctaaaaatccaaccaaagtaacttgggtttcctgggtcttcaaatcttcgatttccattttcttttaaaccacaacaaataggatattggcagagcttaccgtgtctacgagcatttgcttcatacgtacgtgggccacatctaaggtgataatcagggtatcgtcgtgagggtgttccaattcagaagcctccccttggctgaacaatatttgcacatcgggtccctcattatcaatcactgtcattgttttgacagagtggatccggcgagaatgagctaatgaggctcgaattgaattctcgcttaggtccaatcccccagatatcacattcacagttttcttaatgtacggcggggaagattgatcctaattcttatcatgcccctgttgaacatgcagtgccgaatccacaatcaaacaatcctaaaaaaatccttctttaactaacctgttgacttcaatcttcaattgtctacactcgtaggtcgcatggccatgttccccgtggaaggcacaatattggttctatcccttttatcgggatcagtagtcattttggcgggccaccttgtttctttcattacccttagcagtctcattagctcggttagcatgatggtatccgaggtaactcttcttcgttctgttggttctctggttgccttgtttgtcccatactgaccatcacggctcctctagtgtttctgtcgttggcctgtcaggtctcatttctgtgatgcagacgtgcagctgatactcgatcttttgtttcaaacaggaatgaatctcccagcgccgatgtttccctcgacacctcctcagcatgccgtctttcttctacttctagagccacgtatcctcgtgccatggtccgggcccttgtcaaggaaaggcatggttccactattatcgcatttttttttaatctgagccatgtagtagcccctattttagtgcctttgttgctaccgaatcagtgcactttgggatgctaacatattcctcgctgaatctattaatgaatttttccaagggctcatccggtccctgatgtattagcatcaaattcgtatccacctttgcaatcctgacacttattgcaaagtttgcttgaaacctcaaaatcaagtcttagtacgagtttattattcctgaggccagattgtggaaccatcgcagagcggggccccttaacgcctgtgtgaaggtcttacattttattgcttctaagtcctccagcagaattgacacagttaacaatttttgctcaaactaacatacatactctgatgggtctcctgtcccattgtattctggtaactttggggctatgtaacgttgcggggcctccacgcgtaaaatataatttctaaaaggtgagtgggtggatccttccatttgtgcccactcgctgtgtatccctacttggctctttgcttccaaagctagcagcttattcaacatcatttcctgtagcttctctacttctttattcaccactgaaaggtttccaacaacaattggtttggtgatctgcttccggggtgctatgcaaagtgcttctccttctgttatctcctccacttcctccctagttcttcttgattggtcctatgggtgtgctatggctcctagtgctgctgggttttctttcctcccagatctttcatgcatgcactgagtgtggttgccggtgtgattgttgatgtcgttgtttcctttttcagaggtttcacccacttgttggttgttcatttcttccgcatgtgggggacgctgatatccttcaagaactaccttcatctgtccgttttcattctcgagtctctgtatgtgttccttttggagagcaattttagttccttgtgttgtcattttgtcctcctgttgctttaacctttccagaatctcacaccatggtgggccttggtgcaacgcttcattgttaacgttttcggtgttcacctgggtttcatgagtgttaccgggatcatcaagcgaggtgaggtcctcttgctcattcgtcatgtctattcaactatttttccaaaaaatttccttctcttttttttttatcgtgtgtggattgtgcggcgaaaaaggtctcctgaaaaagaactggttttcccacagacagtgccaaacgtcgcctaaaataatcgtaatttttttatgaaggttttttctttttcagttcctaatcccctcctcctttcacgtagtcccattcttatttatattgtacgtccttttattgcatggatgatgtgtccttaactcaacatattcttgacgcgtgtcttctttctttgctcgtctttgtccaccacgtgtcttgttgttgggtgatggctgcttttttttattgtccgttggatttggcggcattgtgtcttatttctgctatttatcttacttctttgggcaatggtcttcttctgtcggaacaccttctgttaatcgtggtgaatggggagatcataataatgactttcgtttaatgccttttttcgacgggagtatttatttgttgtattttaaaacgttattgctctacgttacccgactcttcttgaggggtgaactatccgtcggtgggctagatggaaggtcctcttgagccctgcttgaacttgctcatcttatggcttttcttccgtcgatcctaggttgtatattttaaaccctgacttattgactttccttggattctaccgtcgtcatttgtttgcctttctagtttt

SEQ ID NO: 187469 - DNA, 1857 bp, Cannabis indica
atatgaacctggaaagaaactgaagggtaattggcaagtgggtcctcttcttcttcttcttcttcttcttcatccatgataagaagtgatatttgcttgcttaagtctttaaagaacaaatcatcttctaattctcctgctgcaatttccatacttaataaaatgagaagggtttagcttgttttgtttttctaaaataaaaatgtattctttttcttttagtggtttgtaataagtaggagtataaatagggaaggtaaagggagtggcatggggttggaggtgagtttaactagatgggggaagagatttgagagcatgtggggtggtggggtcttaactggcagttggccaatctgtcttcaagtcccacaaccctacaagaatatcatatagtgtgtcatgatattatccagtaccaaaaaaaaaaagatgaggaacagcaggcaacaacccacacccagatatctcatccaagatagactcaatccttttatatagctaagttgagattggtactaaagttctccacctctcatccatatttctagatactacttatattaatatatttatagggaatatatgtgtatataataagaaaaaatagtattatatgcttcaagattcatagtccacacaaagaattttgatatggggttgtgatataaaattggaagtttgaagcaactagctaactatgtagctagcataagttgtttgtttcatattataatagtatcataatcaatacatgtaaactagagtgtataatcatactttgtgactcatgacaaggaacttttaaggtccccaaatgcacacattttgttaaaagacaaaagtaattacgatggtttgaaaatgaaatgttgtatattatggcaatatgaagggaggggtctactactattgggttttaaatgaaaaaaagcaatcaaatagatgatgaagaagaaaaataacagtgatgttaattggctttatcattggatttaacccctcaattgttacaacatgtctgccagaatcatttttggggcagatggtggactattgtcaaacacttgcaaaggtggggtcacatagctcataattataatacacatacatatataggtactctttttcacagctagctctgcatggattcgagaagcaatatataatgtaccatataaaaaattttggttgtgagagaatctatgtgtgtatattttcaaaaccccttaacccttttgttattttaatattatttttttctacactaaaagtaaaggggcatcaaaataaagatgaagataaatggaaggtgggtcaatatatacatataccaaagcattaattgactaacatgtattatcacagtcttttccacttgttgagtaaactttatagcttggcttttgcaggaacttcactcttaactgcaaaagaaagagttgaaattatattagtgttgtgttgtgttgtggtccacttatcacacggtttgctatctggcaaagggacccacatccacacatacacccatatgcttttgtttaaccattatatatttatgactatgagaatggatttttcatggctttctctactttacttcataccctttaagaaaaaaaatacgtcttaatagtaattgcaatcctttatttcctcgttccttggaattgagtgttagtttgcagatacaaacttgagctgtcttatttaaatttttacatttgttatgttatgtgtggtatggtatggtatagttgaccctaagcagccaactttggcctaatctgatctagagtagacaagatatttagtgagactaataaaatgggattttttcttttcttttaattt

SEQ ID NO: 187470 - DNA, 1756 bp, Cannabis indica
tctaaatttcaattcttgattccatttttgttaggtccaatctcaatctgagttttcagaagatgagctactttccgttgttatcatgaaggtaccatttttcacctctttttgaaatgcttaattatgattgattgttttgtaccacattttttttttagattcacaatgtttaacatgcttccttggttgccattttaacgaataagcgattgcaatagaagatttgatctggtcttaattacaattgaaattagaaacgaagaagataaattgaacattggaatgcatagaccttcaccctatgtactgagttatttaagtggctttttttttttgtacagaatggtcgaaaagttgtttgtggatcacaaaccggaacactcttactgtactcttggggatattttaaggattgcaggtattcatattgaagatgtattactaatttttgtttttaaagagatcattagtgttgtaagctgtgtgtgtcctgtactcttttaatactaaataacctttctcttggtagtgatcgttttgttgatctctctccgaactcggttgatgctttgctaaaggtatgtatactactatcaaatttgtttctctccttctctcgccagctttatcgctcatagtttatgcacttctggtgttgtagcttgatgaagatagaattattactggatcagagaatggactcatcaagtaagggtttgttttagaatttgatttgatttctcttaattttttcttatcttatacatatacttacataatttcaatgtgtctatatcagcctggtaaacatattacccaacagaattgttcaaccaattgcagaacattcagagtaccctgttgagcgcctcggtaaatatcatctggctgacattttgtgatagcaataggtttcatattttcttttttctatgtttaattaacattgttgtggtttggttttgtagctttttcccatgatagaaagtttcttggaagtatagcacatgatccggtgatgaaggttcactttctctttctctctctttcctatagtaatgttggtgtggtgatcttgaattatgacaatatttttagctattaatctctgcatgtgcatatttttaaacagatatgggatttggaagatatattacaaggttcggaaaataatacagggagtcaagccgctgccgcagaagacagcgacgacggtgaaatggatgtagatgtcaatccgccaaagtcaaccaaaggtattatttgtttatgctatttcttcttgcaacactaatagtgatttagttattagtcatttttctattgtttgatttttgatccgtgcttgagatcagattttgaagtaatagttttatgttgatttcatgagttgaaggcttaattaaattagttcttccaaagatattatatagggaggccaaaaaatttccatgtgtttacaatatatattgtagttatagtagaaattttgccaagttttgaaaaaaaaaatcttaataatttatggttccgaaaacaggttcaaacgatcccaaatggggacttttttggtgccccaacatgaaaattgtcgtatgtatgatgaatttaaattaaaaaaaaaaaaacaagttgttcattctagaaaatcatattttgagccattaatatttgacaatataaaaattttgatataagtagcattagattttaagttataattgttaatatatttatgatttagagtgttagt

SEQ ID NO: 187471 - DNA, 1048 bp, Cannabis indica
aattattgtttacgtacgtaatagtgtagtggaattaaatgattaacagaaggccctattactgacgatggccaacttattttgttttcatataacaggtaggtcaaggatagtttttttttttattattattattattagtaataaaaaaatataggtgaagggatacaaactataaagtagtagtgcgatattagtacacacctatatatatatatatccaaactcttgtaaaaaaataatttaggagaattaataattatttttattaaatgtggccaatagaattcaatttcaaggagaaaagttggctcttggggtcccaaataataattttttttattaaatgtggccaataggaatttttttttttagtaaaaaaaatagtaattgccatgttggcaacgatgcatgtcttattaatgaagtaatataagaatatattaatatcaattcaatgtaagaagcattgtatattagtggatttgaattgattaacagaaatctcttctttttcttgttatttatatatgtatgatgggattagagattttgagacagagaagagtggtgtggggaaactctcttttatagtgggatagtccatgtatgatgcaacttttcctgcttatatatatatatactagtgaggtagctcattatttatattgggaataaacaaaaaatctggggatgtactttttctgtggagtaatatctggttatgtattaattctatataaatatatacatatatcataaatcattattaatttaaaagtttgaataatgcaaactgacgaggattatgaataaatggctccacttcaggaaaaatatataatgcttactcagagctactcagcttattatttaagcaatttttgtatgcttataggtccagtagtgctctatatcattggtgacatagatgtataccactaaagtttccttatattatattattattagccattttttccattgttgttcatttatcattgcttaattcgtggcaccatgatcaaaattaattaggtcatctaac

SEQ ID NO: 187472 - DNA, 1663 bp, Cannabis indica
cttcacagaaaaatgcaaaatagtacccgaatttgtcctatggtatccaatctatattgaggaacctcatatttgacataaatcaagaatcatggaaggatgtcccaacccacttattgtgcataaattcaaaatgtcacgctaactctcgaacactttctggtcaatattaagtgggatccccttcataataagatagacaatcaaaagtctatcttttccaatattaggcatgtgagtgttggggtaaatgtgagcactaacaaaatgagcccaagcttttgctattggattcaactgacactttcacaaacatttaatctcatctcctgccatgttccactcagctccctcatgggccacaacatcaactactttttgccaagtgagctccccattattaaataatttagtaacatcattatcaggggtaagaagaatgtgaggaatgtcatacacaacattgaaagctgcaacagagattgtaacatcaataccttgatcatatagttggcatctctttgagtaaaatttgcataaaactcatacattagggataagttaggctgagagggtttgagaacaacaaattttttctagtgcctcctgataatttctacccgaacaacttccatggaatcatcttcaaaaggttcctccctaaattcaaaacaccgctcaagaataacaaacctcccacaaactctctaaaaataattagagactaccttattcataaatttgttagtggcagaattaggttgaggttgttacggtggttacctttaagaacgagaaccaccccttctttgcgccataatttcaaagaaattttaagaaaaattagacagcactttcccttacttttcaatgatccaagaattcaaaattaagcacaaacacacaatccaactcaacaatataataatccactagatagttcttcactattaaaaagatttcactattcatcatcttccgatctcaaaatttcaacaaaaaccaataattgaaacttaaatatccaaaatccacaatcaaagagattgaaaacttacccccaatagagatcctaacccttggatctcctcttgcttgaagaaatttaagaaatcaccatggatgaagcttctcttttgaacatttgaattaaaattaagaaatgtgatatggtttattaagaataatgatgaagagatgatgagaatttgatgtagtaggaagattgatgaaggaaattgattatgatgaccatggagatgaattatgggtgtttggggctattgaaatcggaggagaagagaaaatgtgggttttaggtttttggttcgcgaagcacttttttatagcagcaggcaacacaaggctgcaacttggctgggaaggccgcaaccttcgaaacgaatcccaacaccgaagattcgtgcaaggccgtgactttcccttctaggccgcagctttaaaaattttacaacttatttttttttttttggaaataattttcatgattttcacggtttaaaattataaaaaaaataaaataataaataaataaaaacttaaaaaaaaataaaagttcaaggttgcctttttttagcattgttttttttacgtcttgtagccaaatattgtcccattctattgcttaacttaggtagtcttg

SEQ ID NO: 187473 - DNA, 4840 bp, Cannabis indica
atttattgttatctttgtaaaacgaaattttcttggaaactatttttaaagtacttagtaaactgtaaagttgtattttcgcatggtcttaaatttatatagttacgcaaaaacagaaaaagaagagtatagtagtaatatttaaattttgttttctcataattaaccagttttgactgagtacgaactatacccattcaaattgcaaaagtattacatccattactaaccaagattcccaaattgatagtaacaccgtcattcaaattcatcatattgtcattgaccccatttagatttcagtcatttaagctattttcttttctttctctctgttttttaagttttttttttttggttttttttttaagtttctttctctagtaattgctttttatacgttatatcattatactatgattaacataatttgtcttatgtgagaatggcttctttttttccctttctaatactataaaaccatttcttaaaaaataaacaatataacattaacatattttttttatgttactagtttctaaatgcaggtgttcttttatcaaacaatatttctaataacacctgagcattgagataagaaaattcatatcgagccatcgaggtgctagtaaatatcttcacaaattaatctcttcaataatacctacttattgttcctttgtacagactataaagctacactagcagctttaattttactttctcgactcgctatccattcacatatgatggaattcacctcctcaggcagctcgtcctggggacaatggcctataattacgaggctcatcagatataatttacaatatcatcgaattataaggagaaaacaaaatgaacttgcaaacatttttctcacctgcatttaattccttgattactaccctgtcgcagtgctctctaagcatagccaatttcgattttgagtcagttattggatctttcattccctggtaataagaagaaataaatcaaggtaaaattatgatggttacttgactggatatatccaaatcctgtttagatgtcttacctggataactaaaaccctttcctcaaaatctttcaagagataattaagaggaagtgagagattaaagctgaaaatactttccaagaccacaagtactccaggatcatatgactattgtttaggttaaggcgatactagagataatcctttaacgggacacgagctattcaagcagagagagctatttcaatctaaatatacagaagtgaaggtaaaggatactgctctcaacatttcgtcaataagcacatcatcgactctatctgttttctgaaaaagtagaaacagattattaatacaaaagagtagtaaatgagaaaccaatttcaatcaatactacttacaattgggtagcaattcttcactatgccttttaatcttgaccttaagtagaagacaaggagtcgagcacccagccaagcagggcctgaagtttgtctatcctgaaacagctttcagttgtcagcagctgcaccagataccatatttaaagataagcattgcttttagactcactttactaaatggcacaaaggaatatcctggaatgacatttccagcactgttgatgaggataaccgatttggccagagtgggccacaaccacgcaaggatagcagcaaaataacctgtgggcaagaaaatggtaacatttatgcaaacaagttgctatgggtgtgtacatgtataccccttagtcaaggaagaacagaggggaagtaataaaggatggtgtagtcaagtaacaaatatactttaaaataaaagcataccaccaattgagttcccggcgagatgagctggttcacccacaacctcaacaacaaaatctcttagcaactctgcccacatgagctcagtgtatacaacattaggtttttctgactttccaaaacctaataatgtgattgcccaaactcgatacccccttttagctaagtcatatatgttatcacggtagtgctctaaaaaggcaccaaaaccatgaacaaggagaacagcaggaccctcatgacccgcaacagtatactgaagaaaaaaaaagtaactctcaattttgagttactacctaatttcagtaattagattatggtaatgtgtgtacatttaactctgaaagaaggctgtaaaagatatattatactaaaagcatttgcaaacagcttacctggatcaaatggcccttccatctccaaattcgaatgcgataatttctatcatcacttatttgacttctaatagacatgagccaataccactgccaccaaaaacagttcatataatttaatacatgctcagacatccaaaaatcaccatgaagacagttcaccaacaaactaccataatcaaacatgactgatttttctccattactgccaaatttagatgtaagaatcatcacctccattgagcaaacagcattaattgctgcagtagcagagactgttgaatatccgaagggggaaaggaatccagcatttcgtgctttctcatacttgatagcttcataatgcactctccttctagatacaataccaagggaaagggcaggtccaaagagttcaatgaaagaagctccttctcgagattcagtatagcgcaccctttcatgaaccctgcaagaattggcattatcactaatcagtctcaaatccaaatttggaaagatgtatcatttttatgtcatttccagataaatcatgtttattttgctgtttatgaaattggggacatgataattcatacaagcaattagtaaaacatatgccaaatcttgcttctcatccttagtgcatgcagcaggttcactaccatgatactagaaagaatcattaatttatttttaaatgagaatattctaattaaagttgctaaaaatggcttcagcacgataagaacatttgcaaatattgttacacatccccttgacttgatcctaaacctcgagagtacaatgagaaaagcaatcattacttactcctgccaatcatctcgagctgttccctccaaatatctcaagtaagcagccaatgcatttactacagtgtttgtcccaccccctacggcacttcctccttgtgtgacaaaaacagaattaactactcttttctgctggaatctctgggcactaattctgttgctttcaccagtgttcatcgattccttcatcattatactctcagctgacttatccttgattgaagtccaactctttcttaatttacatgaattttcatctataaactccatcaactcatttaaggtgggaacagaacctaatccatggcaagttcatcactctctacaatgcaaacttttatgtgcagtctaaatataaagaataattccacttgaagtatatgcatgaatagattggtcaactgaacttactccaatctaattccatgtttgtgggagatagttctggttgtggaagtggtgaagatacagggaatttacgtttgatgaaatcatcatatgaagctggaagatccattaagctctacacaccataacaagggaaaaccagtcactcactcgaaagagaggtagagagagagcaaagcaatagaccataatcatcatcacctacctctatatcataaaagggagttcgccaaagaacaaacttagggctctcctctggaggaggcaatgcctgcaaggtctccttggcaatggtcatcagcttcctgaggtcgtgttcaacctcctcctcggcatatacatgagtggcatttacctgcttcaatactcagccaaaaaaacttaaaactaaattctactgaaaagtttgaattgatgcaaattctatttagcaatgaaatagtaacctctttcacaagtttccgcaacacattttcagcagttcccaacctaatcactagattagaacctttgcttctcaaagaatttctcaaatcctccagagccaaaagaaccatttccaacatttcatcagaaaatcctaccaaaaattaaaaacgattgtgctcaaaatcaatcatttatcgaaaacgagtaactattaaaacaaaataaaatcttaagagtgatgaagagagagagtacgggaaagaatgcggtggtcgaagacgtagagaggaactaaatcgcggtggtcggaggcggcgacgagggccgggtgatcgtcgattcgaaggtcgtgcttgaaccagaggacagcaacgcctctcttctctccatgaatctggctccgggattgagctcggagtagaaagggggattgggaaaagcgaagagtgtttggggagaaggaaagtgagggaaaatgcggggaagtaagtgtaaagaggttcgccatgataagaaggaagaagagagttgtaagtgagtgaagagttccattaatagaaacagaaagaaatgaacaatttttgttttctatttatatgaaggagaaaatgtgtagaacaagtgtggccattgttgaagcttttagagctgagaatctttaagccatttttgatttgtggcggagaagaatgttccattaatagattcttgtcttttgcctctaatcgtaactttttttttttattttcaggacctttagattttgtaatttttatattgtgcccacaaattactcaattttcttctaaattcctcagtgaaaaagtatgttattactcaacccctttctcgctttgaacggtaaacttgtgttgagatttattttaaaattattttgaacttaaatctaattttgataaaaaaaaaaaaaaaaaacaagtaaaaataaaaataaatcataattgcctt

SEQ ID NO: 187474 - DNA, 5351 bp, Cannabis indica
cgccacacaatctaaagagagattgcttaaaatagtcaaccaaacttaatgtaccttatcccaaccactgagctcattgcattcattgttatttccataattactactattaagtgggacaataggttctcttgtttgttttttgttcacagtattgccaatttgtatgaaacaggagaatataaagatgcagaagaagaaggatttagataaaccagcccaagcacctgtttactggattgaaatatctgattctgtatcacgccgctgccaatttgaacatgacggtcaactttctgtaagtttcttaatcactgcattctttttcatggttccattaccattaggtgtagtcgagagatgtatgggtggggtttcctaatcatcctatttgtagtagaataagggcatctgacatctttgtggaaagccttgtatgtatgaacttgatatgggaatagtatacagtctttgataagcgaagacaggtgagaatcaagcagtaatatcattgagcgggagtgtcttttgcataaacagccaacaagaagggatttttagggatatggtgatggatgtatgaaccaacggatgatgcactgcatcaattttggttgctgggttatgttcaaaccacgagatatgacttgatactgtggatgaaatcgaaaagcctttattagcaatgtcgttgtacaattttgagataaactatctgttaattttttttttttaactttgtagttgattatctccaaattgatttagtagtgttttttttcttcttcgaatttctctttagatgcgtgctctatgttgtcttttgaatgcatcaagattgagttgagatgaacacttgattttactgatgtacttaactggtatgggtttattttatttgttgtttcaattttatgcaggtgtcacttgttgatgactcaagaccaatagtccatagagtggttgagtcctttcagaataaatttttcccctcaggatatccatacaggtgacttgattggttcatcattgctggatgtgaaactagcactataacagatatatccctattaattatacgaagattatggtgttttacttatgtagtgtcaacgaaggatatctaagatacacacaatttcgagcgttgcaacacttaaccagtgcaacactctctgtgttatcaactcaggttatctctcactctctctctctctctctctctctctctctttcatataaagatataaatatttacagcattttctagaaagataggcagaaaaaaaaaaaagaagtcttaagtgtttttcctttgtaacaaaagatttgaggaaaaaataaaactccactaaataagggatcttgtgaaccaagaatattgtgtaaagaaagcagaaagtcttgaaattactttgccattgaggacaaaagtgtagtatggaatttagtttctctgacaatagttgcccttttccaacaaaatgacccaaataattgcctacacaacggaattctacataacaatgtctaccatcaccatcttatacttcccctaacctatggtctttttaatcatttatgccttgcatctttcaggcaacaccctgaaatctgcttctttcaacaacttataagaaagaacactagctacctataatgcggaataattgttccagtgttttactatccattttgcacattacacaccgagagggatttagagcacacgcaggcctttttgatgtacaaaattacaaatattaatcttcatgagataaactagctatgaaaaaactttgattatgttaggaacggatgacttaaaattaaaaatgctcaaaagaagaagattgttgtgtttttcaaagcacaaatatctgcaaatgtcaggggtaagtaaaggaagattttgaaaaatggtaggtaaccccatatagacttaatcagaaatattttcagaatctgagtttctatctcgaggagaaatgagaaaatagaagaatttgtataaaaaagatttgacagatcagtctccttataagaaatatccctctccaagaaagaagtatgaaaatttagttcacaaggatcatttcttctagctgtattatgcattcagttatgtttgccgtgtggctttctctttgtgtttgtcattttacttttattgagtatggtcaatagtaatataatgtattatactcttgtttgagtctgtatgccatatgtgcaatttgataactgtaaattgggttgtgttccatgcttactcctttgcagtcactactgtttgctgcaggcttgcgacccactccagcacaagcaactgtagtaagttgggtaagttctgatttgttttgctgggcacaaacatgatcatatcaaaaatatgtagtttttataaagatcccatcaaaaatatgtagtttctataaagatcccatcaaaaatatataatgtatatcttgcttacatgtaggtcttaaaggatgggatgcaacatgtcggtaagctcatatgtagtaatttaggtgcaagaatggattcagaacctaaacgatggagagttcttggtttgtccttttttttttaattcagtcacattttgttttatttgttatatgtttctgaatgcagaatgtccatgactgttttacatatctgctgttagttagtgttgatattaaaatttaatttaataagccttcatattgcagctgatgtgctgtatgacttgggcacgggcttagaagttctttctccattgtgtccacatcttttctggaaatggcaggcctgggaaattttgccaaggtagaattatacataaatacttttctgaattaaaaatttatactccttgtgaaatttatcacatatttaattaatttaactattcatcattttctcgttcttgtgacgattctgcatccatgtgattcaatatttctccccggatgactatagaagcattgagtttgagccctcttattaacaggatattgtagctattgcagccgtacctcatgctgcatttatttattctttaaaaatttatttagtctctcctcttaacagggtatggcagttgttgcagctagagcaacaaggttaccgatatattcttcttttgcaaaagaaggtaatctcagtgatctttttgcaaaaggagaagccatctcaactctttttaatgtagttgggttaggggcaggaatacacttagcctctactgtttgttctacaatgcaaggaaaggtaaataatctgatccgatcttttgttttgcatttgcactgtggtaggaatctaattttctgatcctgagtaactcattgcagttgattgtggggcctcttctttccgtcatacatgtatacagtgtcgttgaagaaatgcgagcagcacccgttaacacattgaatccacagaggactgcaatgatagtagcagattttttgaaggtctgttggaacttatgtttctccgtatgtgtatgtgtttgtgtgttattattttgttgtgagtttatttggtttatcatccagacaggaaaagtttcaagtccagctgacctaaggtatcgagaatcgctcctatttcctgggagactcattgaagatgctggaaatgttaaagtagggagggctgtacacaaggttgttaagccttcgaaacttcacaaactgagacaaatattccctgaggagaagtttctcttaagtcatggtggtaaatgtgtggacatggtattgatgcacaatgcaacaggcgaagatgcccttcggggttggctcgttgctgcatatgttgcacaaatggagaagtccttccatgaaccaagtgctagtgtcttggaagcatcgtaccagaagatgaacgatgaattcggtccattcttgtctcaactccaggtcaagggttggcacaccgatcggttcctcgatggaacaggttgccgtttcgctatgtaaacttatactgttattaaatagatggcaatcaatcattttgagaggaaaaaaaaaatatgtctaggagactcaagagtaagattttactctaagtagaataggatgtagttgcaactttgcaatgaaaagttttgagatcttagagcatctccaacggagagctataaatatggtgtattactgttttttagaacattttgcaaaaagttaactctaattgtgatttaaaatgtgtgctaaatttggcccaagctaaaaattgtgccaaatttggcacaaaagatagcatgtgctaaattttagctcacaataaatgacacattttttaattacctatttgccattcattaatactattcattaatcaaaatgtttttatatttataagttattaaaataatatagataaagttaattatttatatatttttaatgaatattaatgttaatattaacttttataaataatttatactttgatgccgaatatagctttatggtatattttgggccaaatttaattcaaaatatacaccatccctattagagatggtcttaacttgttaaacttgttaaagtctcttgctaatcaagattacatgacttcttatatgagttttggtttatattctttgttctcttaatttttttacatatttttttttttttttgtataaacttaattttttacttattattcaaatgtttttattaatacaaaatgcgataataaaaaaccattccccttcccttctaaaatacctctttgtataatttttttctaaataataaatgttctattactttttttttcgtttaaacaatgttctattacttttctctccaaacaaacttaacttatagtgttacttttttttaagtagtgaattatgattgctctcaataattcttaatatattttattttttcaattaaaaaaatgtaatcttatttaatatattcgaaaagttacaataaaaagtacattataccagcaaaaataaaaagaaattcttcttaaaaaaataagaagattttgtataaaattggaatttttttctttcaaaaaaaaaaaaaaattggaattttttttggcaaataaatatttttactgtgtaatgtatataaatgagtaacataaaaatagtaaagcctttttctaaaataaataaatcaaaaaagtaactaatttatgtagcatttggtaacatttttaatcaattttttattttaaaacttgaaagtaattttatttcaaaaacatgttttatataactgttttcacttttattttttaatttgattaatcaaaattttgaaaaaaaaaaatacaactttcaatattttttagttacagttttttctttaattcaa

SEQ ID NO: 187475 - DNA, 3127 bp, Cannabis indica
acattcaaaaatagacagatccttgaccacactagctcggtccaaactctatcgaattgcacttccaaaacatacttgagctctaaacattgattggagagagaaaaaaaaatcattgttgatcttggaagaataatgtaataaaacagagttattcatctcaatcgggataattttagtgtaaataattcgaagtggaaatacaaatttgtaaatttgttgttaagctaatttttagtattgacaatatgtaatactagtaaattcatataacaaaaatttatcattacataattctttttttttaaaaaaaaaaaaactcaaataaataaaaatatttttataatttttactgtctaatttattatatttaaccattttacaatttttttttagttttcatcttagtcctatttttaatatgtatcataaaatattgttttgtttattttaaaaaaaaaactactaattattttataaatctttgttaatttcctttatatctttgtggaaaatgaaaaaaattaatgtagtccttagagacgatggaattggataagaatcacatgcagtgacgacaagcttttgttgctgagggaaatagtcaaaatagaataacgcatggtccaaaatgtccaaggaaaacatcaccagaggccacaggggcacacgcaaggtctaagagtgcgcacttacccccagtgcgtacttttacaccaaatccttatccaacgccactatgtaatagtataatcgaatccaaacccttcctaataagagacgtgtgcggctaagattctcccacttagccatctctcattggttgctgtcacatcaaaacctcccagccattcagattcgtccacggttagaaaagcagctgatcagtgtgatccacctcccaattatttatatttcacaccatttctttttcattatttccagccctccctgccttcccactcccttgtcctttttttttttcgctagacaccccactcctttgtcttaagtctctacatttcaacccacaattaaaatataaatataaatataaataaataatttcattaattaatcattaatcatttataaataaaagcagcagctacggacagtcgacatttggcgattctggcaaagccagaaaaaggaaacgcagccaaagaaggtatcagaacgagatttttttttctcaaatttaccaaaaaaaaaaaaaagttaaattatctgcctgcattttattttttgagtaattattttttcttacatttaaagaatatcgtctctaactactactttaatatttactatttttgctgtaaaattttcaattttggccttcttttttcttttctcatttagtagtgtgtatgttatatttatggtgatagttcggggtgttgtaaattcagtcgtttttatctgaaattgaattggtctatgagtgtctttaccaacttatcatctaatcaatttcgtacaagcaatgttgattttcatcgtcttagtctgaaaagttttcttccaattcttcgcagttgcagtgtacactaaaatcataaacagaaactctttgcttgaatctatctgtacttgattttcagggatttcattcttacgttatattggagtaagactcttttgggatctgtttcgttgcagtttgatttacgaaaatggggtcgaatttgaactttaagggcacgggcaacgagccgtcggctaacggtggtggtggccggcccccggcgaataatcaccttgtgagacagtcttcgatctattcactaactttcgatgagtttcagagcacagtgggtggcataggaaaggactttgggtcaatgaatatggatgagcttttgaagaacatttggagcgctgaggagatccagagcatggcctcagttggtccttcgaatactggtcaaactggggttggtgcgcctcttcagaaacaggggtcgttgacactgcctagaacgctgagccagaagacagtagacgaggtttggagggacttgtccaaggatgggtctggagctgctgggcctaacttacctcagaggcagcagactttgggagagatgactttggaggagttcttggtgagagctggggttgttcgagaagataaccaaatggccgggaagcctcctaacaatagtggcttctttggtgatttatcgtgctccgttaataatcataacacaggtttgggaatcagttttgagcaggcgaatcgggctgcgacaatggtgggtaatcggattcctgacactaacaatcagatttccattcaagctgcgaatttgcctttgaacgtcaatggggttagatcgactcagcagcacttggcccagcaacaacaccagggcctggcccagcagcaaatttttcctaagcagcctactgtgagttatgcatctcagttgcctctgcaaacgggtggtcagttgggtagtcctggagtgaggggtgggattatggggataacggatcagggtttgagtaatgctttggttcagggtggaggtatgggaatggttggattaggaggtggggctgttactatggggactggatccccggcgaaccaaatatcttctgatgggatgaagagtaacggtgatacctcatctgtttcgccggttccttttgtatttaatggtggtttgaggggtagaaagtgcagtggggctgtggagaaagttgtcgagcggaggcaaaggagaatgattaaaaacagagagtcagctgccaggtcccgcgctcgaaagcaggtgagcactttgagtttgattgattttcttatttatgccttcggattcaaatataagcgactcaactacggtgtttcctcttaggtttttgtttagacaagtgaacgatcgataacacaacacgcaaaccaattcattaagaacaaataacttgttagttaacgtgtcataacctcatattaagaacaaataacttgtaagctaacgtgtccaaacctcataccgtttgccttccttctttgtagcactaccaactttaatggtctatgaaatctacgagtaggacttaatacctgtagactgtactattgttacacaagattaagcaaaagtctgttttt

SEQ ID NO: 187476 - DNA, 2823 bp, Cannabis indica
taacatttcttatagtgatttaccctaagtttattaattattcttttagtaaaattttaaattaattacaactgtctaataataattcaataattaaaaataaatataattatcataattatatatttttgatacaatcattaaaacttctttcatatatataataaattaatattaagtatgcttatacttttcattgtgtgtattttatttatttatttatttatttttggataaaatgaaaattttattgaaaaaagagtaattaagctttattttggttaatatattttttttttttgaataaaatgaaaatttcattgaagaaagagtaattaagctttacttataattaacaaacaacacttaaaaatattactaatcaaattttgttctctttcttgagaatgcaattttatttggttcaagtaataagagaataatatatgtatagtgaaaaaaaaaataacatgatttaattttatgctaaaatttaatttaaaaaataataatataagataagacttgcttcatggatatcctgccaataatttacttaatcttcttaccaaaattaatcagtaaatgcatcattaatttattttgattttcaaagaaaagttagataaaagatgcatgtttaatgatcatatcatccatatagattagcatatgtagtactccccaattaatttaacaaatcaaagtgaacccattcaataataccacgaagtaagcacaatttcttttttcttatactataggttggaaacaaataaatagaataatgaagttataatccacttaaaaatattatatttgtcgtttatattatagtaagtggatacttatagaaaagaaaaatgtggttagtgagaaaatttaaaagagtgattagtgaatttaaatattaataaattagagaaaggtggtgtacataataggtgtggttgaagaatatatagagctggattatatattatttataaatattttttttttcagttgttcacacctaattaaaacacctgcatatattatttatcaataaattctttcatatataaaataaattaatcaattagaagttactaattaatgtattcgaacttgtatctatatataactctagcttcatatactaaatataactatattaattaagagtcaaaccccacaaatattcacctgacaaaatatagaatagaaacaaaattgagttttaattatggtcaaattccaacattagctagctaccatatcattcttattctagggtaagtgagtacgtagttgtctagctaccatagggtatatagctatgtcacactaacacataggttaatttaaactatggtctttttttttttccattagatttaattttcttaagacatggtatgtgactttgatcaaattatttggtttctatttaatcattgggtaatgactgtatgtatttttttttaatgactgtatgtattaatttcatgactaactattaatattttttagtatttttagtagatatagatataatataaatattttttattattttattaaattatttttattattttataggatggtatataatatatagttatatgagacatctctccaaaaagttaaaaatattttgataatttacgatgacaaaataggaattcaaattgattattgcaagcgttctataagttatgcttattctaaaataataataataataataataataataataataataataataataataataaattgcaatttatcaaaacaccaccaaaaatattaaaaatatataccttgatagtttgtcaaatatcaaagagtggaaggaaagatgaaacatacaatttagacacataaagatttctgatcctattgatctggttgaccagtttgtaatttgtatttatttatagatttgattctattgtccaatcaatctaccaactcattgattggatgaatgatatataatacaaatagaacaaaattggcctaccaaatttgggtcctacacactaaactatacatgaaatggttcgagttttatacattcctgagctaaaccaatgaaatataatcaattgatcaaatagaacataatatcacaaactcaattataatgattacctaaataaataacatgttcacaagtataatttctgtgattaaattctagttttattgtccactcagagatctcaaacattgatatatattatttagaggtttctttagttttttatacttccaaacaattatatagaaactttattgcaattaggacagtaaattaaaatggacaacaaaaaaattaatataacaacacatatagaaacaacgggagaaaaccaaatcgaaaatttgaaaaaaaaaaaattaaaaaaacaagtgtataaaataattcctctattatttattacaaggaggacgattttttttaaataaaaaagatacattttatatataagaaggggtagataatagatatacaagatagtacagcttggatgatcatacatttgtgcactaatacatgaataaaaatgatgatttattttcgtaatataaatctacctttattaatattattaatgatacatatcaaatatcaaaagtctaaaatcttcctttccttaatttcatcctataatactctttactcattctcacatcataactttatatcattatatatgagaatatatggatcaaattcaaatctctctctctttctctcttcacaaaaccagagtagaagaaaatattaataaaattaatcgctactaattagaaaaaattaag

SEQ ID NO: 187477 - DNA, 2317 bp, Cannabis indica
atgtgtaattaataatggtacatttagtctttgattttcagtctaattaaatattaaaaaagattaatataccttaatgttatttttttttttttgaagaagagaattaatgtatttaatatataacaataatttgtctcttattttggacaataacaataatatttttttttttgagatttgaaaaaatttggtaagaaaatccaaaagcagcatttggttcttctaaggccatatataagggattattttacaaatatacaaaaataataaaaaaattacaaaaatataattatacagaattttaatatttttaattttatttacagaaaatagggttttttttatgtatttttatatttaattcttgttaatttgttattgattttttgttatttgtatattattttttgtcgttgtttggatgttattttcttgttacttttatgtagttattttattgttttcgtgttgtttttacgatacaaggtaaaaatataaacaaaaatcttaaaacctaaaaatgtaaaatgtttaccaaaaaaaaagtactttatggtacaaatactttgttttcaaagaaaaaatggtataaatcgtgaattaaatccaaaagtggtattttgttcttctaagcccatttgaaacttttcaaaaaagcccaatcccataggcccaataagcaatagtgataaaaactcgaagccactctcagagctcttgagctaaccaacaatggcgtactcagctacaaggcgtagcttaatctccatcatcaaccgaactctctcctcttctccttcttcaacctcattctcaactcgccatcgtttagctttagcactactaaatcaacaaccccaactcgtcgtccctgactcagtaaaattctcagtccggttcaagacttccgggtcgggttactcgccgctaaacgatccggctccgaactggagcaaccgtccacctaaagagactattctcctcgatgggtgtgactatgagcattggcttattgtaatggagttcgctaatgagcctaaaccatctgaggaggaaatggtcaattcttatgtcaaaaccctagccactgttcttggaaggtaataagctaaattgggtttgattgttagaggggtttgagaaaagattggatatttgttaatggggtttgatgttttttgtgttttgtagtgaggaagaggctaagaagaagatatactctgtttctacaactacttatactggttttggtgctttgatttcagaggagctttccatcaaagttaaaggtattgctttataattttgttgtttatggctcatttgattttataaatgttgttcttttgattagtttttgagtgtgtgatactatgtgtattgatttgttttgtgttctagagaaatttgcagtaaataagtaaatatatatggtaaactattttgatctggttgtattatgcccacactaaaataatgacaagttattttggtcttaaaaaagtgtacttttaaagtgcaatcatttcatattatttttgtgattttttggtttcttttagttgaatctattcatgatcattaatttattgtttctggtttttcaattatatgaggatatgtatattgattcgagaggagctttttattcttatattattgcttgaaactatgaattttgttagttgatgggctcatttgatttagagatgccattcttttgattagattttgagtgactgttgttatgttttttgaagattttcatctaaagtaatgtaaatagtcaattgtttgagaggaaaaattagttctaagacttatggccacactaaaatggaagtgatttgtttgtaaaaaagttcactatcctgatttaagtgcaatcattttatatttgttggtcttttcaagtatttgttgtacatacagatatagaccttgacttgtttagagtttgtctgattcttttcctttggtttgatagaactgcctggtgttctttgggttttaccggattcatatcttgacgttccaaacaaagattatggaggtgagcttaagcttgtcgaagaatcgattatggaggtgttctttgttatgcaagtactcatatttgtttttgtttcaggagatttattcattgatgggaaagtcatacctagaccacagttcaggttcactgacagacaacaacaaccatctcggaacaggcctcgagctcggatggataggcgtagtagagagccaatgcagagccaaaggagagaaccgaaccaaaactagctacactgaatgatcataggcccaatgt

SEQ ID NO: 187478 - DNA, 5078 bp, Cannabis indica
gtctggtcctttgacctgtgtttgtttgtttgttgtggtttgttgtcttttattgtgtgtctctactaccatgtctgatcaagatactatggatttggatggagaacgtcagtatgatgttatacaaggagatgaggacgatgatggtggcattgtgtacgattcaggggagaaagagctatcggattttaatgatcgttggtgtcttgtgggaaggtttcttacagaccgaacgttggatttcatggcaatgcagcataagatggcatcattatggcggccaggacatggtttatatgttaaagaactggattagaatttgtatttgtttcaattctatcgtgatgctgatattgatcgagttattgaaggaagtccttggacctttgatagggtgccgttggttttctctcgactgaagaagaatgaagtaccacgatctgtggtgttaaacaagctggattttcggattcaacttcatggaatgtctacagggttcatgtcagcaaaagtggtgaaggatatcgggaattatattggcaagtttattaaggcagataagaacaattttatgggaatatggcgtgattacctcagagttagagttgcagtccgtgtggatttacctcttaagcacagaatgagattagaacaaaaaaggggtgagacttgttatgctactttcaaatatgaggatttaccaactttctgtttcatttgtggaatacttggccattcagaaaagttctgtcaaaagctttttgatactcctctacatttgattaaaaagccttataatattgaactcaaagcaatgcccaggcgacgtcaacataccatcggagcaaaatggctcagacaaggaatagctagtaaagattgaggtgatacggtgcacaatagtggtggtcaggtggcggactcatcaattccggggagctctttaggcaatcaaattcatggtaaaagccatcaagttgctgattttgtgggatttaatggcctgcatttgagtagtgataggagaattaatttccatattgcaccagttgtggcgtttaactcaaatacaatcaattcccatgatattaggaacgtgactgaggatgaatcaactgtggatggggagttaatgatattagattcaaagagaaaaagattagagaaaacaagtggtaatgggctaacttatggtagtgatgggatcttgttatctgaaacaaaaagtgggccaaaaaactctgtttgtggcgggtgctaattctcaggcccgccaagagttatgaatgtcctgagctggaattgtcgtgggcttgggaaccagcggactattcaattccttaaagagactgtgtctcataagaaacccaattttattttctcgtgtgaaacaaaatgtgataaaaatagaattgcttatgtgggccgttatttgcaatttgagggtgtgtttttggtggaggcccaaggaaggagtggtgggttggctttactttggaaaaataaagaggagtgtaatgtgttgggtttttctcaaaattatattgatgctatggtggaaatagaaggcaatgataaatggaggcttactggattctatggtgagtctaaaagatgccaacgggaggcttcatggaatttacttcgatcactcatcaacacaaacattgagcttttgtgcgtcatcggagaccttaataatgtcttgagtcaaaatgataaacgtggaggtaacacatatcctagatggctaataaaaggctttgagcaagctcttcaagcttgtgacttgttcgatcttgagttggttggtcaccctttcacttgggaaaaaggaagaggaactgcaaattggattaaatgtcgattggatagagctcttgcttcctcagcttggtttcaaaaaatttataatgcaaggttagtaaatctcgagacatctccttctgaccatagccctcttttgcttgaattcataatacctgataactcagccctgttcgtcattttcgtttcgaaaatgcctggcttaaaaagcccttatgccatgagattgtaagtgactgctggaacaccccaggtgttcaagatattgaatcaaaaatcaatttatgtgctgaaaaattggccagttagggcaaaggaattacgggcaacttcaagaaaagaattggtaattacagaaaagagcttaaaatgctcaagaataaacatgattcagcatctgtttttcgttatggtgaagtgaagaaacaactctttctcattcttgatcaaaaagaggccttttggaaacaaagagctaaacaattttggttaaaagaaggggatcataatagcaaatatttccaccgtgcagcaagtaatcggtgtagcttcaatcaaatatcgaagcttaacgatagggacggcatatggcgtgactgggattcgggtttatctaatgtagtggtggattactttgacagcttgtttactacagctggggtagattgtgatgagattatccattgtatccatcacaaagtcactccacgaatgaatgaagcattgctacagcttgtttgcgaagatgaagttaaaaaagctattttcggtatgcatcctgataaatgtcctggccttgacggtatgacgccggctttctttcagaaatgttgggaggtggtgaagaaggacgttattgaggttgtggagaagttctttcattcgagggagtttaatctgaatggtggtgatgcgaatgtagtgatgattcccaagaaaaaagtgcctgaaaatatgggggatttgaggcctattgctttatgtaatgtcctttacaaagtaattactaaagtgatggcaaacagaatgaaaagcttcatggataagattgtctccgaatctcaaagcgcttttatcccgggaaggcttatttcagacaacatcttagtctccttcggaattttacactacctgaagcagaaaagaaagggcaaagatggatttatggctttaaagcttgacttgatcaaggcttatgatcgaatagaatggacttttttaaagcaaatcatgttgaaactcgattttgcggatgagtgggttcagcttataatgtcatgtgtttcttcggccaaatacaagttcatccatggtggtagagaaatgggaccggtgataccttcgcgaggcattagacaaggtgatcctttgtctccttatctctttattatttgtgctgagggattgttttcgttgatcaaaaattatgaggacaaagggtggattcatggttgtaaggtggcttatggtgtgccaagagtgacacacatgttatttgctgatgatagctacttgtactgtaaagctactattcaagaggtagaaagaattcgtgagcttcttctcaaatttgaaagagcgtcaggacaaaaagtcaatttggggaaatcgtcaatattttatagtctaaatacagaggtgcataggcaaacaagtataaatgcactgctgcaaatgaccacagctgatgatagaagcatgtatcttggtcttcctaataccatgggacgcaacaagtcggcggttttgggttgtttaaaggatcgtgtgcgtaagaaactccaaggttgggattcaaaagtgttgtcaagagctgggaaaaaggtgttgattaaggctgtagctcaagcattgcctagctatgcaacgaacgtatttttgttgccccttgagattagccgtgacattgaaagctcaatggctggtttttggtggaaaagctctaataatggtaacaaaggtatctcgtggatgtcgtgggatagaatgtgtcttcctaaggataatggaggtatgagatttcgtaatcttcgggactttaatttagctcttttaggaaaacaaggctggtgattcctgtcaagaactgattctcttgcaacttgagtttttaaagctcgatattttcctaatggaagttatctctcagcttcccttggttctaacccgagttatgtatggagaagtgtttgggaagcacaatccttagctcaaactggtgttagatggtgcattggtgatggttcttcaatcaatattctcaatgagccttggcttcctgatccagatttcccttttatgacttcgacacatcctgctttagaaaactctaaggtttgcaatcttttaaatgtccaaggcagtgactgggatttggagattttgcaagatttgcttgatgttagagataggcaattgatacttcagattcccattggacttgcacaaacaactgatatagtgtactggtcaagggaggctactggtgtatacacagtaaagagtggatgtaagctgcagcaggctttaaaaggcagagatagagaggttgattcaacaactttttggaaagatttatggtctttgagagtgccttcgaaagtcaaaaatttgatatggcgtgcttgttcgaattgcctaccaactttggttcaactggccattaaaaaagtggttgtcaacaaaaattgccctctgtgtaacatggagagggaatcaatttgtcatggcctgattttgtgtaaagagttgaaacaagtttgggacagagttggaattggaacatcacaggcggctggggggagctttctcgactggtgtgtggatgcttttaaaaatagttcagctacaacaaagtgcttaattgcaactgtctactagtccatttggggagcgcgaaatgatttaatttggcaaaaaaaactggtaaatccttcgtccatagtgacttctgctgttagttttcttgatcaatggcgacatgctcaaagtactacaattgagttttcttggtctagtttacagcaccatgatgggaatgagcattgggtcaaacctcagtacaatagtatcaagataaacgtagatgcggctttgtttgaagacaaaaatcggtttggtttgtcccttgtaatccgtgatcataatggcttccttctgcagggccgaatgaagttgtactcaggaattgttgctactggtattgcagaagcaatgggctttcgcgaagctttaagttggatcaagaagca

SEQ ID NO: 187479 - DNA, 3103 bp, Cannabis indica
tatatatatatatatttcaacttctcccctatacaaagattctccgttttggggctttgggctattttatttaagacacgagaaaataaaattaatatcttaagaaaaggcagtttgtgcaactgaaaactgtacaaaattcaatgttctccggttgaataataaatgccgttgttctaaagtttcatccacaagcacactggttggttggttgacgcagaaatttacgagttgaagcatgaatcagggagctataggtttgttatatttgcaacttcacattttccatctattacaaaagaccaaacttaaaaaagtaaaaaaaaaaaaattcaacaaaaggtgtttcccccaaaagattctcttcttaaagctagtacaaagaaagcccaaaacccgaaaacggagcggtcatagagacaagaagtcacccattctcatagagaagcaactctaaccttgttagcgtcctgcctgactcaggtcaccctagctaactgactgctctgctagttgcccttttttcacttaagaattgtggtaggggaaaatcatgcctcaataatttggcaatttacatctttaaaagctatatggcaaaccaagacggagcaaatagggtcgaaagcatcagccaatccgaccaaagaatatagtcaaaaatatcgtgctcaaatcgttgtataattggcaaaatggtgcaataagttatctagagcatctggcatgaacttccgcgcaaataggtaacacggccgttgcataccattccacaagcaaggccatctctgcactaccttctgcaatagtccagaagatcattcagtttatacttgttctgaccatttcttgatgcgaaattcagacgcttatgttagaaaacttaccttatcatcactagtaacatgcacactcacatcaaccgactgcaaatagtaataccaaacaacaagtcatcagggaagacagaaattacaaaaattattagcattaattagagacccatcccaaccttctcaaacaaaccaaggaaactataattaaggaatcaaaagtcaaatcttgcatggccacgtgcaaaaatacttcactagcaattacaaaaattgactaacttattttgattattagcattaattagagacccatcccaaacttctcaaacaaaccaaggaaactataattaaggattcaaaagtcaaatcttgcatggccacgtgcaaaaatacttcactagcaatgtaaaagattagtcagtagtagatttgtaccgttatattccttaaaagttcagaggtaatatcctgagccctgtaggatttagggtgccattttctctcagaccaatcaacatgagttactgaccaattggaaatgccaccagcatcaaccaactgaaacacagaataaatttcattcagcagaacagaataaatacaaagcagaaacaaatataccaatgacttgaaaacataattgacataaactcacgttgaaaaaggttggcaagtaatgttcatcagcaatacaattgtgcccctccaaacctggctgaaagattcaagatccaggccaatacaatgaattaatggtgacaggaacccaagttaaaaaagttcaatagttacaagtataactcaatatatatgtacatcaacactatgatgcatatatgccttaagtatcctgtctatctgacagacatctaaaatttcaataaccataatattgccggaaagcactcaatttactacatgcaaaaatacaataacttcgtaatttaataagatccaacacatttgcaaagtaacaatttctctacatgccagattcgtttatcaaacaagacacaatattcaataacggaataaactttctttaccctgcagtattcccgaaattttgagtagtaaagatagtctgccagtactatcacagcatgctggcgcttcattgtaaaccactgcacaaagggaaggaacggattggtatgcatataacagtatatagtacagctttaaacatcccaataaaacaaatagtaagaaaactttggtacacagatgataatttagctcgtataactaaaacataaactaataaaaagataagaaatatatgcctattgctatgccaaatatcaaaccatcttctgactgagaggactcatgttaagccgtttccatttacatttttatagcattattaacatataagaacaacaatgaaatataagaaatcaaataaaagtgtaatggataattccttgcaaaccccaaaacacaaaaccaaaacaacaagcaaccgaggaaaaaaaatccccgaaccctacacaattatagcataaaactttccaacaattgaaaccccatgaattagtttaaaataattcaactaatacctgtgcacccttgcggaaatctttcttctcaatttcaggtaacatgtgttctgaataccttccatttccatgtggaccgggatcctcaaagctgtggaaaagaaaagaaagaaagcaatttatatttttagtgtaggaagcttagatcccaatatatttcgcaaaacagaaagtaatcacctttgcaggtcatcatgatcgacaaaggggaaagaatcaagtatatataatgtatcataattgcttatttaatttaaaacattaataagatcgacaacacagaatcacatcacaactcatctcatatgaaactgcacttacgcatcaacgaagctgatgtttgtattaatcagatagtcgtagatgtagtcaaaactatacaaaggtacacaactgcaaaagcaatagtttattaaatgagtgttaataataacaaaataggaaaaacaacaaagtagaaagaactcgacatagtaaaatcatgtgaatacctttcagaaagtaagacaaaatgctggttactaggatcttggagagcatttgccaataatcgtttctctgcatcaaccatggaaatctttccccagataacctgcaaccatgattaaccaccaatttgaatattttagcagtagatcagaaaatgtcactttaatagatgacaaaagaatagcataaaatgcaaaaactgtcttgttattg

SEQ ID NO: 187480 - DNA, 5887 bp, Cannabis indica
catcctcttcttaattttctttttcttgatattttttttttttgctagctgtctttcccatccagactcattttgattgtgttctaacttctacttgaccatttttcgggaatcttttggacttgctcgaactggttttctttacgcaggaatgaatttccatgatttactggatattccacaaggagataggaggaagtaccatgatgatgttacagtaatgattatatcactagaaggaagaatttggaagtcatcaggaaagtacctttgaactagctcaatccaatcttctcaagtgataatatattggaagcggtaaggaaatctttactgctgatccattagggttttttttcgattatctattctcgccaccttacagcagcataagcatacagctgagtaggtgaggggcctcaggtgatgatggtaagggcgaaaagggctgatcttagatattataaaaaagaagaaaacttgaatagatgcaaaagatttggtttcaggatgaaaaattcagaacttgcaaatgggtttgatgggaaatgctctttaggtggaaaaagaaaaagaaagaaggaaacaaaaattcttttttttttttttgggggggacctcattttaacttattctgttctaaaatagaaatatattgtgtaggttcctgccttttccatttcatcattgtcatttcttatattttgaagccaagaaagaaaaaaaagaaaatagtttgtaaaaattggtgggggtacaaatttacttactgaaaagttgagagcatttccttcttctcaatgttaactttgaaggtgggttttccaccattgcggattaaaagagttgaaatttttgccaaacatccatttctgcttgtggctggctttaaatttctatgttggctcaaagaaaatgaatggaatgcatcacattcacttccatgttttacttgtgaaaaaataatagagagatttccttctctttttcattgcaatggaaaaaggaaaaatgaggaatgtgcaacaattagtaaaggcaagtttgaaaacaaaagtacattttaagttacagaaaaaataaaaaaggagagtacacttccaagttttgattttatgtgtatcttttgggaagtctacaattaactaattaaccatcacatgtaagttcagactggatagacttgataggaattggaatgttaaaataaattaaattttaataatatggggtttgtgcttttaaatggatcttattttcttaaattaaaatagtggtaatgttaatctctttaacatttaggttttatattcttaagtttacttcttcaaagtctatttttctaacttaaattcacataacaaatacctctttaaatgatgattagttgaaaggaatgaaacataattagaataggcatgacattttaatactttaaaagaaaattaacaaaataatgttataaaaaatgtttccattccatttaattttattactacaaactaaacatcaccttttgaagtcttttacaaaagtaattttatatccacatatttttttaacgaggatttcttagctagcactacctacatattagtattaccaacatgtaagtcaaatatgccacattcccttataaatcaatttgtttctcctataccatattttccaacatagtgtaggtatcttttccagctcttcttaaggaattcataagaagccatggaaaaaaggtgtgctaacattgttatgtgaagttagttacaccaaccaaaccaactgtacatacttttactcactcttttctattattcagttatatataatttgtacaatgtatttactatttatagagaataattgctaattcaatgaatgtacagaatttattccaatcattttctttttctctcttctaatcgttctctttgttcttacatgtcatcagagtagtcttctctccaaaaaattttactttcgcattctttgtttcgttgtgatccttttacttcttcctcatcatgtcaacctcatcagcaacgactgattttactctagcaacaatgtttcatccaatggtcttttctcataagatcttggtcaagcttgacaataacaacttcttgtcatggtgttcttaagtgctttctgcaattcgaggtcaccaactctttgactacatctcatcaactgtccaaccacttacaaaatttctcctgatcaagatcgtatcaataacatcattaatcctcgatacactcagtgggaccagtaggatcaactcctccactcttggttactttcgtcgatgactggaggtgtttaggctcgtatggttagcagtgaaactttagcttaagtttggaagactcttgatgtatatatctctggtcaaatctcagctaagattgatcaatttactaatcaaccgcagaatatcaagaaaggttctcttttgatcaatgaatatttgcttcgcatcaaatcggttgtggatcatctttgatcagttggtcatttggttactgttagagaacatataacaattatattcaagagtcttccatttgaatttgacacttttgttatctctgttaattctcgaaatcaaccttacactgtggctgaaattgaatcgttgttgctctctcaagaacacagaatggagaatcataatcgagatcttgattccgtcaacttagccacaaatcatttctctaggggtcgtggtactagatcgggatttggaaattttttcctttctaattctggtcttgctcaaaagtctaataacaattcacctgcttctcgtagtggtcgtgctatctagaacccctatgctgtgaatcctcgaggtgatggttcatccttagctggtttttgtggtcctcaaatgaattcacagggtattatctctcccttggctcctaattctactagctccagacttgtttgtcaattgtgttctaaaccagatcacataataactcgctactatcagaggtttaacttcaatttattagttagtgctgccaatgtagattaatatgctgctcatattgctacattagacactatttctgatcttgcatggtatccattttcaaaagctactagtcattgcactattaatgaaaccaatttcactcagaacaaccatactttagtcctgaacagatacatatgggagatgatactggacttaacattcagcttgttggcaagaaaatgtttcacactctatatacttctaaaactctcactctgaataatcttcttcatgttcctcatattaatgaaaatctcgtaagtgtagctcaatttactaatgatattgatgcctcttttgaattttaccttgatcattttgttgtcaaggatctggactccaagcaaactctcatggaaggacattttagccatggcctttatgtcattcaacctactcagctttagtccaacaactctcactttttgcaatctattatttttttttcctgtaaacaatgattaaatgagttcttgtaataatcaactaaccaatttttctttatggcataatcggttggctcatccctctcctagagttgtaaaacaaataatgtcatggtgtaatatttctagaaataataaaacatatgttaatttttgtgatgcttgttgcaaaggaaaaagacataagtttccattttctatttctcaaactgtgtacactaaacctctcaaacttattcacagtgacttatggggaccctctcctattccctccttaaatgaatataggtattatattcgttttattgatgcatatagtaggtataaatgggtgtttctgttgaaaactaaatctgaagaaactcagacatttatcaatttcaaaactcaagttgaaaataagtttgaatgttctattaaggccctttagtctaatggtggatgggaataccaagcttttcaatcctatctactaaccaatggtatatctcataaactgtcttgtcctactactcatgagtaaaatggtgtagcagattgaaagcatatacatctcattgtatctgccctcacccttattgctcatacctcaatgccttgcctttttgggatgaggttgttagagcatctgcctttgtcattaataggcttcacctattttacaaaatcaaactcctctcactattttgtacaaaagagcccctcaactaagagtatttgggtgtgcatgccacattagaccttataataaaaacaagcttgaatgtaggtctttcatgtgcaattttttgggttatagcattaaacacaagggttaaaagtgtatttccccaactggtaggatctacatctcaagagatgttcttttgaatgaacacttattcccttatgctacactctcttctaacacttctttagggtcttcctccactgtttctagatagtatgggtgtgcctgcttctattcgccaatctactgtctcaccatccttttctccaccacactctccatctcttgtatcttcttcagatacatctactttttctcctaccataccacctctagttgtgaccgagtctagctccactaatcatgtcacagactcttctttcactcctagttctcttccaacaactgttgctcctgataacggagatacaacctctaccacattacccccaacacccattgttcccataaataagcattctatggttactaaggccaaggtaggtatcaataaactcaaggttctactcaccacatttgaatctcagtcttacaagatagctctacaacatccaaaatgaaataatgctatgaattgtgagatctttgctctcaagaaaaatggtacttggacccttgttcctcttcctccttggaagagagttattgcttgtaagtgggttcacaaagagaagctaaatccagataataatactgccaagtacaaggcaagacttgttgtaaaagacttcttggaacaatatggttttgattttattaagacttttagtccagtggttaaaccaactaccatcaagattgtcttaactattgctctatcctataaatggtgtataatacaacttgatgtaaataatacattcttgaatcgaaaacttcaagaagaggtttatatggcccgacctcctagttttattgatcccaagaatcctcacctggtatgcaagttacacaagaaaatttatggttggtttgacaagttaaaggctgtgctattgtcatttggctttacctgtgctgaagctgatccatctctatttttcagacatacttaggcccattccactttcctttcggtctatgtggatgacattttggtaacaagtagctcaacttctgttgtctcttctctaattcaacaactacatcagatgttctctctaaaggatctatgacttttaaactacttccttggcattgaagtggctcatactacaggtggtctacacttgtgccagaagaaatatattcttgatcctcttgtcaaggcaaaagttgatcatgttaattctctacctacaccaatgacaggaggtgaaaagctttctgataacaatggtgatcattaccatgatccatatttttatagaagcattgttggggcactccaatatgccactgttactaggcttgagatttcctatgcagtaaatcgaatctctcagtttatgcagactcctcttgaatcatattggaaaattgtaaagaaaatacccaggtatctatctggcacaattgatcttggcatacacctcaagtctgcatcaactcttacttggacatgtttttatgatgctgattggactttaaatccaaattataggagatcaacctttgatttttttttttatatttcttaat

SEQ ID NO: 187481 - DNA, 2636 bp, Cannabis indica
aggaggtgaagtttgacttccttcctttgaaccttcattgtgtgaaacatgttaatgtggtatgtttgattaggaaatgtaccggggaagaatagcttttgcttttgagtgattggtttgtgtttgaattggttttcatatttgatttattttcttgttttgaattgtttctctcattttatgtagcttttggtcggttgatgttatgcatattttgccttgcactgtcgagtttgcttaaaccttgcaacatgttatggaaagaattaaactttcattggtttaatgagtttatttaaatttataaagtgagatattgtgctagtactcagtttttactaagaacaaggtatggaatgtggatgaacataactctgttccatttttttctttctttctttctcctaatgcagtgctcaacttaatttgtgaaaatgctgtagaggatttcgataaatttaggagaataatatattggttttgtagaaagttctttggtgaggccatatatgattggtacttgctcttaattggttggtaggagaagcactacagtgggtcagcttcattccatgcaaaaatcccagaatgtattcacaaatcattggcaacactttgtgcaagaaaaattctgaaattattttttctctatcttgcttctgccaccatggatctcagtttgttccatcacagtatcgatcaatattctcaacagcgcagctacaaagttcatgggtgaacaagatcaaaggggtcttcaccggccaaaagggttctgaaggagaagctcaaatcagctccgagtcattcactcttctccgtatgcccttgcctgattcttccaacaatttacttttatttctctgccacttttacttttgataatcaatttattatttacttgtttaatcaaaggttttgcggaggagttgagtaaaacaagaaaagtaggggccttcaagcaatatatagtaggtagaagcagtgaagcgacatttgctgaagcttttgagaaacaagaagctgtaattcgatgtcttggagggtttgatcccactggcgatgtattaattccgtactaatgtaatttctcaaatttcatgtactgtgatattgttgtagttatatagaccttatgttttgtagaatctccaactcagtcataagaaagaggcagcaaaactttgtaattgcacaattacagatgttgagaatgctctggcaaagtttacatgggctaaagaagcacaaaggaagatagaaagcttacaaaaagaagggaaaccaatgccaaagagtcttgctgaggtatcacttatcttgacctatgaaattctgctactctttagttttatttatcacattttttatgttttgcacttgttcatatatatgtgcattgtggttgtgttgtgctatatctcatattatagaagatatgaacgttgggaatttatggtgaaatcattacgttttttagtttcttaatacttatttggaaatgaagtgaaccgaacttcttctcattatctcaactatttattattttgtattctattgatttcaggagcaaaaactgatgggatctacaccattagatattgccaagtctaatttggccaagaatggtcaaagaagtagaatgcgctttgcccatgtggactctaaaaagagatataaaaggtacttttctgttattatatagccttttaaatcgaacagcttattgtttcatgtgcttgtttttcttggtctattcatttcattttttcttatcaaaaggtgctgcggggagaattgaagatgtttactgctctttaaaagtttcttacattaacaagcatgaaatggagattttgataaatgcctggaactcctagaatcaacctttaagatctcagataggagccaacccattttccctaagcagttttgtgactagatggtcagaattgcttaacaccttggattgttacttctcctttctaccttcattttgtaataaaactatgtgaagcatgtttaagaataaatgctcgattgcctgatttttaagtacttgctttttctcttggaaaaaaaatcacgtgccatctatagttcttccacattgtgtggtggttctcttttggcagcccccggttatgacactactgcaacgaaccagccatttttcctgaaaagagcttcacaatttgattttaaggtatcattttcctaaaattgtttagctcttcagtttagtatgtacgtgttggtcatattccattcttcatagttttgaattgaggttcatgatttcctaatgattgcatctatcaaattgaaaatccaatctgattcagtatgttattatcatattgatgatttttgcatagagtgataacataaatagtaggatacactagaaaattaaaagcaagtgtctggctcagaattgtgtatggttatcaaagtaaaagatgggtacagtgaaagactctaacttctgccttttacttgtgcccaggacatagtttctacattttataattcttgatatatgcttgttatggaaggtaatagaatttaattattatatattctcatacattacatttacaaaacttgaagaatcagtttgtatttcattcaac

SEQ ID NO: 187482 - DNA, 4616 bp, Cannabis indica
tagcaaagaagaaaattcctttgttcaaatttcattgctgaatcaagacaaattatcataaaagttaaaaataaccatatattaaataatgtaaaattcataaaataaaaaaaaaaaaaaaaaaaaaaaattaaatgtaaggtgttgtgaaattctcattgttgtttttgtgatacgtttatatatatatacaggtattcaagtttgtagaaactcagagcttcaggagcctttactcatggaagaagaagcagggtgtcttaaggttactccttatagtgatgctgggctgtttagcttggccacactttcatggctgaaccctcttctttcaattggagctaagagacctctggagcttaaggacattcccctccttgcaacgaaagatcgagccaagactaattataaagtcttgaactcgaattgggagaaaatgaaggctgaacatccaacaggacatccatctttagcatgggcaattctcaagtcattttggaaggaagcagcttgcaatgctgtcttcgccggcttgaatactctcgtttcttatgtgggtcctttcatgattagctattttgttgattatttgggtgggaaagagactgttcctcatgaagggtacatccttgctgggacgttctttgtagctaagctggtggagaccttaacgacaaggcaatggtatctcggtgtagacattctgggtatgcacgtaaggtcagctctgactgcaatggtgtttcggaagggtctcagactctcgagcaccgccaagcaaaaccacaccagtggagagattgtgaactacatggcagtagatgtacagagggtaggggactattcttggtatctccatgatatatggatgcttccaatgcaaatcattctagctcttgcaattctgtacaagaacgtgggcattgcttctgttgctacattaattgccaccattatatctattgttgttactgtcccacttgccaaaatacaagaagaatatcaagacaagttgatgagtgccaaggatgaaaggatgagaaaaacatcagagtgtctaagaaacatgaggattctcaagttgcaagcttgggaggataggtaccggttaatgttagaggatatgcgaggtgtggagttcaagtggctccgccgagcgctctactcgcaagcttttattacattcatcttctggagctctcccatatttgtttcagctatcactttcggtacttccatattcttaggcggtcagctgactgctggtagtgtcctttctgctctggccactttcaggatacttcaagaaccacttaggaattttcctgatttggtttcaatgatggctcagacaaaagtttctcttgatcgaatttctgggttcctgcaggaggaagaattgcaggaaaatgcaaccattacccttcccagaggtatgacagaaacaaccatagaaattaaagatggcatgttcagttgggatcctatctcttcaaggccaacattatcaggaatacagatgaaagtagagagaggtatgcgtgtggctgtatgtggaatggtgggttctgggaagtcaagctttctttcttgtatcctaggagaaatcccaaagatctctggtgaagtaagttgctattacatgttttcagtttggtttttgatcatcttttcttctgtacttgttggatattatcttcatattcttatttgtgctgaatctttttaggtaaaaatatgtggcagtgctgcctatgttcctcagtctgcatggatacagtctggaaatatagaagaaaatattctttttggcagcccaatggagaaaccgagatacaagaatgttctccatgcttgttcattaaagaaggatcttgaacttttttctcatggagatcagaccattataggtgataggggtataaatttgagtggtggtcagaagcaaagagtgcagcttgcaagagcactctatcaagatgctgatatttatttacttgatgatccctttagtgcagttgatgcacacactggctcagacttgtttaaggtcagatttgcttttttgaatgattgataccaccgtgtagtttaaagttttttaaaaaatggctaacaactgaatatggaaatgcaggattatattttgacagcattagcagataaaactgttatttttgtgactcatcaagttgagtttctgcctgctgctgatttgatcctggtaagcactctgctttatgtatatgtgttttgcatatttatcagctgaacttttcggtctctaaatatatatgtaaagaatcactttttttttgttggtgtcaaagtttcatctttaatgttcattgtatcttataggttcttaaagaagggcgaatcatacaggccggaaagtatgatgatcttctacaagcaggaacagattttaacacattggtctctgctcatcacgacgcaattgaagccatggatatcccaaatcactcatctgaggattcagatgaaaatttgtctacaaatgcatctgtttcagatggtaaaaaactcgatccagatggtagtagcgttgacaatttggcaaaggaagttcaagagggtgtgtctgccgcggagctgaaagcaattaaagagaaaaagaaagcaaaacgctcaagaaagaagcagctcgtgcaggaagaggagagagttcgaggaagagttagtatgaaggtctatctatcgtacatggccgcagcatataaaggcttattgattccgcttataattattgcccagacgttgtttcaattccttcagattgccagtaattggtggatggcatgggcaaatccccaaacagaaggagacatacctaaagtcagtcctatggtccttattcttgtatacatggcccttgcttttggtagctcctggtttatatttgttagagctgtactggtagctacattcggtctagcagctgcgcaaaaattgtttctgaagatgcttagaagtgtatttaaagcaccgatgtctttcttcgactctactcctgctggacgaatattgaatcgtgtaagtttttcttttcacttcaaaatcatttgtcaactgttttattttatgtgagtcaattgcacatgattaatttcatgtatcatttgttattacaggtgtctattgatcaaagtgtagtggatcttgatattccttttagactaggagggtttgcttcaacgactattcaactaattggcattgttggtgtgatgacaacagttacttggcaagttttgcttcttgtcattcctatggctattgcttgcctttggatgcaggtaattaaatatttcaataattggcaatgtaaaagctcttgttttgaagaaagctgagtaataatattgcaccaattttggaagaattatatagttggtttttcgatcaattttcaaaattttattcccatgcaataacatgtccggtaggtccacatctgctgcaatgcataccgtgaccatgcagttaatattatttgtatttggcggtccaattctttgctaagctcactgaatggttctcatgcagaaatactacatggcttcatcaagggagctggttcgcattgttagcattcagaaatctccagtttttcatctttttggtgagtcaattgctggagcagcgacaataagaggctttggacaagaaaaaagattcgtaaagaggaacctttatcttcttgattgttttgcccgtccattcttctgcagtcttgcagctatagaatggctatgcctacgcatggaactgctctccacctttgtctttgctttctgcatgattttgctcgtcagctttccaccagggagtatcgatcccagtaagtcctgtaacttctttattgttgattacatgtctagactaagaagagggattttatttgtttcggagttgtaaatagagtaaaacagtaagatgaacttcacttctagaactgaaatggatttttagttgaattttgaaaggtaaaaatacattgatatgaaagatttgagctagaactttaatctctgttctgttggacttctatgtgccattacaaacaacgaaaaacattggcactatcctatgaaaaatgacatgatttaacaattgtcctggctactaacattagttttttgatatgtgcaggcatggcaggccttgcagttacttatggtcttaatttaaatgcacgtctctcgcgttggatacttagcttttgcaagcttgaaaataagattatttcaatagaaagaatttaccaatacagccaaattccaggagaagctccatcaattattgaggattctcgtcctccaacttcgtggccagaaaatggaacaattgatctgattgacttaaaggttagcatttttgtttcacttgtgaggcagttcaatttgttgtcagtaaccttttttaattacttggtatgatgtgttaacaattgcaattgtgggtgaaaaaaaaagaagggtttggaaattgctgactgtctctttttgtacattaaaggttcgttataaggagaatcttcccgtggttcttcatggtgtaacctgcagtttccctggtggaaagaagatcgg

SEQ ID NO: 187483 - DNA, 3404 bp, Cannabis indica
aagtaatacattgaagatagtatttatgcaacttgtataatcagtaattcaatttagttggattttaaattaaattgttctgaatattcaggtgctataagttcttatttatgcttcttggccttcttaatcattatctttttgctgtttcatagatgctaagataataaggtgttattatttacaattgatatctattggcagatgcaaattaccactggaaagtatcacacattcctgatcagtaattcgtcagtgtactcatgtggttctggcttgtacggtcttcttggtcatggatccgaaactacgcagtgtgtaacatttacgcggattagctttccatctaaagcacacgtggtccaagtctcagcttcccataatcatgctgcttttgtcatgcaatctggagaggttagtctcagtaactggtcataccatttacttaactgctgtaactaagagcatctgatactgatagcacttttacaagcttagtgtgggaccataaagcggagcacttttacatatgttagttttcagggttacatgatatgcttgggaagcttcttgcagaaatgaatgcaaaaataacatgatcttgtgatgaaatctttaagttagaatcttttatgattaggagtgaaacaaaagcaatatggtttgggctatttaattatttataatctattgcttctcaaattattattatcattttatgatcagagctagctgtctagttgattcccggtttgatgtacaatgttgtatgatgaaattttaggttgcaactttgattttgtctgtcacatgtttacacttcgcaatcaagatagtgtccattggttgaagtttttagattttgtatcttctccatttcagtatcttttaaattcattataatgatgttgagatatccataatctagtgttgtttttaagtgatataggtgttcacatgtggggacaattcatcattttgctgtggacacaaagatacaaatcgccccatttataggcctaggcttgttgaagcattgaagggagttccttgcaaacaggtacactttcaaagttattttgtagatgaaattttgatttgaaatttgaaatataacagtgtttggctgaaaaaattaaatgattacctacaaattattgttgctactaatattaattggtatcgtttgctacacaacaattactgtaggaaaaaaaaataaagaaaaaaaacatttaccatagtttatcggtcgccaaatattctagtttcaaaaaataaaataaaaattaagtggttttgaagggccagtagtgtctcgtgtttccattattatcctaaaaacatggactcctgtattttaccacacttgctgtgaaaagcttttccttgagtccaaattatagtgagctctcccacccctccaaaatgttagttaagttgttttggatcatctttctggccagttatgctgtataatgtgcctgttgcacatcaaatgccaataaaaaaaccagtacttatgttagcattcaaaggctaaaagttaaaatttcgagctagttttaaagcaaatcaactaccttacatcataatttgttttctagagtacttgttgtgtttgcttcagaagttaaaactagtcttttatttgaggaaaagaaggttaaagcttgtttcaggttgctgcaggtcttaattttacggtgttcctcacaaagcaaggtcatgtttattcatgtggaactaacacacatggccaacttggtcatggtgacacaatggatagaccgacacctaaactcattgaactgctcaaggagttggctctgttgttcaaattgctgctggtctgagttatgtgttggctgtaatggatgatggaacagtctactccttcgggtcaggttcaaatttttgtcttggtcatggcgagcaacacgctgagttcttaccacgtataatccagagattcaggagaaatggcattcatgtggttcgagtgtcagctggtgatgaacatgcggtggcccttgattccagtggatacgtaagtctacatactcaaagataaactttctctgttgtaatatgtatcttaccgtgtccatatattcagaaaacttgaaccttcttaccattgcttggtgcaggtgtatacttggggaaaaggctactgtggtgcattgggccatggagatgagaatgacaagaccacgccacaactcttgaacatcgtcaaaagcaatgttgctgtgcaggtgtgcattgtgcttttatgcattcaatactgtgtttaattagactataaactattcctgttccacagcttgtagtcctctttgttcatcgtgttttgtataaatctaattgtttctgtactgtgtaggtctgtgcacgaaagaggaaaacctttgttctaatcgattctggctcggtttatggttttggttggatgagttttggtagtctcgggtttcctgacaggggagcatctgacaaagtcaccaggcctcaaattcttgactgtttaagagatcaccatgtttctcaaattagcacggggctataccacactgttgcagtcacaaaccgagggcgaatctttggattcggagacaacgaaagggcacagcttgggcatgacactttgagagggtgccttagacctacagaaatttttgtagaagaaatgactgatgggttggatcttataccagacactgacagtgcgtaacctccagatcttaccattgaatgtaggttagtgctaagtctacatgcccaagatgaacataataagtttttatatcccaatgtaaacagaatatcctaaatttacgttattgttagagggtaaataactgttgttatttaagagttcatatgtaacttgtgatagttttaatttatccatattctgtaataatactgcagagattaaatgtattttattccacatatttaatgcttcctttcaaactcattttgttttattattctttatgtcttttttattagggagtaatgattcacacacatttaaattatacataataatttaagatggtaaagctactcagcagtttcttgtccttgcccagtaaattctttcggttcctcagcgttcaattgccaattctgctaatattttttttgtctttatgtaaattaaagaaagaaaccgaatgctcatttcgtttggatgtaactagttttgcatatacaacgacttcgcttagaaataagcatattctatagacaatttctcattcctaattgaacttgttcttttaatatagaaaaagattcgatttttatatatttattagttcattcattcaaggctggaaaaggaaagatggcttaaatgatcagagataaaaccttcatgataataatga

SEQ ID NO: 187484 - DNA, 3186 bp, Cannabis indica
gtaaacttacctggccgaagtgccataacatgtctgtaagtgcgttatagaaagcagatgctgtggaagagtccatctgctttacttcatcaaacagagactgagcttgaacccaaacattttccctgtagcccatgagaagaccgtgggcaacaccatagacctggttgtcaaataaccggagctcctccaataagattgaagcttcttcaaatgaattacatcggctgcatttattacgagacaaattatcctcttattcagtgagatccttggattatgcagtatgaaatcagaatattagaaggaaacagaaagcatatggtgctcaatatgctcattattcattacatcagatgattaaattgttattccatactctgtatcatcaaatatggctattgcatttaaaattaaaaatccatcatcccaattcagttaaccaaacccgacatttaggcaggaaaaactttatgagagaaaatagtagagaaaaaatgaaggacaatattttccataaatttgacatgagacattttttttaatattttcttttttatacatttgtaattgatctaaatttacaatacactcccctccagtctaattttttctgaaaatagaatattcataatttattgattctatccaagaatcctttttttattttttttcctttttaaaattcaagaacgtccaaacaagggcttagttttagtctggagtaatatgtttagctctaggatcgcataagcaaacgtatatttttacactaacgtggacaataactagttacaaatataagaccagttgaaaccttcatgcaacgctgaatatattggaagatggaagagcataggaacaagaaacatacctgcaagcatttaaaattgcggaaaaagtgacaacatttggtttgatattcaacttgtgcattttttgaaagactcctagaatgcataagatttcttgactacccttcttattattcttccattgcccttctttccctgcagcaagttgcccaaacatctttataatttgactgtcggctttatttccaacctcactttcaattgcatcctcatggggatttgaaaccgaagactttgccttgagcttactttctacactggcagcagcatcaagtgaagaacctaactcctctggtcggccaaacgcatcaataattgaattataagtgatgacattcggcctaattccttcctttgtcatctcatcaagcaaagaaacagctgactccaccatcccatttttgcataaagcattgataagttcactataaagaacaacatcagcctttaatcctgcttgcttaaactccctaaaaacttccattgcctccttatacaaaccaccttttgaatacacatcaatcagtgttgaatacgttagtaagtttggagatagtcgatcttctttcatgtgttggtacattcttttgacttcgtcgtactttccttgctttccatacccacccaaaagagcattataagacacaacatccttagtgatcccagcattatccatctccctgcaaacactcattgcatcctcaaacctacccagcttcgcataaaccgaaagaagtatgttatacaaaactcgatctagagcaatagccatatacttcatgtcgctaaacaaattcaaggcatcttccaatctatcggctttagcatagccatcaatcatggtactataagtcaccacattaggataaatattctttgatggcatctctgacatgatctgatgagccaaatccatctgccctcctttacaaattgcatccaacagtgtgttataggtatatatatcctggtcaatctccctctccaccatctcattaaacaacttcctagccgtttcccacaaccccctcgactgcaaaccgcgaggagtgaattataggtaattcgatcaggttgcactccactcctcaacatctcatcaaaaatctccacaaccctcttaaaatctgctccccctttaccacaggcatcaatcacagcattgtaagtaaccaaattcggtttcaagcccgaccccttcatcgactccagcactctttttgcctcctcccaatacccacttcgtccataagcactaatcaaagctgagtaagtgtaaacagtatttccataaccagaatttaaagctgtttcaaacacatttttagcaagctcaacctttcctaacctaccaagtgtactgatcatggcgctagtcaatttcccttgttcagtcttcctcctctccctagaaacagcaaactcaaaacacctaattgctttcctacactcacctctattcccaagttctctcaataaaaaagtgtaatcatcagacccacaaagcttggactcaaaactaagcaaaacaccatcaagacccacatcatccttaccgtacacaacagcctgctgcagagcctcctcagcaaacgaagtatggcgggagcccacggtggtcttggggcgtccccaatgcattttagagacgaaccgggtcgaccgacgaccggagaagacagcagcgagctcagacttgggagcagagagagggcaaagagactgaaaggcaggattttgagatagactagccgtagtagaagcgggtttagcggtgttccgaggcggaggcgccggtaaaggtttggttaaagagactttctgagaagtccattgctgagtttgacgattggtctgccgctgacttttgaggttggggttttgaccgtattggtggctttgatagggctttgacgccgtgattgagcagtgcggtggtgtggacgccattagaacagagatagagatagaaaaggagaagctttaatggagggtttaggtagggtttggtactggttagaaaaatgagctatggagagtagcccataaagaaaaataggatgatgggtaagattttagagagagaaagagagaagagagctgagttggctcggctttcctgattttgtgtttttagattccgacaatacattgagatttccgtctttcccttttaacttattaatttttcttcccataaatactgtatacccaatctaagaacgaaatcacttgtttagccattcatccgaaatacttgttacgtttgatgataacaaaacgcagcgttttagctgacgtggttgggtat

SEQ ID NO: 187485 - DNA, 1898 bp, Cannabis indica
tttttattttttatttttttatatttttttagggaaaaatttggatttttgaaacttctgttattgaaaacctgattatgtggttcgtagttcctcaatttgtgatttttcatacatatatatgtatttgtattgtttcgtttcgcaggttttattataattattgcttcgtctatgtgaaagaaaaatgtattcttcaagagggagtaatgcgtacggtcaacaatcttatgctgggcaacctgcctatggccaaaacgtaaattgtcttttctctatgttagttttacaatctacaattctttccatatgggtatcaattaacctcattagaaaattagaaaaaacttaccggcctcgagtgatggtttcagaggtggtaggtatactggtattgtttttgttgttgttgtttcgttgtaaaaaacaactctactttatcttctcgctgtttaatcccattgcaattgctattaattttttaaatttcaagagcacatagctatgttagttttgctttgattgttttttgtttgttccatttttttttctatagtttcaccccatttttgcttatgttatagctgggctctgcttattccggaagtactgttggaggtccggacgggggctctcaactttccatatcttctcgtcatacctccatgttagcttcttcccaagaagccgacgctactgcatatagagctcatccttcagccacggctcattacgggggacaatatggttctttgtatagctcgactgctttgactggtgtatctcaggtaggataaacatatatgttaagatactttttagtattatctactgcgatatcttcgctaattactttcttctctatcagtttttatagcgtagttgcgaaatgttctttcgacgtggttttcatggtttattttaagaatatatgattatcgcaaaattatcctttttgttactgatgcataggaatgaattgtcttatttaaacaaatgcgaacttgtttaaacaattttattctaatctagatatagtatgcacacggagtgttttaattaatgataaccgggtcatatatatatatataagaaaatttttaggtaggggaattactttgcccttatcggaaggacattttttgttttcggtacatagaaaacctatattttttttttcgtacaggagtaaattatagttatagtagcattttctctgtttaaggtgtcgaaaatgtgattcaaatattaaggtgcaagcgtgcctattttattttacgtgcaattaaccgttttaaactttattttggatgccataaattattcaaaaattttcaaaattgtgtaggatactgactgtaacatggtgtacatatatatgatttctttttttgaatataatctctctaggtgcctaaaacagaaaatgtaggggcaaaattgaggccccacttgaaaagctagctccttgtgtatatatatatatttttctgaattatctggtgcattgtagtacttgatgcacatgttaatgctgtacgctatttgagcaggttccatcaataactaccaaagcgggaacatctactttggaaagtcgtggggcttatacctcagctgttccagattcaccgaaattctcctctggtgactatgtctcctcttcaacccatgggtatgctcataaagggggtcaactatatggggaaaaggttcctgattatcctgttatagacagaagacaatatggggaaagacaaagttcatatatgggaagggacttgcaaaatgaatcaactggaagatatgctgattctgtcagtttcgcacatcaggtactgtattcacatcactttttagctatattttctgatttttactcttctcatattctcatt

SEQ ID NO: 187486 - DNA, 1354 bp, Cannabis indica
ttttgttcattaatccaagggaataagcaaaaacgcaaatgtgtagatttctatagctttagacacaaaagctttgcactcagttcttatcaagtttcagacaacggccaatgaaagttccatacatgaaaaaaatcacacctatttatgacatgaactaaactgaagcaactaacattttattttgggagaacaatctatattttagcaactaaaatacttaaattattaggtttgtaaattattatatttgtagcaattgagtatccattttttttgcctccatgttttggtgcattatggtgtagatatcggctccactattaagttgcctatgtggtgtcaaatttgcttataactaaatatttttgcagcttaaatataatatagatattaagtgctaaaaagaaaaatcggtgtccataatttggtgtagtttagtgcattccctcgccaaaaatataactttgagactttgagtacttaattgttataaatattttagctgctaaacatgtaatttagatacttaagtacgacgagtataaatatttgtaaatctttgccgttaagaaaataatttaaatacttttttgctgaatacatactacaaacttgatattataatatttcaggcacttttggttagtgcaaaattacaaccacctgacccaactactcttagagttacttaactacctacacagtcttcgtaaaatttctcgtaggcattttcacaaacaactgagccgcacaatcttatgagcagagatcaaataaaagatgaactacattaactcaaaccattacaattctaatcaaagaatacaatcagataagaacgaaatcaggtcactgaattgttattgaatacgaaggaaaagaagaaagaactgtacctgcaagaagagactccatagacggagaagatgatgatgatgaggtcggttttggagcagacgacaccgtttgatcgcggccttgaacctgagtagtcgccgtttctgaagcgacgtcgctttgagcttgacccattgctagttcagattcagagagaataggcaagaaagcgattaaaatatatgggaatgaagctggcgcgaccgagcgaaagatcaaaagacagttactggtcaacaagtcaaccaaaatcacaaacgggcttgattggacatgttaggcccaaatttaatgggctttaaaaaagaacgagcccagcccatacaaattgcctttgccttggcattgcagttaagttaaaaaaagggaagaattttggttttcgtgctgtaccgtgtagaatataacagaaaaagagaaagaagtgaccgagtggagtgaaatcggagaaaat

SEQ ID NO: 187487 - DNA, 1241 bp, Cannabis indica
aagtcacacactgatgggacaagaagagtacctcttgcaggccctatgtaaaacataaaaaaggaccaaagttctatccgccaatccccgagagaggatgagcaaaaggatgaaggtgctggaagcagagatacaagacctacatcaatagatagctacttccttgaagaaagacttgaatgatgatgaggagtttgatgaaaaatccccctttctcaagggaattcaaattaaaccacttccattaaactttaaggaggcgcggatgacaccaaatgatggtacaaccgatccaaagtatcaccttggtgcttttaatgagctaatgaagatgaagaaagtttcgagcaaggctagatgtcaatgcttcgtggtcacgctagaaggggttgtgtataaatcgttcaagaggctagaaccgggggaaattgcatcttaggagaaattttcagaagagttattccaacaacatcaagcagcatttaactatatcatgcttatcacaagcatcaccaatgtgaggcaaagccaacaagaaagtttgtgaatctacattcaatgttttagctaccaaggtgggaaaggtagatgaactcaagatctccataactacaagagtatgctctggaggtgggctatgcgagaagatgttgaagagagaattgattgatctagatgacttctatggaagaataaagaagtatattcgtgtggaagaaggaaatgtatgcttaaagaaaggtacgagtgaatactcctcaggaaacaaatcaaacccttatatggtctgttagtcaatacacctcgatgcttataagaaaatgtacttaagtggcactttcaccccttcacccataaaaatcaagtatctaagaagatttagcgatgttgaactatcctatttagcttgagtgaccaaagaagactctctagttggtctcatgtaacaacaaggattctactttcttttaatgtgttgcattaaattaaagaaggcatctaaggatgacctccaataatagcaagggtactcggtacttatgaaattaattttatcaatgaagtgttgaattttatcttttatatgacgttcaccattttatacccatccattcaacttgtttgctttacttggaatttgaaatttccaaagtgaacgaagtaaaggaacaataaaaagtagcaagtacttgccaacatgagcaactacccaccacaaaaaaaaaaacaaaaaaaaaact

SEQ ID NO: 187488 - DNA, 12059 bp, Cannabis indica
aaaattgtaaaatgactttttatttatgtattcacacctgacaaaatgattagtgcatatttacaaagaactttacgcggttattgatttttttttttgacaacggactttacgcggttattattttatcttattatacacatttattttggctgctattatcttgttttattacacaacttttttgctcatcaacacacataaattgaatcaatagtttatgaagtattgtttttatattggtggtcatggtaatatataccaacatgatcacctattctcaaagggtagcttccacattctaaaccaatccaaattgagtcaatatagaaaatacttgctagagtgtaagaatttttagaggtttctcttcatcatgaaagaacattgttcatccatattagagttttgataattagagctgttagtattttggttaagtaaaattagttataagttgattagaaaggttgctatattcggttgtaaccataaaccaactcacccttttcttgtttgagttagatcaaggattccatgtatatataccctttttttttaagataatacagtttactcttttgatcactaatatggtatcaaggtctaaaactctttctcctctcttctctaaaagttttctgccattaattcaccatggtaaaaacacaagctattgaatttaggaactctcgccaaactctccggccaaacactttatcatcaattcaagatgctccttcgacaaaccctctgatcattcctccaacttctagtgttattagagaatattcgcacgagaatctctaatgcatgtcgtaagccacgactttttgacgtcaaaatctaacggttatttttgtagaataaaatttttaatccatttatttatttagttgtattttaaagtagtaaaatattattttaaatttttcagcacaagatgataaattttttaataatttgttatctatttgttatctattttttttatacattttaaatttaattttattctattcttattgtcattcatatttttatattttcattcttccaaaccacctccctattttcttattgttatttgaaccctttttgctaagggcagcgaagatacacatcaatattctatatcactaggtaatccccacatatgtattctattgcactaggtattaaattttaaatgcttaattaatttttagaaaaacttttttccaaaataaatttagttaaatcaaaataaggcataagtttatggaatatatgtactccagcggaaaattattattattattattaatgcaagtaattttgtgctaacatcttgaattaattcatgtaccatttaatcccagaggacccttagccacaagagcacgagttctttccagtgtcagcagaggccaatttatgactacgctcccattcatccgtagaagcggcttctgcgtgaggaacgtggcgaggatgtttctctctcttgtcaccctttatctgctttaatgcatgcttaagggcaggtaacaaagcttccatgcactccccaactgcgtttggattcccaggcatgttgatgatctgaatatacaactatgttattcaagaaattttcaccaaatgaaatttcaccaggacagttggagactcgagattttctagatctttttatctttatgaggaaatgacaatgtccacgcgaaaatttaaattcaaatatgtgatgatggaagaagagggggaagagagagagagagagagagcataccagtgtcgatccccttattccagctgctgagcgtgacagcatagcagatggcgtcacctgtttcgaaaacagtaatgacacttatatgaccagtaagaaaaaaagattatgcaaatcaccacaagtatcagtgcactagaaaattggcaaacacaacacgagcacaacaaaatcaacagaacttggaccaaatatgataaacataagatatttgaagtgcagtaccattcaaatctctctttttttgatattttaatgtaatgtaattcacatttgaacatgcaccacttgttgctagctcaagtgggtgcctaaagtgttctcaactgggaatcagggccaactgtttgttataaaaataatatgacaagcaaatgcagtatacttatataggtaaaggttcaaatgtactacaagatacagcatctaagtataatggcaaataaggtactagctttctagcttcccattccccaaagtcctgctcctccgatacctccctctttcttccacccccaactgcattcttcaatttgatttcgataataacaatgaatctggtaaaaataacaatagagggaagcttaccttcaagctctcttgcatcatgacatacaagagtccaggtgtttctttctcaatacacagcttagttgcttcaggggttacatcccgaggggagaaaccagtgccaccttgatcagaacaaaaactaatgttataaaagtgtgacttcaaaagtaatgatgaaaatcttctcaaaatacaaagggaaaaatccttgtgtttaaaccgaaatgtgaatacaattttttttgttttaccaagggtgaggatgagatcaactttttcaatatcactccatttctgcagaacatctttgattttgctcacatcatcaggtactgcagctgtcaaaacaactctagctcctcctaactttcctgctgatgaatttacaacagaaactgctctaggaccactgcaaagttatagatcttgttgtaagacattatgtacttttataaaaaggactccagcacatgcaacgcggagagaaacattaacttgttgactagcacttgggttattctttgccatgacaagacaattatcagtttccttgcttaggaatcaggacacatatattgcacatatttcaaaatcgcctgttgaaaatatatatgtaggagttttgttttggtggcagtgtgcctttttgctcctagagcgtctttatttttgattgtacattataataatttaggaccctataattttttataaaattctaaataatttaccatgccgcttcaaaacaacttgtttcgtgtgtgtataaaacaaacttcaaaacaatctatttagtttattcagcacatgaatgaattacaatctaatttttttatatgatgatatacaatatagttatttagaacttaccataaaaatttgagaaattctgtatggcactgaaaaaacaaaagaaaatgttgtgaaacttgttttatatgagtgataaattgttttgaagcttgtttatgttttggcacattaaattatccagaatttcacaaaaaactgaccgagatcttaaataactaactactatatatgctgtcatataaacaaaataaaaaagttaatttcaccatgtgccaaaacaaagatacttttataataggggcaaaaggcacaccctcacaatataaactcccatatatattctgaaaatgatcttgaaacaaatatttaaaaaagagtaatcaacaagtgaacatgataatgacttagattttatttcctacaggctggaattccaaggactggaaatggaaattttatttccttgtttggaactccatggactggaaatgatggtgtggaatattgggaaattttccagagggtcggcatagcattaaatatgttgcaaagcatttagtatttcccatattgtgcttcaaacaagagtagtaccaactttgctcttctactttggcatcaattagtgaccttattgaaaagtattttcaataaggggtatccagatgcaagcaactttcagtgtcgaccttcaaaatccccaacattagaatggtatgatgatttagtaatataacccaacaatgcacttgttggagtattgaggattatcttttcatgtttctttacttttttttattgttgggaatagtggaaatgagtgaggagacattgatttacatcaaaaaaactccatggactgggaaatttcccaaggggattggcatagcattgaatatgttgcaaagcattaagtactttccatgcttgagctttaaaacaggagcaataccactttgcgattctttggcatcaactagtgaccttattgaaaagtatactcaaaaaggggtatccagatgcaagcaattttcaatgccaaacttcaaaatccccagcattagattgatatgataatttaagaatataatccaacaatgcagatgttgaagtattaagggttatcctttcatgtttcccttttcattgggaacactgtaactgagtgaggagacattaatttatatcaaagaatttagcccttcctatgttttccactgacgagcaacattaaatttttctctattttctttagcatcaatacggtaatctatttgtgtatatataacaaggattgtatctgcatgcaattaagttttgaaactgctacccaaatccctgtccctgactccagaacaatcagatgctaaaccacttaaaaggtatggctagccattaggatggtctccgggtggctaaagtaaacatccttatagaagagcattcacccattcaatctcaaactttgagaaggaggaacatcaactctactatcaatttggcatccagaaagtgaccctattgaagacaataattcaaagagctgtacctagatgcattggtctcagaaccaagtttcctattggattttcaagaaaacaaatatagatgatagattaatattacacagagccaagccaacatcactttaaaatagcaaattcgtatgcaatatagagtttcataccttctatctggtccagcccccgatgcaacagtatcactaactgtaagaatagctaatctgaattcagaatcatttgtacttatttcttttttggcatttgcttgcaatgtagaagttggattggatgtgggaggatttttgccaatagcaactctgcttaaatcggaaaatatgatggctgacacagaagaaccagcaggcatcacacttcctgttgctggtaaatccagtaaagcattagcagatttcatactcaaaagccggctgctcgtctgatgaccagtactctcagcaacaaaacttaaatcgccaaaaagaaaatgaaacataataagaaaaagattaaccatttattaaacgtgccaaaggagggggaagaaaaaccaagtattgtggaagtccaaaaaaataacagaacagaaaaggtggaactgaacccagaatattaacgagtataattcaagatgacaatttccttgcacaacttacccagccttgcctgctccatcatcaacctcccacccaacaatagcacgatgaaattctggacggactgggtctgtacttaaatgctgacaaagacgggcctgcactctataaataagaaataaggactttagggaaatgatctagttcagagtttttgatttagcaaatgactttgtttatcttgtttataaacatgattaattgaataattcaacatgctgtgtcaattttaaaatgtagattcaaaattggataatatatatatgtaaagacagacagacagagagcttccagcaaccttaaaagatgaggatttgcccatccagaaaggcggcggatggcaggtaccacaaagagatggaaacagactagactgctcactggatttcccggcaaaccaaatgcaagaatctttttctctggcctatctgctgcaggtttagcaatgatctcagcaaatgtcaaaggttttcctggtttcatgttaacctgaatagtcaaatcaatgttagttttggtttttcacgtaaggactttggagctcttgtgtttggtgttccaaagggtttgcttgtgttactttctagtggttgattttttatttattcataattatacataaaatatatttttcttggaagaatgcctggaccaatttcgtatcatgtctacattacttcgagataaaaaaaataagttgtttcctatcaaaagttttcttcttttcttccaaaatatataagtcataacaacaaattataacaacttgcaaacacaatatcaacctttataatgtataaatcgcatgacagcagtggaagaatagttagactacgtctatacaaaactagtctaccttactgaaatacactgttcctctctttttgagaagtggcttcacaaaatccttgtctcccatggaaacaccaccagaagttaagagaatatcaataccagcagaaactgcaccatctacaactctctctagttcaccttcatcatcttttacgatattcaggtcaagtaatttgcactgctgctcttttgcagctgtcaatatcatagctcgatttgaatccctaatctgcagaagagttgaattaacttcacagctaaaactgtccggaacacataggaagaaaaaaacattgacaaaattccaatgcatagaaaagatttggcaaatatgactgaaatataatccaacattaaacaaaaatgtagaattcttgtagaaaattcattatcgacaatgaataatatattcattttctaattatttgggtaagtagacacacaaaagacggtactgaacacaataaaacagaaagtaaaaacagagaagagcaaaggaaaaaccttccagttaagagagaaaaaaaaaatttaaacaaaattatctcatggattatcagaagtatttcaagctttcatgttttaccctcatgggaggcattaggtattgatatagatgagtttcaatctacagttctgattgacaataattgcaaactgaaagcttaaagctatctctttgcatcattgtcgctagaaaattttgaaaggaccccagggttgaagtttgagcttctccaatagacatccaaatctaatacctggccacgacttaagcactttgttgatggatctacaagttcgtctccagtagaaaggacagcaacagttgggggccggtacacctgtcatgacaataacagatcagaaatttgcagcaataacacgcgcaaagtaaacaaagtatattatttaaataccttcaccatcattactccaacagtggcaagcaggccaatttctgaggctccaagtctttctccatgttttaagactacagcatctttttcaatgtcacatccctgcaagcaaatacatgaatgaacttattaaaataggaactaaaataaatagcgtactacattatctctgggaatctttacaatgcttctttcagtcaataataattatagacatatataaagaaaagtaaataagtacaaaagcttgcaatagccattccacattgcatgctaaaacaactcattttcccttgataaaagagttatttataattgtctattcccgccattcttgagacatcttacatatccataagctctcatatttgtgatatgtgaaaagtaatatgcttattttgatttatgggagtagatatccatttttataaattcaaaattattttgtcatattacaaccatgcaatataaacaaataaatttgaaagtttaatcagcatattgtcaagtaatgatattataccaccgggcggatatctgttccttttcttgtttgtaccaatattctgactcgtttggattcatgtgaagactcttcaatttgttcagtgtcttcaacttgaacaacagcatcagctccatcaggtattggtcctgagcaaaggccataccaacaattgagggcacgaacagacattaaaatctattcacagaatgaaattaagtacaaaagctcgcaaatgactccaaagctccattatgcattgtaatcatcggtatcaagaagtcctcacttttaggggaaaacaacaagtaactccaatgatatcattttgaattagctaagatattgccaagttaaaacagtattatattgatcaaatataagagtcaacagagtcgacaaaaaaaaaaagaaacttaacttatttattttattttattaaaaagaggagagtagaaaatttattctgctaaggagtaactgctaatgaaattctttctatggagaaattgatggtcagagtatgaaatattataaattacacttaaaaaaattaaagagtagaaattctttctatggagaaatgatggtaagagtattaagttttgagtattgattgtaatacacacaaatcgcacacactttttacataatgatatgtgtacccaatctcaaccacataatcaaaagtgacatgctccctactaaaaaatgtctatggctaaaactaaatagacaccattgtgtaaatgtgagtgcaaactgaattgaatatagtcacttattaaatattgctgatgagtcagttgctgatctcaataacaatttctaatatcacctttaaccaaaagccagggcttgtatccccctactaggcctcccctaattcctctatactcggagttaaacctccaaccagatttaaacttagttttattatatgcattaccatagatagatatccaaaatcattgatgctcaaaaaggttaccaatttcatgaggagccaaaggtaaatggacccagttcaaacctcctgaatgtggtttcactatagaaggtgacttatacaagttcatggcactaagtttctaacacagagcctaatgaagtaagaaatgacaggaaatctactgccgaaaaacgtgagctgtgagataaaatttcttaaaagaaaaaatgatatgaaaggcaagtcacctccagttgtgacatatgcaacagttcctgaagtcaaagtcacaccaagtccatcatttccagctctagcttcagcaaccactgggtactcacccggcccatctgaagccacaacagcatatccatcctgaacccaaatggtttagaacgaaaattcattgaataggaaacattatataaactacagaagcttagaatccaaatacacaagcgagcgccagatttaaatgacatttacgaaaccacaaataacacccaaaacccagtaattaaatgacaaaaaaatcaaagaaaaggaatcccaagtggatcaatttactgaatttaaggagaaactaagcaatacccagttgctaattcattatgaaaagtacccaaaaaaaaggcagtggattatgtaaagatatggctattgtgtgaccttaatagacgcaggataaggaggcaaagggtctggagctcgaacgtcttcagccaagaccttgccaagcgcatcgtaaagtggtacgatgaccggaggcagacgctgggcaactcccagcaccatttgcagagcctcatcgactgaaacgatggaggttttggttcccctcccggtaacatcattagcttccattgatgatgaccttcccgctcggattggatagataaaataagagaagaaaaatgtggagaggaggctgacagaggagaggagatggtaggaatacccttcagacttcagagtgctcactctctaaatatgggtaaactattttttgaaataaaaattacattatttatttatttatttgaattataatcacgtaaatttacaaaatatatatatatttagaaaattttacaatgcaacccctttaaaatggatatattgatacactcttatgtgttttagcatccgaaataattttttagtcaaattttttctcatagtcatgtacgttatagttatttaagacatcctgcaaaattttaaaaaatttaaaaaagtttaacacgccgaaaactatgttcaaacagtgtgttgcacgcgtgactattttattttatacgcgtgtaaaatagactgtttgaactatattttctatattgtaaattatttccgaattttttcaaaattttgtaggatatcttaaatacctataatgtacatgaataatgtacatgaatatgaaaaaaattagactaaaaattatgctgggtaccgaaacaagttaagggtgcatcagtacatctctttttaaaatttttacttaatacactaaataaaaaattttaaaaaaaaataaaataaataggccatttttatttttatggtttcaatttttttatttataaaaatacgttattttaggctaattagatttttactcccgaacttttacatgtaccaaatcatgactctgaatttttaaggtcgttaaaaatgctccctgaactattgagattgtcggatttaaggacttttgtctaattttagtaaaaaaaaaaatctaacatggatgaaagttcaaggggcatgatttagtatatgtcaaaattcgaggggcataatttaaaagatatcaaagttagagagcatggtttagtacataaataatctttttttttttttacaatgaactttcattgaatataatcagagtttaggacatcataaagaaatggaggaaaatcatccattcaaactaattcgccatccaccctgagtgcacgaactgctaactcatgtgcagccatattggctgagcgacgaacatgaattagagatgcctcaggggaaatttttaatggtcataaaagttcagggggcatgatttggtacatgttaaagtttaaggggtaaaaatcctaattagctgttattttatagtttatttctagttgtattgactttcttgttattttttatagttattcaccgagatttttagaaattgaattaataaatggataaatactattttggaccatgtgttttgtaaaagttaccaattagaccctctgttttgttaaatgacaaaatggaccttgtattttttaaaatagtacaaataggaccctgaattaattttttatcaaaataaaatttaattataatccgatctaaaagtgttatgacaaaactatttacattttttgtatatgtttgtatagaaattgtctttatgttggttatattaaaaaaagttgtcaaaaattaagctcagtgtactatttttactattttggaaaatatatggtcaattttatcatttaacaaaacagtgggtccaatcagtaactttacaaaatacatggtccaaaatagtatttacccttaataaatagattgagcttaaagaaaaatcataaaagaaaaaagagacaaagatttttacgtggctgagacggtaatgagtcttagtcatcgagtcaatattattaagctctttggctatggagtattttacacaagattattctttccaaatttctatagagtgcctagccaaaatttataaccctttgcatgttgggatacaaccatatttatagaccgaagtcggattctcgggtgaccttggatacattaggatttgtcaatgtgaataagctcattgatgggataaaatacaattagggatggagccaggatacaatcataggggccaacttttaaaatttaaatgtacaaacaaatatttcaaaaacaaaaattgttcataatttattaaaatacagaacgtctctcttgcatgtcacgaaaatcatctataagtgaatctacactaaatgtttcagcaattttcttttcaatatacactagcaaacaatcaatcaaaaattcatcttccatcttgttgcaaagtgtagtcttcattatattcatagccgaaaaagatcgttctgtagtagctgtagaaactggaagtgtaagaataagaattaccactcgatatacaagtggatagactttttctcatcttgtctttaccatccattgacataactcataaatactttccaaatctgcaaaatcaggaagttatcgcacatgatcaaaatgttgaaattgcatccttaattgtatcatctcatattcttcaaagtcttgtgagtaatacttttgtaccaacttacatatgtcatcaattatgtatgatacacgcatttctcttggatctaaagttaaactaagaatagagtaattccattgcattatcatcaaatttgttacttatttcttgcaattgagagtctatc

SEQ ID NO: 187489 - DNA, 4047 bp, Cannabis indica
ttttttttttcaattaaaaaatttaatgaagataatgttgaatacaatttctttccattgattatgtggatttctattcaatttcaaagaatcagttttctaataaaatgatcaacatgaaattgttaaaaaaaatgaagggattcttatgagctactttcaatttctcttcttttattgatggaggctggttttggagctgtccaatactgcttgtacgctaagagtatctttaccctctcaaggggtccatcttcatggtctataattcttgtactgtattgcattgtatccataattcctttcaccttaacaatcatatccacatcatcccttaaaataacactaccttctggtctcaatatcctatccatttctaaaagaatatgttccatttcacatctgtaaaaataaaacaccccaaaaaaataaaggttaaagacaaaataagaagatattaaaaagaaagatgtgaggttgattagtgattacctgtcctgatagaggctaaaaactgaatctgcgtgaatgaagtcgtaagttcttggataagtagacatggcctcgcacctaccataacaaaactttacagtaagcttaactatctcagataaagaatcgttgtgctgaaaaagcatgttgcctaatctaaataaaataatacattttaaaattagccttgtctggatgttagcaacagaagaaaccaattagaagggcagtgatccctgactctgtttcagctttttgaaacacagcatatgcaaaatccactctggattattgggattttggctgctactgaacagcatgaaatcccaaacagctaatatgaacaagagagtaagttgaagagggcattaccagtttgggaagttccaatcaatccacgctcgtaaatgacaccaagggtattagtctctgagtcaacagggataacattcataatccaaacaggatcattgattagtgcagcagcaaagcctcccaagtaggagttcatgtcaagcaaattccggtatcttcctcgctctgccaattgactgtcaatttttttgtaatatgccaatctcttcttccacaactctgaattttccatgaaaatctcaggtgtaattccagtcaaacttccactgcttatccttggaggcacagaagtcaacctttctggccatttagccacctcaccacctgccacttctcttatgtctgttacactcggcagtggggtcagacatttatccattttagtgtacctgggagaaaaaaatgtgaagaaaaaataaagttaaatgtaacgggcttccgatttttgttgacttggcaaactacagagtctataaaataataaaaaaagtaatcccaaagagagtttggcatataggtggacaggttaacaaataattaggaatattgatggaacagacacctattggtctatcaaatgcttttgcaatcacaatgggtttggtgtcacacttccaaagcacactctagaactagaacttttaaacaaacaagctattttcaaataaaagtggggttatatttgacaaaacaaagcctaacaaaaaaaagtgtaaataaattagaacataataatgaaagcttttctcctgtcacattaccatgctttgtctggatcctgatcttgacagaatttcggtttcttgaaaaccttccgattcaacctacagtggacatggttagttggtttctgccaaatggcaagatcattcttctgcttcaatttcttccagcaaaggcttttggcgacagcctcaatcccattctgctcagcttggagatcttcacgagttctattccagcctttccagtggttctcccaatttatggggggcccagacaaaatccaatatccaccgggacgcagaattcgatcaacttcaatcaaataaaggccatctgcataatccaacatgttgagaattagaaacaaacaattgttgtcccagacaatgtgagataagaaatacaaaaaagatgaaagttttggtaaagtttgtattaccatattggccccaaggaattaggcagcgagagcagtgagccatgtcaaatgctcttgaagggtatggaagtcttatggatgcaagaattccaattaatgcaggaactcctctttcaagagcaaactggacctgagcttcatgggtgtcccttggggcaaatgacactgccaagatgtccctggacagtaggtaagcaccccagcttgcaaccttttaagaaaaaaaaaaacacatcaacagacattattaacaaatgatgtaaaaactgagaatttgtacaagcatataaaatatgtttcatttgttagttaatttttttttttttttgtaaatgatttgttagttaattaaataaacagaatatgaaatatgaataaagaaataggtatcttagagagttcagttaaagtaagagtagttggcttgtgtattaagagatatgactaaaagaaacctgttctacacccaacccatatgaaataataataattactaaattaataaagtaaagagtaaactgcaagttttacttaattatttaattaatgacatttaactacgaggaaaacagagaggaaatttttcacattgacgaacatctctgccaaaggctgaaccaattgttggcgctcaaattataaaacaattatactcaaagaatgtcaaagttcgttgagaaatgaaatgagtcagtcaattctattattcattacctagactttaccacaaagttgttacatgcatgacatcaacatattttgaattttggtgttgaaaacaaagggtttggtgtccaaaatcaaacctttcattgggttcctaagcgggcagttttcacctataacagacctaaatgtagctttcaaaaccaatcctcgatatcagtcatttcctaataagctaatacaataaacggacactaccctaatgaattcgccatgttgtgttgataatgggtcttagtcttcttggatctgacaaagcatgccacatttcattttcttcttcaataagaaacattcataaatggataacacagccatgtgacacaacgcaaattaggacaacatatttatcaaattagtacaagataatataaagtaagctacttaaaagaacccatttcaggggaggaaaaaaagaaaagaaaagaagccacctaatataattggaagctaataaaatctttctaaacctcatttcagaatgggataccatctccttagcaaggattttttcttttataaaaaatttcacaattaaaacaaaagagacaaatgtatttaaaaatattatgtaaaaaaaaatcgacaaatctcttcacgagggtaaatttcagcagaaatttcatgtcccaaaaatatctaatataaaagccatgagtacccaaaagttgggtaaaaaataacattaaaaaataattgttattttaataaatattttttttcgaaaaagaatatatttatttttcacatgcatattttaataccgtattttatgataataaaaaaacaagtaaattataacgcattttatgtattttcttgaaaacattcttgaaaataaaataagatgaaagaattcaataaaattaaaaaaaaaaaaaaaaaaaaaaaggaacgtaccccacaaccagtatcaatggcggttctgatggagccgtctttcagattaatcaacttgccgatatcatcgatgtaggcatcggcgccgtttggaaacatcgtccctccgccggggaatttgaaacgcccattatcataatgtacccaattctggttcctcttctcgacagttaactccttatgaggaacattcgcaaaccacgctaatccccgactctctggccaccggaacggcgtcctgtacccgtacggtgccggaattctacacttcaacttctcctccggcgccggacaatgcctctcacgataaatcagcttctccctgtcgaacttcagcgacctctgcacgtcctcgcatggagtgtactcgctcagcccgacggcgcacg

SEQ ID NO: 187490 - DNA, 1758 bp, Cannabis indica
cataatttgatacacaaataactatttacctattatattatatgggatataattttatctcattttgtactttcacggattgtaatccgtgatatacggcagccgtcagataaggaagttatttaatttgacaactgagattgatctgagaataattaggattaaaaaatagaaacgtaccctaacacttatttaatgtacctaagaccgatctaatgtaccacaaaatacattccatgaaagtacatcacgggacaaaatcacatccctaaacatatccctatattattatttctattaaattgtacaaatccaggtttctcttcttactttcataatattttaagagacacttgttctatttgttaaaaagaccaaataagctgatgagtgatgacacatatagaaaatataacatttaaatccaaacggtaaacgattaaaaaaaataataataatattaaataacagcccaacgtggactaccgtacccaatagccattgtcgttttgtgtaagcaatacgttatagaatattttttaatgcagccataattttaatattttccataaaataaaaaaaggaaatataatcacctacagccacttccattgattatgtaatctttgccgttgattttgttgaatctagtctttaggtcttatgttttagcggttgtgattggtcaaaaaggtcaaacgaaaatatatgtttcctttttctccatagtttctctctctggaatctaagtctgctccttctgtctatactgtaaccgaaaccaaaaaaaaaaaaaagaaacagaagaagaagaagaagaaaatcgattatcaatggtgttgttgctcaatgccctaaccctagttcggaccatgaggatttcgacaaacgacttggtgttgcaggctgaagatatcccctttgggacgccgtggtggttcgtcttcgccggagtctcatgcttgctagtcctgttcgccggaattatgtctggccttactcttggattaatgtccctcaatctcgtcgagctcgagattctccagcgtagtggcacctcctccgagaaaaaacaagccggtccgtcaatttccaacattttttctttttctttttaaattaaaagtaaaatattaataattgggtaatttatcgagaaattcatgctttgaaggtgatgaacagtgtttaatttgattaattttatggttaatcttggtgtggtgcagctactatattaccagtggtgcaaaagcaacaccagcttttagttactttgcttctttgtaatgcttgtgccatggaggtaattaatgatattatagctttcgagaaacactgttttgacagccattttaaggtcaataggtttaaatttgtaatcaatgtgaattgcacggaaatgggtttatatttttatttttatagatatgtgtataaatatttgtatgaggacaaaatatacagtataggaatgaacttgaagcatatttgggtgaaaaagtattaagaaattaaaattacgaatgattacaattgttaaattataaactatttctgttcggtatagtattaatactgaaattgtcttgtgaaattatctgggaaaacaataataataatctaattactgaaatgggggttgaatttgacatttataataatctgttatggatttgaagaagaacccgaaataatactattttcatatatatcttttgggttattggaaaactcttacattccactgcttgtgtg

SEQ ID NO: 187491 - DNA, 2801 bp, Cannabis indica
tgcaagtgtagcagccattacactttttcgaaacttgatgattttggcctttccaagccatcttattactccttgcaacgaccttttgcacatgttccagttcagccaaatcttattttattcaagcaagtctgcccaaaaaagcagttaaaaaacaagtgttccatcgattcttcttccctgctgcaccatagaaaatttttatcaatttcgggttggtatttggcaatcctatcttttgtcttgagtcggttaagcatggccatccacataataaaactatgctttggatagtttagccaactccaaacaatactcgaccaatgttcctttggttcggccatgatgagcttttgatagccttgagtgatgacatacttgttactcaagtgctccctttcttctaaatcatagatctcttttactctctcttttattgccacaatcttcctccaataccaactatcattgcttttagctttataatctcaccaagattgctcttttatgtatacacaataaacccatttcacccacaaattatcttcttttttagcaatggtccaaacatatttaaacatagcagcaatattccattcagttacctgtttgaggcctaaaccccctgctgatttctctttgcaaatatttgtcaattgttaaatattttatgtacaaagcaaatctattaagaatgataatgatcaattccgtgacagctataaaaaattaaaatttaatatagttttttaatttaattataactaaataaaatataatgtatgtgaagcgtgatttattttctattttttaaataatatagagaaattaataagtgtgcaatataaaatatgccaaataatttgttttttttaaaaagtaaaattgtagtgattcactttaaagaatagagtagaaatgtcaataaataatgttatgaaattattgacaaattggaagaaacttgaatctcatcatataatcatactactcgggaattataattattgtaatcatactcatacactgagtgtggctttaggattattgagatcatatataaatatatgtctatatagagtatgtacatacatatatagtcaagcacaaattaaagacataaacaccaagcaagagccaaaccaagaaataagaaataattatatgtaatatgtcatattatatcagcatagaaatgcttcttgaaggaatccatatgtagaacttgcaaacgtactgagacaatcaagctaccatcctcatcatcaccattaggattttgaagaagcacaaagtctccatcaaagtcagtatcataggtttctaaactcatagcaacttctttcccccatccgaaatcaaggtcgtacaacggaagcgtcaaccaactcacaacaccaagattaggatttccatagaaaagctctttgttatcatcagcagttgtactactcgactcttctccatgaagatcttgaaacaatctcaagtccttctgattcttcaaatacttgagattcgaccagatatactcgtttgttaccttttcaactgtttctcttatttttccggctgcaaaccctaatggattagacaacaactcacccgaactacttaaggctttcacatcaaacgaagcattgccgaagtaggcactcggcaagggcggttctatacggctcctcacgtccacgcaaatagccagagctgttggctgctctggactactatgctttcgggctttgcacgcgcaccgccaaatgtgcgcggctaacatctcataccgactatagggacgagtctcgctaactcgtcccttgttggctaacctcttcaacttctcgagctgttctttggtgacttttaagaaagctggagtcacctccttcttcttctcttctaggttgtccgattttccaatcaagagaggaaaatggtccagacacgaaagctccccatctgagacatcaccatcgtcgacttcccttaataggatttcccgatcaagaaacggcatcgttttgattggttcacctcgtgaaagagaggcccactcagagataaaatgtaatgcacttgggccgtcgaccacagcgtgtgaaatggttaagccaaggctaacaccaccacaagcaaacctagttagttgcgctaagagcagtggtagctcatgaatagggcgtgtatagtctacaaggggagtaagatgaaggtcgtggtaattatgctctgatgaacaagataaatcaccgagttcatccagtttcaaattacactcggcttcaacaaactcaaccccttcggcgttgcagttgagctcaagacgattaccggacggaagccggcgaaggcgacccgcgagtgggtagaaagggaccagagctcggctcaatgattgtttaagggttgcggcgattttatcaccgagcttaacccaatcttggggtgggcgatagaagtaaatagtgggaacatgtgtaatggtaccagtttgatcccattcagatagacatttgtaacctttccatgttggctcagctggtttcaccatgtagcaggctttcattttcagtgccatttcttcttttgttttttgcattacttgatttctaagtgtttttgtttggaaagaattgtttacaaaatatattatatatatgctataaggtactgtttttataggaaaatttagtatgctgtatagatacttaatttcctaataatttgttatttttacaatattagagctttatattaattgttttctgctcatttttacgtttggtacgcaggattggact

SEQ ID NO: 187492 - DNA, 3728 bp, Cannabis indica
ccgtatttgcatctggtttgcgcatggcctactgattgattgagactaaatcataataaataattatacgtggcttactcttatagctatatgcatgtggaataatatatgtatataacccatatagaatgtgtatggaatacataataaatcaaaatcaattatcatttaataaactaataatatctataataaagtttcatatatatatatatatataatatgatgagaaatgctaaaaggtactagtggtgccaaacacttttctacgtgtcgatatcgctattagtttaatttagtatcgggtctcatataatttaatataataacttttagagagtatcgctagtcaattgcaagacgacacgtcttaagggtactagacaccactggtgtccaatagcaatgctcacataatatgtagacgaaagtagtcaatcgataagctcttaattgtactttgaattaaactgattgccaaacttaacagcccaaattagccgtcttattaggttagacaaaatattaagggcaattaacaattcatatttaaaatatattttttaaatcatatttatatatttttatgtgcctttcaagattaaaattggatgaaaataactttagtttatgactacaatgcgtgtagaactcatcatacccaaccctaagactctccttataaaattaaagtaccaaattacaactatatatattgatcaacttggaaaaaatgtgatagtattcttctttaagcaatagtcttttattttggattttggtaaccaccctcttatagttacttaatttgttcctatatatacatataacatattatagaggttttattaaatattttctatcttgataaactgatgtctccatcatgtatacaaaaactttatttaaatactccttaacaataaagaactatatagaccaaaaatgtatagtatatatgtttacttagttaaaaaatatttatattcaatatatacacaaataagtatcagtttcttctactcagggttgtcttgctatatatgtatagatatataggtgagtaaacctaactaaaattatgactaattaaataaatttatatattctctcaacaaattatttcaaagaatttagacagatttttgagagttgggttgaaatgtagagaagtcaatctaattaagttttgttatcttgttagaattaacttaattgtgaatccggcgccacccatgtgctaaagaggtttggatataccaacctatatcctcctcttcttctctatcatatatctttaattaagcttcatttatttgatcatccaaatctgaatgagtacaaaacgagtgaaatgatttggtcaatcttctgaattatctatggatattttttattgggaaattatttcatatatactattttttttttattatttttaatttttagttggggttgtttttggtagtttctatgtgaattttaattgcaatttaaattgtttcgttagttattatgtgagttgttatgtgaatttccggaaaaatacaaagctaattagtaatttttcccccgaactttgacatgtactaaatcgtgctccatgaacttttttggccgttaaaaattctccctaaactattgagattgttaaatttaaggacttttatctaattttagtaaaaaaattctaacatatagatggaagttcaaggggcatgatttaatacttatcaatgtttgaggagcatgatttgatagatatcaaagtctggggagcatggtttagtacataaacaatcactgaaacagtaaaattgaatgaaattagacgaaagtccttaaatttagtaatctcaatagttcgaggagaatttctaacggctaaaaaagttcaaggggcacgatttagtacatgtcaaagttcgggaagaaaaattactaataaacttctttgaagtgtaaaaataaaaaaaccttccttttattttgattatattaagaaattatacacaaattttttatatgataatatatatatatatgtgctttaaatataagtattctgcttgttttatttttttaaaaagaaattatacaatttattaaagtacccaaaaaatatagagtttaaagtgaatagcacgagtgttttttttttttaaaggaaagaaactttcattaaaccaaaaacgaaaaataaacaattcaattagtagccacaaagggggctacctccctaaccacagacaaacggcttaaaagattcactctaacttggaaagccagaaaatgaacaaaagagttctccacacggggaagaaacttaaaagacaccaaactaaaattgacagaaaaagccaaacatttcttgaaaataggataagacccccaagccaaaggtaactctcctagcttgagggcctctacaatagccttcaaatccggctcaatcaaaatagaaacacatttttcttcccaagctcgctccaaagccgtgtaaatggccaccaattcagcttccagaacactactgaccatacaatgcgattgaatcgtgatagcattttataatccacaccagaaaggacaactccaatccctgcaacaccattgacgacagatgcattcgaacatcatagtcaattgatgaaaacctttgggaattagactttccatcttgaaacttagaatgaacatcaggagttagcacaatagaaactcatttaccctttttgaaatataattcagagtgtccaacaacataggggaaatgtcacaaaaaatgtagttgtttctgcaggactagatagcttcgaagagacatgcagcaaactgcattagttttttgtcattaaaactgcatagcgagataaagaaatcttcaaaagtttccatggcaagatttttaatctttaaccctagaagcataggaaccatagaccataggcaaaggaacacctgtagatgatatgaaactcaaattctaattcttcatcacagaggcaacacaaacagtcctaatgagcaaggaaacccaaaagctttttaagaggaagacaggtagccagaattttcctattgagaatagattgttgaggatggaggcttaacttccagagctccttccacacaagtttttccaaatgaaaccagaacttctgagacaatcagtaagcgcttttaacagttaaaaaaccattgcaactagtcgtccaaatcaaagtgtctacattttcctctaaaggataaatagagggaatggcaactgcaacatcaggatcaaaacactgagaaattaactatttatcccaaacacgagtaccttaaatgaacaaatcagccataaaagagaaagcatgaattatttgataagaaaagctccttcgaacctcctctagactgaagcctgaaacccacggttttgtctagatgtctttctcccccttcccaaccaaaaatcctacaccagcaacacagagatcccgaacctcaataattcccttccacacaaaggagtcaccactatttttttcaacattccaaaaatccagttttgaagagtacattgcacacaggacttgaacccagtggtgtctgttgttgttcaaaacaagctgagataatttagccagaagcgctaaattcatatcacggtatcttctcaatcccaatccaccattcttctttggttgatagagatttgcccaacatttcagagccaagta

SEQ ID NO: 187493 - DNA, 3864 bp, Cannabis indica
accccataaaaaatcttgtcttgggtccttttgggcctttttttttaatcaagtgatcaatatataattgggaattttagaaaaatacttttttttacatgtgtactgttacaccttttattttatatatttttattgtactaagttttcaagaatattatattaaaattttaaaattataaaaatatcatgtttcaataaaatataaaaataacttaaaaaataattgtagaacaacttgacaaacaacatgaaaataactataaaacaataaaaaaaaataactataaagcaatagaaaaataacaaatagacaatatcaactccttgtattatagattttttttttacttaattttgacggcttgacttatctttttgtactgttacatttttttcatgaaatttattgttacaacttcgtactttcaatttttttaagtaattggcagcataaatacttaagtttaactctcggctgtaaataaataccaaaatttaatttttgacggtattaatacttaaattatatttctgcaactccgtaagtacatggtcgttaaatgtcaagtcactatcacatgtcattttcttattggtatatttaaactgtttttttaaataaaaatttaatgacctggaccaatcagtgattgccacatgacaatttatttaacacttaacagtcagatacctacaaaagttttaaaattataacttaagtactattactgctaaaaattaaacttttaaataaaaaattacattaataatagaaataataaaatcttatgatttcaaaatgcggtatataatatgagcatacctctcaatgaccctcaaatagctcatcctcttaagaggcgaagagaggatgatttgatggttctcgtactgatagcaatcggtaggattctaagaatcatcgagactcatgtgtgcctaaagctgccattccacctcatgaaaatggaggtaataaagaccaaccacatgctcaggcggagcaaccagttgaaggcaatggacaccaaccacttgctcatgcgaatcaactaatggagatccctcaaaaggccatacaagcggagctagatggcttacaagagttggtgagagaccttcctaccttgagaggtgtcgtagacaggagtcttaatagagacagactgtctccactctcgagaagggtcatggcattagccatcctgaaatttaggatgccaaaatagagtatgtatacgagaaattagatcctttttctcacatacataatttcaaagtgcatatcgatcttcaaggtattcaagatgattctcaatgccagatctttctagccacgctgttagaaacaacacaacaatagtatatcaggctttcttcaggatttattgattcttggggagcgcgtgcaagggtattctatgactaattctcaccatcaaggcacatatatgagcccaatgattccatctgcattaagcaagagcaagattagtctttaaagaattacctacaatgattcttagatgaatccactcaaatgagggtacttagtaaagatgccaaagtcatggcaatggcggtaggacttggtgctgtgagtccattatggcagaacttgaaacttaaagcagtgtatatttttcaagaatttcaagacagagttgatggttttatcaagctcgaagaggccaccaagaaggtcaatggtgttgatccactagcagttgcccattactctgtttattcactttctgagtctcgaatcgacatttatcaagaagaggaggagggatcaacatctagtatctccactgaaccagattccccctttgtcttccaggatgacctgagcaaggggtagcaatgaagaatcaccctttgcttttgaagatgactcaaagtaaggggcaatagcaagggtactcccttgtttcctatgatgaccaggaatagaggggcagtgacaaagatgttttctgtaagtctcaggatgatattgagcaagaaagcgacattaaggactcccaatggtaaaagagagaacctcatgttgtcgcagaagcgttagtatcttgaagatgcatagttggtacgttaatttttccaacttgattctagtgccagtaccaagacactagaccgggaagcatatgagacgatccataaaattacactgttcttcaatagtccactttccactttgcaagtagatgagaagtcacctattgattcgaagaaacccagtaatctctctctattgatcaattagatccacataatgaatatatgatggtccctacactagggtagcgaataagctttttttgaataaacgaaacatgtgttgctgtatcacttatgattttcaaattatttagaaactagtgattgccgtctcataacactagattgttaacataaatgagacaccaaagtgtctaacaccactatgagtatgaggtgacccttataattagttagcagtttttttttataatttttattaaagtagaattagtaggacttgatactaaactacaacaatagtaatattacatctcacaagtgtgctagtctactatgtattatgggtgccctttaaaattactatatatatatatattttttgatagaaattagtgtttggagtagggaagcatatggggcgggaaatcccccaatttaaaagaaaatgtaaaaataattcccgtcctcgtctcactttccatttagacaaaaaattctcttcccattaagggtaagtccttgcaaacagggtccgccaccttgagaatatatagacttaaacgaagtaaattttaaggtattatgagattcgaactcgtgccattatataatatattatacacatcaattaattaagatatgaattatttattttacgtctccaaaaaatataagctctaagtatatgtaagccgatcggcaaaacccattccaatacagattaaaatatgtaagtctattttggaatctaacaaaatgttgaaaaatgccatttatttttctacaccccaaaataaaaaaaaaaatcactcactaaaggagtatcagaattggaaagatgcaacacacaaacatatgaccctacaattaatggaaacttacaaaattacactaaacccaaaggtgagttcatgtatgccacttgttacaatagctataaataacaatcctccatttctagacccttcatttcctatcatcccacgtgtcactccagatattctcattccttcttctttatttatataccaacccttttctcatctcctcactcactcactcaaaatcttctactctattttttttttctctcaggggcatttcagtaatttaaacaccaccaccatcaccatggcaaccatggcatcatccactttcacagcctctcctcttaccaagtcctccatcttcgacactagctccttccatggaacaccagtggctccaccaccctcctcatcagttcggttccaacccaccgttaaggcgtcgtcctcctccgtttccatgtcatcaactggtggttcgaaccttccgtacgacctccagaacttccggttcgaaccgatcagagaatcgatcgtgtcaagggagatgacgaggcgttacatgatggacatgattacttatgccgataccgatgtggttgtggtcggagctggttcagctgggctatcttgcgcttatgagctgagtaagaaccccaatgttcaggtggctataattgagcaatctgttagccctggtggcggcgcgtggctcggtggccagcttttctccgccatggtattattatattattattattctaaccaaatatatatatatata

SEQ ID NO: 187494 - DNA, 1480 bp, Cannabis indica
tttttatttttattgttatagtgcttttcaattccaaatgtttgttcaaactaagctgtttctatatattgaaccaaaaccaaaattgcatgagttccccttctttacttgaaccattgattttttactaaaacatgtcctaacatgtcacatgggacacaaaatcacatttttctatttttgaacacaaaaataccaaattaatctcatatcagaacatggaagattggttaatgaaaaacagaccaataacttggtaaacaacagaatgtcatgatgtttttttttttctttcatgagagataataagtagaaaaagagttgttctagattggattttggggaccctttttcctcctccttccatagtaagaaatatgaagaattattatacttctcatttgcttaaagcaaaggtcagagtatatataaattgatgataataaagactttttaaatatgagttataatattgttgtgttgattgtgttgttgttgtttttgcaggatgatatttctagccaaataagtgctcagatttttgagttttgtgatcatgaactgttccctgagacacttcagaattctgatgaagttacttcttgctcaaattgttgctatgaagtgaactcatcttatgcactgcctcaagatattgaaaaattcagtgcctatgctgctgaaaacaatggcattagcacaaccgaggctggctcaatcccaacagctacaagcaccaacaccaacaccaacaccaacaccaacaacaacactaacaatactaacaacatctcaatcatatttgattcacaagaagaaatggacaatgacatatcagcttcaattgacttctctccatccccttcattttctgtccctccttcattaatgcttggaacacaacaagaccaattcgatttctcttccctacagcagcctgcacagatgtcattaacagattctgttgttgttgatggtttttcggtacaacagtaccctggtggtgactctgttggtcctcttatgtcggcggcttctttgccatctgttttcgaagatgattgtttgtcttcggtgccttcttatgtccctctcaacccttcttctccttcttgctctttccttggccccagcataggatcatacatgactgcagggtccataaatgctgctgctttgtctgttgacacttctgggatttttaacactagtattctcatggcttctgagttgcaacaacaagaattggattatcaaggagacacttctggactttattgtactgatactatgcaaagggttttcaatactggtgaacttcaggtacccacttgctcaaatctatcaaaattagaaatttgtgtgtgttctgtcccacatcgctcgtatctaagtgatttgtggggtttatattacacttatcagctatcaaattttaactcgaaaaagaaatttgtgtgtattttgttccatatcataa

SEQ ID NO: 187495 - DNA, 2573 bp, Cannabis indica
atataaaagagaacaatgtaaaggattgtttatgcttgatgaattagcaaattgctattggagatttgccttgtctcgaaaacagctttttactaacaattaatttgcaaacggaacagaagataatggttttaccatcaaaaataataataaaaaaaattaacttaaaaaaataaacacataacggttttgctattacctgtacaatatactatatgcttgagattttatttatttattaatattgggattgaatcagtcatgagaaaactagctaaaacgtgtcaaaagaactatgccgctacatccacgtgttggacactttgcagaagcagctctgcatgactactactactgcatgcaaattacaccgttcaatgcaccgtttctcatatcttactaataccccaaattgtccaattctccctttaaaagaaaaaacaacataaatccgaggacataaaagtaatacactaccaaagaaaattccacaccaagaagaatttcaaggaaggagtagcttagccagccgcgcggccgagaaaaaaattattatggcaataatactagcacaaccgagagcattaacgtgcgcagtgggcgtagcagtcttaacgtgcgcactaactgtttctctagttctcggccacgatggcagcagtaataaaaacgacgtcgtcggctcacaagaagagccaatgattcaccaagtcactgacaaatctcatcacgctcaccttctgggcacggagaggaagttcaaggtgttcatggagaagtacgggaagacgtacggtagtagagaggagtatatacaccgccttggaatcttcgctaggaacatggtcagggccgccgagcaccaggtccttgatcccactgcagttcacggcgtgacgcccttctccgatctctccgaggaggagtttgagcgttcttttgctggccttagaggtggccccggcttcggaaatgggttggcggagactactacggcgactgcaccgcctttggaggttaaagacttgccggagagtttcgattggagagagaagggagccgttactgaggttaagatgcaggtgtgtgcgtgttgcttaattttagttattattctcatcttttatttggtaattagttaaaatacagttgcaacaaaattgtgaattattaattagtgttatacttttcaaattaatatatacttgcgttaataagatatggtaaatgaaattactaacaaattatatatattgagattattaattagttttgttgttaattatgtatattaattaaatgttgatatatattagaaatgttagcatggatcatgagctaaaatatatatatagtaataataacaatattatttattattataattattcaggggtcgtgtggatcttgctgggcttttagtacgacaggggctgttgaaggagccaatttcattgcaaccgggaagcttctcaatctaagtgaacaacagctagtggattgtgaccatacggtaattagttattaattaatctattttagattggatactaattaattaaattagtaaccatttctatatatatatttagtgtgatccgagtgagaaagatgcatgcgacaatgggtgtggtggagggcttatgacaaatgcgtataagtatttaatagaggcaggaggattagaagaagagacttcatatccttacactggtaaaaaaggtgaatgcaaatttgatcctgacaaagtggctgtaaaacttgtcaattttaccaccattcctatcgatgagaatcagattgctgccaatctagtccaccagggtcctctcgccggtacacaatataattaattatttatatcaaatcatcatatttcaataataattgtcacacttctacatttatataaattaattggtcatgtatatggatggatatgcatggggttgaatgcagtgttcatgcaaacatatatagggggagtgtcgtgtccactaatatgtggaaagagatggataaaccacggggttttgatggtgggctacggctccaagggctactccatcctcagatttggatacaagccttattggatcattaagaactcttggggaaagagatggggtgagaatggctactacaagctctgccgaggccatgccatgtgtggtatcaacactatggtctcaactgttctcactactgcctagctctctcttcatcattaattaattacacatatatatatatcctcttttttgttttaataacaaatatttcacatatatatgtacggtctctccttattttattagcaataatattacgtataattagttgcaaaccattagtacaacttattggttttcagtctctttgtttggcaactgcatacattaacatataatctaatttaactgctatatttagcagaagcacaactatatctatctattgatataatagaagacaatgaagactaaaccaactagtattaagcttcctctggactaattaagggggtctcggctactaatttttgcgcatctatttacatatatatatatata

SEQ ID NO: 187496 - DNA, 2179 bp, Cannabis indica
ttttttctttaaagaatatatgcttcgcaaaaaagagtgtcatttgttgataaatccttctgtcttctgggtaatttgtcaggacattcacacaagtcagtgttcaatggcatgacactgattcaatgagagaggagttagatgacttgcaggtgcttgattctagttcctttacttagtccatgtattgacatgaccatttgggttcttatatagttcttattattatttaaaatacaaccaataatatgatattgcaatgcagtaataacctccattttcatctgtcagatttttctgagcacacgatgggctattttattaaatttgcacgttgagatgttccgggtgaacaagtatcctatatatatagcacatgtgacaatgcatcttttcatatgatgtgaagagaaaatttccatcaactttcttgattttccttgtatgctcaagattttcttttaatgttcggagatatgaaataatattagctaaacaatcatatcttaaggcttgttattctcccttgagctccttaatgtgacatagtgtggaggacattcttcaagttctcatagtctttgctgttgagtcactggagctggattttgcgcttctattcccagaaagacacattctactccgtgttttgcctgttcttgttgttttagcaacatcatcagaaaaggatagtgagtctttatacaaaagggtgaaaattaacagactgataaacatatttaaggtatgtacaataacaaaaaagtggcacatgacacatgggttatcttaatggaatgattgcatatatttagttattttgaaagtttgctttggtgattttttcatctgttgcagaatgatccagtcattcctgcatttccagatcttcatctttctcctgctgcaattatgaaagagttgtcaatgtattttcaaaagttttcttctcaaacccgtcttcttactattcctgcacctcatgagcttccactgcgcgaagcacaagaatatcctttgacatataatcttgtattgtgtcctttttttttttttggctttatatgcttttcaaatcaccagctaatgtgctgtgtgccatcttccttgtgagtggagtcactagctgatgctatgtgtaccatcgtccttatgaccttatttcatccttattgactgaagaaggaattatgtctgatgatggacttgtactcttcaatatttatttaaccttattatttctacaatcaacaatgcggataaaagagaaaaaaaagtaaatgcatatataataaaatgttgtttttttagtttagcattcagtttttaatatacatgtcaggatgatacaaccacacataaactttttataacatttctagaatgtttttgttttattggtctatctagaactgtttgtcaatcacacaagaacataattttgaagagtttatgttcttttgtgtgaagccttgacatacttcaaagcattacttttcgtctaatttttagtgaagccttgacattattacttatcagagacattatctgatcattaatcacattggatccatccgtgccgagcatgatgactttactattcgctttgcttctgccatgaatcaggtatactccttggttctcatatgaagatcctcacttttgattattagtcattgtaaaaagtagatacaccgttttaccttgtcttccctttgcagctcttgttgctgaaatcatcagatagtgctgatgttgagtggtgtaaagaagtcaagggcaacgtatatgatatggtcgttgaagggtttcagattttaagcagatggactgcacgtatttgggaacaatgtgcatggaagttttctcggccctgcaaagatgttcccgtggaattacaggaggcatcagcatctttttctgactacgaaaaggtattatctccaatagatgttagcatcatacttatcatactcagcatggtagatgctggtgtcaccatcccactatagtgcatgttccaactgcagatcacatggtgacctgatttttcctttgtatcataggttgtacgatataattacagtgcagaggaaaggaaagctctggttgaacttgttagctatgttaaaagtattggatccatgatgcaacaatgtgatacattggtggctgatgc

SEQ ID NO: 187497 - DNA, 7566 bp, Cannabis indica
gtcacgcggaattttttacaaaagattctgtcttcttataaaacaaccgtaaaagaaaagacagattaattaaaaacaacggtaggacaactaaaagaactaaaacaatagtgaaaacttaataaacgtatttttaaaaaaaaattccgctctacagtaaaaaagaaaaaaatttgaaatttcaatctagtatatggtgtaaaaatcttattatgaatgttttgttgatgggtgaattgaaattcacctgcaaatctattaattcttgtaatggcatgtgttgaatactgcattgaaatttcctatattatgattaattataaattattattcctatattgtgactaaaaggtctgtggctaaaggtatattagttacaaaaattatatttgttacaaaaaattataatttgttgtgactaaatgtatttttagtcataatacttgttgtgactaaaactaaattagtgacaacttgtaacaaaatactatttattcacaagtaacattttattgtgattaaaaatcacatttagtcacaaaaaaatttatgttgtgactaaaaaattatcactaaaagtagtagttttttgtagtgaaagtttttggaaaaaattgggcaagccataaacccaccatttcttttactgtatttaaccataaacaaacgtaacataaaaaacttattgttgtctagtcatcttaacaaggcaatggacatattgagaatgttcttaatgacttaatttaacttgcacaaacactcttctccaaatcagaagaattctaccttcaataataggacttgaaaaatgctcccccacctaataaatcttctaaccatcatatttgccatcttatggaacttcattctagttttaagaatagcactaacaccaacttgtttaattctagaaacactaagacatcatcttgcttattattattattattaaatcctctaatattattgatgaggaaaaattataccatgcaattctttgatcaaatatagttttatggtatattttagactaaatttaatccaaaatatacatcatttattgaaaatgatctgaaggagcattgtcgaacaataaatgtaaaagatgcatatgtattttaatttaataagtaataaaataaaaaattgttaaccaaaatgtaaaatatcactagtgtgataattaatattagtttcttttatttttatagagatcaccatgtacatgccatttaactattattaactaaaatgtaaaatatcactagtaatgattttgatgattaatattaatttcgtttattttatttttatagagatcaccatgcatgtacatgccatttaactttagtttaagtcttttttaattttcattttacattacaatgattattttcatttgcaactcaaatagaaatactataaggaacacctttactagtgacaccaggctcagaaaagggcttcaaaagttgataaggcacaaccccaactccacaccgattcttcaaatccttattggtgttccttccatcaataattccttccaactctttcaaccttccttggaatctctcaaaagccgcttttataacatcatcttcttcccacgaaggctctatcttctccccaagatactcctcatctggtgaatgattcgatagtatatccaacacggccatcaccgttgttgcttgaatctgcgaaggaaagcactgcatatagtgcttcctccggcttagcccaaaatttctccaaaaattcatcgctagcatcctcagttggcacgttgattctagcaattgttggcctattgggaaaatatcccgcgtatgtatattgtccaaagtttacagctgcatgatggcccgatgttacccaaacaattgtcgttatgatttgtactaagtcgtttggagtttttaagattggccaccaaggctcatcttttttgtctccatgacctacagttctaatttctgtccaccatgattgtagctctaagtcagactcaattagggttggctctgggtaataatagttgacatagtcggtgacccattgtttgattatatcccatagaactagaccatcattggcaaaaggatagtcttcaatcgttaactttagaccatgcggagcgctcggatcctccacagccattcccctacaaagttagtattagaatcgcaaaatgcatgtagttccatctcaaaattaattgacaatgagaagagtagtcttaaaattttatatttattattacatttctacagattagcaatatgagactctctaacaaatattatcattatatattacctattgataaggtcagctggtaatgcttctaggtcaaatcgccatatttggtcatatgcatcagcacataactccatcgagtattttccaggactgaatgaagattcaatgatgcctcctgcattgactagtgcttctcgagctagggcattaatctccattgtgtatcgaaaatgtgggtgcaacaatctatagattggatgcatcacactgagttgtctgtttgttgctattatatatggttcggttgcacaatgtgtccttagcctgtgttcatatacaactaatcaaataatgaaataagatataatattggaaaattttatggtgtactcttaaaaatgggtgtacactgatacactccatatttttaacaccggagtagttttaatttttaatttttttatatggtactgtacattgtagtaatctaagatatatatattctataaactttcgagaaattcaaaataatttaacacattgaaaacaagatcaaaacagtttgttcaacacctacctcttttatttaatacacacgtgaaatagattatttaaactcaactttctatattgtaaattattttaaattttctaaaactttgcagaatatcttaaataactacaatatataccatcattcaaataaaaaacacgaaaggagtgtaccttagaagcatagcctatataacataaaatcatacaaaataattaagtatatataatcatatatatttaccagtgactaacaagttggtgataaccagaatcatgggcaagtacatgagctttggcaaacctccatagccaaacagcagtggcatgccaagaaggagtgaagacttctttccattgtggctttccatccattggtggtcgagtcaactcaatggccaatggtcttaatgttccatccaaagttagaaaaaacaatgttcttgatccatacaatgttgttccttcgatttctcttactttttttacatatggtaaaagcaaatcatggtaatctaaaatgaacaacttcttttcatttatggcctacaataatatgtggggaaaagaaaaaaaaatgttatgaattattttatagctatataactagctagctagcttaaattaattaataattatcaacataattagttattaatttatgactaatacctcatcaatagtcatgaatcctttgatctccctctcaatcaattctgcagtgattgctgattcagctggtccatagatctctggatcaagtttactctttagtggccattcctgcatatttatataaatattatacatatataggttttaattagtaataaattatgagtgcatgaatgtatcagtttatagaaaatctaaaatattataaattacttggatgtatatatatatatgattaatttaggttagttaggattttttcctctaaatctttagactgttaaaaattctttttgctgattattagatttaaagacatttattaatttttattcatttttactaacgtgacaaatatttttgtactaaatcgtgctccccgaactttgataagttttaaattgtgtcccttgagaactttaatatatatgttcttctttaataaattttcatccatgtctcaatagttggaaaaaatttaacgactaaaaaagtttaggaggcataatttaatacatgtcaaattttatttaacaaaaataataattaaccactaatttatgattgttctattgcatcatacatagaatttggtgtatggatgaaaaacataccttgactaattgtatacaacatggattgagacctgcaagtgtttgcctaccaaattcttcatccctaaaccaaaagaatttatcccctaatagaagaagaaagaaaaaaaaatgttaattttaaaaatcaatattattagtatatgaaaatatattaattgaagtgttgaaaataagtgttcattgtaatcatatagcattctattagttttcaaaaaatttcaaataattgaaagtttcataaataagtttcaaacattaagttgcatgtgtgtaataattttttacacgcatgcaattttataatttaactatgtttttaacattgtaaattattcagtatttttcaaaaaaaaaaggtgagatatctattttagttatattatagatcatcatatgaaagaaaaattgaaattataatttctttaaacactgtaaaacataaatatctctattgttagagactataattttattgttataataatttatatgagaaagttgtgtttattattaaattatacttactatccaaagtgtctggaatctcaaattgcaaggcatcatttgcatccttgacagtcttgattaatctaggaagaacattcctaagaattccttgctctattttagttggaggtagcttaagaccatcatcaaagagtgaatctatagccctaaagtaagggaacccaagtgaagggttaagtaaggctgtttgaagagatggtaccaatgcatgtagccctgaatacactgtatttgctgaaaatgttatttgttttatttctgagaatgcttcatctctagggacatacacgctcgcactattttgctctgacaccggatctgtaatatcgttatatttagaagtgaggtgatctccgcttaaaaatattttggtgagtgtaatttaagtatgtctcttgcattactcatgtaatgtttacctgttttagtgcgaggacgcccggtcctacaacgcctaggataagggcgttctttaccaccaagaacaggtcttttgagatcatgacttttatcaggattaccaagatcattgtacacatcgtaatcataaattctctcgaaacgcttacgttctccttcaccgttccctcttacattcttcaaatcttcttctcttaacttccttactccactcggggtttcacatggtaaatatgactgcagtccgaacatatacatattcattaattatataatattaatatgtaggacattattatactgacatggacatttatattttcaacatttgaagaaatcaatattataacccatatttttttatataacggtctacattatagttatagtaagcattctatctattttcgaaaaattatgaataatttacaatgtcaaaactaaagttcaaatattaaattttacgtgtgcttgtttttcttacacacatataactgaatatttgaaccttcttttcgatattataattattttaaattttttaaaaacatcaatatatataactacaattatatataaaaaaaaaatatctttaccgcgatacagacaaaagtaatgtccctactttaaaataaaatatctattatgtgtacaaataaataaaaaaaaaaaataccttatttgtgaagaaaactctcttttgaggattgttaaacttagaatgcacccaagaattacaggtaacattaatagaaccatttggaaaaccatgaagaacaatattattgatgaacatttccttgtgatgctcattctccacaacaatggcaccaaccattccaaaatcatcaattgacacatcaaaatctgcttcatatttaactcctccaatattatctcttcctccaataattctatgtgcatatcctttaattgtttccttctctaatccagtttcttattcaccaaaaataaaaataatatttagtaaataatattatgaatttaattgtattatatgtgtatgcaagcactaaaaaaagttatttttagcggtaatcttttagttacaatataaaatttttgtgactaaaacatatatagtatttaaatatacaattgtcactaatttaattttagttacaataaatattatcactaaatatatatttagtcacaacaagttgtaatttttgtgactaacaattttaatcacagaccttgacaatataaaaataatagtttataattaattacaaatttttttatgtaagattttttttgtaagaaagtattgttatgatctaattaatatttcatatattcttaaaattattaagcatatctaacaaattaatagggctccatgcaccttattataatttggggtttgcttattaagctttctttttaattagttatatatttattaattagatgatgtatttttttttgtaaaaaaaaaaaaacctttattggaagagtttagccaaaataggacaaatatctgtgaatggaccacttataaaaaaaataagtgtaaaacacataataggtactatgaattaatttttaagataacattattgtgacagtcttttttctttctcacccacacacctgtactagatttttttagtgatatatacaaattatgatacctttatgagagttactttacagagaaaaaaaaaatagcaaaaaagaaattaataaaaaaaaaggtaaatttctatatataactagctaataatacttagccaataaaaatatttatttcctatagattattgcaaaagttatagattggatcaatttattttattagatgactattcagattttaaattttttaaaatagtacaaataaactataaactcaattttttgttatttttgttttaatataaataattttaaaacaaatttttaatatgaaaaaaacaaaaataatataatcattcttgtcatattacctcaaaataaggttattattaaattttaatttgacaaaaaattaaatctataatttattttatactattttgaaaaaataaataatttaaattatcatttaactaaataaaaaatccaaccaataattttataaaaatatcaagttatttagccttaataatgtcttgagtggtcagcaaattaaaaagacagatatacacatgagtaattcactcaaaaatgtaatgatttatagatatgtctatatattaattaattaattaattaatttttttaaagtgggtatacattaatattcttgtgttgtaaaaattttatacataaaatgtggttagctaatagtttttgttagtttaacaaaatattttaaaaatataagaatattccgtcaaatttaacggtgttagtagagttagttttataaatatatataaatattaatattatttattttagaataatttatatacgtataatattaatattgtttgttttaagttaattgaatttatactaattttaaattaac

SEQ ID NO: 187498 - DNA, 1468 bp, Cannabis indica
agatggataaatatgctaatttatgctcttcagtctatcctaagttccttccttttttttaaaaaaaaaaaaaaagctcctaatttcctttccacatttgttatcatgagattttttgacctgtttcgtttgtttcttcctcaacaatgaaaagaaattaaatcatttcaaaagggtatttctctttccctatactggactcaaaatttgatgttattaatataaaggctataaattgtataatctaatctacggaattatttcttttttttttttgtcctctctctctcttaaatttggcgctttttagaatatagataattatatcaaagggaaggtgacaaaaacaaaaataatatattttttttttgatgaatataaacatacaaaaataatctgaagtccttaatattgattcctttgtgtgattaaataaaataaaagatctagggagcatatcaaacaatttcctattgctggcaaatataagggaaaaaaaaaaaagcgggctagctagtataggtcattatttttttataatataaatatatatggtcaaaattgctgttgtaatattgtgccaaaaggttttaaagaatttctttatttttattatcttcactattccaggccacgcttaaaatgaaacaacaaatctttaagatttcaaaatccttgtgaagacaagtaaaataggggttcccctcataatatgcaccaaacattatcacaattcacttgactattcaaattatgcaaaatatttagtataaattgtaagtattaattaataaaaattattaaaaaagaaaaccgttctaaaatcaagctaacaccttaattgaaacatgagtaatgtccaatatatagggctttaaaccatgaggaagaaaggttggaattgatatatatgataattatatcttattaataagttggcgatgtttgtaagatttgagataatatttaattaacataaattaaggagcaaaataagcaagtttttgaaagtcaataataatgtacaaaatgatgttcacaatctcttgttcacctatatattaggcttagaaaggtcagaccaagacactgagattgaagacgtgggaccaatagcagctgtatttttgtaccaaacttttggctttataatcagacaacataatttttttaacatattcaagtttttgtagacatttttcatcaacaaatactcacatcactgtttcattttattacaaatagtaagaaacaattatgcatacattgaaatagctctctaatccaattctctgccataacctttccacatggggaatcttattacaaaagtaagcagtatgattatatgatatttaatattttatccaaatgttgagctatgaaaggtgtacctatttttacttaatcaaagccacataaggagaccttcaatagacaacacatagacctcacagtaagctccgtg

SEQ ID NO: 187499 - DNA, 3248 bp, Cannabis indica
ataaatttcgaagcaatacaagtgcgatgagctgcttgaatattgattttgatatcttaaattatttaaaacttcttgaaaatttacttaacatctaaaaatactaaaatacctataaatagtgatttaaatatcaatcaatatcccattttttttttctatatatgtatatatttggtgagaattaacttacattcgatgttcctagatcatctgtaagtcgtagaatcatggatgcatggtaaattatgggtggataacctaattccagtaaatttatggcatcttttgtaacaggatttgtaagagagaaataagcatccataagaataatcggtcctgataccgaaatccatgcattgttaatgtattcttcgaatgttggtttgtatccactgtgaaaccattttgcctcttgtaattgatgtttacagaaatctacccactgcatgcatgcattacgtgaacataatgttaatttttcacaaaaaaaatattgaagaaaaaaaatacataattaattaataaataaaatatatgtatatagcatcaattaatcaatgtgtattgtattttatattacatattttattttaaaaatataatttattatctcaaaaatagttttcaaagaaagtacatgtatttcacatgcctattaaaaaatatacacaagtgtaataatgcatgctaacatgatttcgatataaaatattatttataaatttttaaaaatttacacattctataaaaaattaagttataatttatcgaatactaaaaaaacaaagaacatcactataataatttgtcaggacaattattgtaaaaatttctatatgacaaaaatctttgtagagaaggaaaagaaaaaattcatacaaacataccgtcctcttaaggaatttaacgttgaggaaattttggtgtcctaacacatcgaaagccatttcgtttatggtattgtgtaaaagaaagaaaggcatcctcatatattctggtaaatcatccattgctttcacatcccatctacaaaaccgatttaatatttgtaacaaaaaacatcattattatatgaattacatatgaattcacgatatcgttatctacatctatactttagtatttttggttatataaaaagttataactctttcggattataatgtagttatatgagtattccctataaattttttaaaatatgtagtcaatattaattttttatttttattttactctttgaacatttttatctacaattcagtataaataataaatcgtttttcttttgttgttttatagtttataaatttatagtaattgtgagtttttttttttttgtcgagtaaaatgtattaaatactaaaaataatcaatatcaaatagtatttgtatatacatatatatattacctctcaactgcattagtgaaaagctctaattcctccaatgttccataaacatcatatatatcatcaattgttgttattagaacatataatcttccagacattcttctataatagcttttttctggctcacatgctattcccacagtccataagaaacactccattaatctatctctaaagaaatccattttctctccaagttttgtatggctccaccacctttgacatacacacatatatatacataaataaacatatatatatatatatatattgacatcacatcaatactaaaaaagggatttcctgatcgtacaatagagaagttttactatgagtcttaaaatcgacgcctataccaccgacgcaaaacgtgatggaaaaggcactaggtcttatcatcatgttatatactctatagatactagttaacaaatttaataatctataatccaatattgataaatattgataattttattagcgataatttttattattagtcgctctaaactgttattaggtgcgactttttgtttcttaatataataaagtaataactattaggagcaacaaagttaattgttgttaaataataataaagattaactcctaataattagtctcctaataaattttagaagcgacttttttcgctcctaattttttagtaattttttgtagtggctatccatttaatattcattaaaattgatgtgaactaattaatttgatttataaaaaatatttaagatcataattaatttaccttgagagatgttttagatcttcttgatatatggattgtaccatgttgtaatccaatttggcaaattcaagcaaagtagaattcatgttatgatttttttcatataaatcaatgaaccaccttgcttctgatcttgttattctccaataaagtggaagctccaaggcatgattcactaataataacatattattatcatcatcataatcattgactaataatgatggtttgtttcgctccatcgtcatagttgctacgtaattttcgagacattcgattgaggaaaccctagcttcttccaaaatactttcactttttttgccatagaatgaagcttcgtataaagccaatactccaattatatcttcgccactcgttcttgccttgaacttgcttgtaatctcatccttaaacacattgaaaatttctgcaatgataaattattattaattaataatattatagatcgaactctgtttaattaaaccgtcgattgaatcattggttgaaatatggatatttattattttattagagtactcacatcgtatgttttaaaatagcgattcttaaaaatatttgaaaagctaaacttaaaaaaaaattacattggatgctctaaagtttttcttctcagttaaaaatttctttagaatttaatatattcatgttctatatatttatagatcttatttattgttttaaatatattttattaattattttagattttaaaattttctttaatatgggaatatctaatgatgtattattttcaagaagttgaagtatatttttatgatgtattttaaaatataaaatataaaaaaactgatgagagtgctcttataattacaataaaacgaaacatgcaattcataacgaaatacattaccttgagatacatcataaccatgatggcgtagaagcctgaattcgagagctgtggcgtacaaattataattagggttatcgataatattaccggagtacttttcatttaaaatagtgtttatttcagtctcgaaacggtaagataatccaagtctttgcaatgcatcaat

SEQ ID NO: 187500 - DNA, 8123 bp, Cannabis indica
ttgggtctggattccgccattgatgagctggtcaatcttggaatgcagagagagctggctgctgagtcaatctacaaagagagatgcctttgtgtgaacgatgggccgagttgggcaaagtacatgtcgatttcaggttgctctgatgatgaatacgatatcatcaatttacaatacacagaagagggtctcttatctgttgatgagaatagacaaggccatgctgcagcttttggagatgacatagccattgagtgtctcgccactgaatttcagcgagagatttatgtggtaataatcttaaccaatttttcagtgactattatattcattgctttcaaatgaaaaaaaaaaatggagtctttgttaattgggttttgccccatttcttcttatgtggttttctggttttgggtctttttctgtgcattgtttacacattgattactagtgcttttttttaacaagattactagtgcttttgtttacttgttatgtatgcaattttgaaaaagaaaaggaaaaagtgtcttttttttttacaatatattctttattgttttacagttttctataataattaaggtaggttggacatgtaaatgagaaaggaaaaaggaaagtcagcttttcttactcttacctgtgactctctttgtcaatcataggtgcaagcacatggatcagacgcaatggttgatgaagaaaattgtgtgttcttcctaccacaccgtccaagaagccgaatttgtgaacttcctttctttcttttcatgaaaggaacaggttggtgtggagccggagctgatcactatgagcctcttattgcccatccttgctctttcgtttcctcagagaaagttgccatggtactatgagaaagtgcagttttgttgtggcatagagaaagacagattaagtagagagttagcttacatttatttgttcctttcaatgtttggcatgcagtccagttctccctgattgattcaattttcggatcactcttgagagaatttcaaatgcataaagctcattcttttttttgttagtcattagcagccttattagaattggtagaagagcctttctttttccttccttgattctaggcgcaggtctctttgcctgcatttgagcaaacccaacccagccctagaacccgtatactagtcttaattgtttcaccggctattgttgttgtatttttgttgagtttttggagggagcttttcttcttattgcttaaaaggctctatttcggccaatctggaatagtgccaatcaagtgttgtatttcagagttgtaactctatgaggaggaaaccaggtcctcgaattcctgggtatcaatatcacagtatcttccattttttgcttctatttccttcctattttcttgttgcactgtataaatttaatggcctttctgctcttaatgtgaccaaatgatcctttcttttgttattatagtttctgtttttaaagaccttatgtgttaggaggatggataacaagttttgctgtaaatagtggttgtactgctgtaattgaacatggaaaagaattccatttacaggaactaataacattgatacatcaatggtgaacaatgaattatcatagggatagtggattcaaccatcaatgaagtgcccatgtaaagttgatgtgtttgtatttctatctatgatgtaagatgtgttaggaggataacaagtttgaacttgaagaccacatattgctaacatgtgtttttgcttttcttttagaggaatagatttttatactagcaatttgtgttagaggtaaggataaaaagtgatagaataatttaagtgtgtgtaccaaaaagaaaatgacacaaagtgagagacaagctaggtggaatgaaagagaagagaaagcattatttggtctcttttcatatattgtgtctgccttttatttttaaaaaatttctagtgttatcaataaagtccacgcaaataattagctgtgaagcatttttcctaagggaaaataacagtcactaactagtttgatttttgcaataattggtccaaagaaagaaagaaaaagaggtctcattagtcataagaagagttcatttttaccagaagaatacaccaactgcagtagtaaagagtgctatagctttttttttcctccataacttcaggttttgatcatggcagcagaactggtagctggtgctttgctttctgcttcacttcaggttttgtttgaacgattggcctctgaggagatacccaagctgttccatgggaacaagctgattctagaccagctatatgagttgaagactatgttgtggtcagctcatgcactgctcaataatgctgaggagaagcaacttcgaaacgaggaggttaggatgtggcttatcgagcttcaagatgtgatctgtcaagctgatgacttggtggataggattgattatgaagctctgcgatccaagcttgaacatgatcattctagcagcagtggaagcaaggtatttagccaactgaaatctttgtcaattttcatgtctgaatttgataaatcagttaaagttgatgcaacggagatccttcgtaagctgaagattcttgttgatcaaaaagatgctcttggcctgagagaaggtgctctgaacaaaccttcactaaggccaccagctcctttggtagaacatgctgatgtttatgggagtgatactgagaaaaaaatcattaggatatgttgttaaaaagtgatgtcgatggtggtaataagatttctgtcatcccgattgtagggatgggtggtgttggcaaaactactcttgctcaagttgtttatgaaggtgatagggttcagaaacattttgagttaaaagtatggattactgtgtcggataagtttgatatttttaaaataacgaacataaacgaaatttgaaggagactaaaggaagcactgaaggggaagaattttctctttgttcatgatgatgtatggaacgagtcttattctttgtgggacactttaaagagttcttttgagagcggagcaaatggaagtaaaattcttatgaccacccgaagcacaattgttgcctcgactatggccacagggcatgttcataatctaaacactttgatgaatgaagattgttggcagttgtttctcaaacatgccttcggtattaacattgatcttaatgactaccaagaactacatgtaattggcaagaaaatagttgacaagtgtaaaggtcttcccttagcaataaaatctcttggtggattgttgcgttctgaacgaaatgccaaaaaatgggagggcatacttaatagtgacacatgagaggagttgtacaagaaggagggttccattcttctagctttatggttgagctattgtcacttacctacacatctcaaacaatgttttgcatattgttctttatttcctaaggattatgaatttaaaagagaaaatctgattttggtatggatggctgaaggttttgtgccaatggatacaaggagtaaaaagatggaggaatttgggaataccttgaagatctcttatcaaggtcattctttcagcattcaagtaagaatgaagcccttctccaaatgcatgaccttgtacatgatttagccatattcgtatcaggtgatttttgttctagtttaaacttgagtaatgatttacttagctctgcaacaaagattcgtcatgtgtcatgtaagggaagcacttgcgatcttaacaagcttaacagcttgagcgaagctagttgtttgcgtagatttatagcattgtcattgtggactccaaatgaacaggtctctccaaattactcagttctatttgacatattgcttaggaagggagcttgcttaagagtactttctttaagccgaacttctttcaagaagttgcctgattcaattggcaatctaatacatttaaggtatttggatttgtcttttagtgcaatcgaagagttacctgatttgatttgtagtctgtacaatttgcaaactttattattgtcatggtgtagatgtctttctcaataaccaaagatcatgggaagcttgatcaaactgcgttacttagatattgacaatgtacctttgaaagagatgccgcaaccaatcagtcaaatgaaatgcttgcagttcttaccaaaggtagtattgagtgacaaatataaggttgatgggtttaaaattacagagttagcagaagctgagtatgtacgcgaagggctttgcattttgggtttggaaaatgttaatgatgcaacagaggcttcaaaggctaatttaaaggataagaacaatgatgatgaggctgaaagttcgcaaaaagaattagatgtactggacgcacttcgaccccatacaaacttgaagcatcttgtgattgaaagttatagaggtacaacattctcgaactggattactgattatgctttttccaatttagtatccgtctatttgaaaaatcgtaaaagctgttgttatacaccaccactcggacgagtagcttctctaaaatatctcacaatcgatggattggatagtgtgtttgcaataggtgatgagattgatagcattgttcctctcaattcatttgtttagaaagcttaacaattttatgtggaaagaatggtcattttgtgccaaagttagtagtcaagaatttcaaatgttccctcttctaaaggaactttgcctaaaaaaatgttcaaagcttaatgtcgggttaccttgttatcttccatccttggaacgtctcaatattgagtattgtgaagaaatggaggttttgcttccgagaaatattcaacagactgtcacagccccaccctttctcgcttctgtatttttatcagattgtcctgtgttggaatcacttctgtattggggatcacactccaaagtagagaatatttggttatggagtacaaaagcgctttttaagaaccgtacgaaatgggatctacatagactctcgtgtttgaaattggtaaatatctgtgggtgggaagatgaatcgtttcctgacgaagggctccttcctatcactcttaatgaagttgcaatccaaagctctagcaaccttgaaaccttaaacggcaaggcctttcaaaaacttacatcccttaatttcttatatattggtggctgtaaaagccttcggtgtttgccagcagaagggctgcctgcttcactttcatctttatatatagggggatgcctttgctaaagcaacgctgcgagaaaggaggagatgattggcctaagcttcaacacatagcttccatgacaacacactaaggcatgttgatgaggaggagcaatattctaacttccctgcaagtatgttttcttttcatttttcttcccacaacttttacaaattctaaaagtagagctgttgttagtttaagaaaatgttttgaatttgattaaccagatattcaatgctaactgagagtccaccaatttgaatcctaattccctagtttcataaggaagtgcctgtaaaaatgttcaagtaggcagttagttagtctccaagtttgataaatgtgtacttctaggtaagctaatacaacagtactatataagatgtgtttgggagataacgagaacagaaagattaggtaattgagaaaggtttcaaataagtttataaaggcttgacccagaaaaatcttttgggattgcttagtgaaaatctaccatttattggccaaatcacatacatgatgtattcttaattagtgttgagagttttaatcttcttggcattattttgcagagctaattaccactaaggtatgacaatgacaatgtagtttattggcaacaagccgattggtaagcgtggctttggtcgaagcagaagcaggagcaggatataatagctacagaaggcaaagaagttcatattgccacgacaagccgattgttattctatgttgttttactctacttaaaggcaaaatggaatgcctttgagggtagatttggagtgaaactaagagtccttttaggattagtgtttctttcctcggttcttgaatgccatgtttagcagttccttatcctgagatatggttttgtgtttgtgtctttgtttctaaggctctatctatgattgtgactgactttggccattatgcttggtagagttgctttgaaagtcatgctgatttaaattagaaaaaaaaaggaacaaatagataatatcattcctctcttaataactatggcttgccaaaatggttgattcattttattgtttcatatcaagaacaagaacacaagtaatatgtctaatttcttgatctgtttgactctgatctgatctgatgtgtgtactgattgttggtattcaattgacatgtggagtcaatccctgattgttggtgttctcatcttggggttttttgctaattggaatctgtttcagttgttttggatcctagaagtttcaaatcaatactagtacaatttaatattgattagacatattctaatctatctcataatggcaatgctttccctcacaaaacaattgatatatgaagagggacattaatttataaattaacattatttgtaatgctaacaaagagaaggaaaaaataaggaccattccatatacacttggtcttgatcacttttgggtgaaaaaaatttcataatattgttaaaagatttacaattctgatttaacttaaaaaaaaatattctccattcttccatatttgcagtaagcagcaaactttctctcttcttttttttcatctaatatttaaaaatgaattttatatttttcaaaatagtataaataagattttgagctcaatttttaacaattttttcaataaaaccaacttaaaaataattcctaacatgaatagatgttattaatgtaataagttttgtcataacatttagatcgagttattattaagttttattttaataaaaaatcagttcagatactatgtagtactattttaaaaaatacaaaatttaatttattatttgacagagttaagagtttaataaataacttttaccatttacagaatttaaaataatattaatctttaacataattaatattttataacattattaattgtaatgcactaatgctatataataatatatgataagaaatagtattgcatctatttaatttgtattttattttactaatttttttggagcacagtgatcatcactaaatttcataatacaaggcactataaactaaaagaaagaaaagaaagaaaaatgatgattaaggaaagactagtccactaacacagcttcctaattattatcaaacaaagcttagaccaactgatcaatacatcaccactaccagactagctaacaccatcttttattctctttcttctattgttgcttttccacatctgtttggctacacatttgagcaacatttttttgatatctaagtctatccctagctcggtcaagtcctagtgccaagatcagaagaaaagagagagaaaaccaaagttgagaggaaaagaaagagagaaagagagagagaatcatgagggttgtaatggagtgattatgtttctggtcgtggagtaggcaagataacacgttgttcgaaccactcgatttcatttgtccattttattcaatttgtagttgttatgttctgttcttatatcttgtctttagttgtttattttgtgttgagacaaattccaatgatattgtccactttggcttaacctttattttttggacaccttcccaaaaaatttcatactaatggaggacgtaaaacacttatattcaagacaactcttgcttattcttttagttcctacttcactacttctgtctacatagtcaagaagaatcatggcagtcgatcatgttgctggtgcttcgcttctgcctcacttcagattttgtttgaaagaaagattggcctctaagcacataccccagctgatcaaggggaagaaagtcatcatggaccagctaaatgatgctgaggataagcaacttagaaacagtttgtctgagaaaacaattgtcaattcagta

SEQ ID NO: 187501 - DNA, 5847 bp, Cannabis indica
attgggatgtgaagataatttgaaaatcgaaatgatcggatcttgttgaagatctcattttctttctcaatctaaggaggaactaaagtataagatgaataaaagatcagtcgattttgagggagatcgtaaggagagattttttttcaaacattttattgaatataaatatatatatatgacatatgatttcatacccaaacttgattgagatgtcaaaaagtaaaaaagaaaatggcttaaatagagaaatggcttaaatgaatgccacatatgatgaaaaatggaggttgtatccgcaattcattttggagactctgaatattctagtataaaattattaaaagtgaacttaacctgacatatatgattgtgtctcactttcaacacaaatgacataaataaaacttatatttgtattttgtaatgcaatagattcttgtgacttatttttgtgtttatttgttctatggttgacgatattttctcaaagatattaaatatggcgggtccaaatatggatcagttcgaagcttactttaggaaagcagatttggatggtgatggcaggattagtggagctgaggccgttgccttcttccaaggtgccaatctgccaaagcatgttcttgctcaggtttctacttcttttttgttctcttataatcctaaggttttatgtatcacttctccttcttatatgtatatactcagtttgtcattgccatttttgaattctataccttaacatttgagattaatgtgttattatatggtccttcatttggtatcagcgctcttggtcctggctaaactaaagatctctgtatatgtaatttatgaaaatcatagaattcgcttcgagtttactatatcattatcttcgtcagttttgtacttctatgaagagaagctctgaagtaccaccttattatttttatatcgcctttgaagaacataatttcaaaattataatgtatgacatttacgatttccagatatggatgcatgccgatcagaccaaaactgggtttcttggccgtccagaattctataatgctcttagacttgtgactgttgcacaaagtaagcgagatttaacacttgaaattgtaaaggcagcattgtttggttctgccgctgccaaaattcctcctccaaaaattaatctaccagctgcatctgcttctcaaccaaatgctctcacaggtgcctcatcctcagccccttcccccatcccccatcagatgggatcagttgcaccacaatctcaaaattttggatttagggacccaggtgtttctaatgcaaattttaaccaaagctctctccctcagcaaaatcagtctatggggccaccccaaatcatgccaaaaaataccagtagtattgtggctcccaatgttctgaactccagtatctcaaacgactggcttggtgggaggcatggggctcctcctactggtgccaaagggatcacttcttctgcatccccttctatagccagaacacaacctgtagcttccgcgctttccttgcctacagttaatgacccaaaaacactattaggttctagaaatgggtttaattccacctcagattttgctagtgatttgctttctatagccccttctttacctaaaaaagactcttctaggtctatctattctgccagtagtgcttctgcctcattggctattgttccattttctagtgcaccccaatcttcccacaacaacaacaatgtacttaattcattacaagatgcattctccatgcagcctgcagctaatcaatttcagcgaccccaagcacctttgaactcaagtcagcaggctgcccctggttcttcccctttcacatcaactggtatttctgttggagtggggatcgccacaccaggcaattcacaactttcttggccaaatatgaagccatctgatgtccaaaagtacactaaagtgtttatggaagtagacactgacagagatggaagaatcactggcgaacaggctcgacatctatttttgagttggagatttccaagaggtgaatttccctcccaatgcattgtatgtttggatttttgttttaatatttctcatttttaacattggttttgttggctttaccagatatcttaaagcaggtgtggaatttatctgaccaggacaatgatagcatgctttcgttgaaggagttttgcttcgctctttatttgatggaacggtttaaggaaggtcgtcctcttccagatgcccttccaaacattgtattatttgataagaccttgttgtcattaacagaccaaattaaggcctctcatgacaatgtagcatggagtccaggccctggaactggtaagtgtaaatcttttggtattttattttactattttctctttatatgtttcttgataagcattttttttctttttatgtttagattttggaaagcaacgacaatggatgccaggtcctcaatcaatggggcctaatgttaatttgaggccaacagtgcatggaaatgctcctaggcgagatggagtacaatcaaatcaggaaagttcgagagcacctaattttggtgaattgtttctagaccaacttgacaatgggcatcagagttctactttatcaaaatcagtagaaacaacaacggctggaaaaaaggcattttgtttgctttagttcgtttgttgcaactacttatttgcttgtatcaaaattttctttcttttttcctaaatagtaaggaatttgggtctttgattgttgtaggttgaagagccaaagaaggttatattggattctaaagaaaagactgagtactaccgcacaaaaatgcaagaacttgtgagtagcttttgttgttaattttttttttggcaatctgagtaaaccatcattgccaaattgactcattggagggttgaatttacttaatccacttttatatttatttttttccgaagaattaaatcacataaatgtaactatcactgaattggtaggcggcgacctttccctgaatttgtaaaatttgtctagttcattattgcttttgatgcttgaatcatgaagaagacactaaacttggtattttttagttgatcaaacaaacctgtaatctaacttcaatgaactatgatgtttcctacctttttccctcataatcaattctattatagtttcatttcattggctattgttcatgttatctcaggttctatacaaaagcagatgtgataataaattaaatgagataacagaaagggcatcttcaaataagcgtgaggtactttagagatttatttaattttttctaaaaatagtttaaatgtcttattcaatatatcgttacaatatatattacaggctgagttaatggggaagaaatatgaagaaaagtacaagcacgtggcagagatagcatctaaattaactattgaggaggctactttttgtgacattcaggtgatacattcagcaccatgactttttactctcaatagttgttagcatttttttcttttgactagtttttcccactctctaaaatttattgtcgttttactaattttgaaattgtggtatatgtcttttgggtgtggaaggggactctatctacttcttagaagttatatttaattggtgaattttgtttcttgactagtcttatagcacagttatgttaaagagaccttgtattaaagtggttctcaatttattggatgtaacaatttttctaatattatatattttatgatatgctcttgattccctctaaggcaaggaaaatggagcttcatcaagcaattgtcaaaatagaacaaggaggtagtgctgatggtatccttcaggtaatctatgactaattaattataatgtgttgttaaaagttcttgataaatttatttttacttgacaatgcagtacttataggtccgtgctgatcgtatacaacatgatctcgaggagcttttgaaggctttaaccgaacgttgcaagaaatatggattacatgtcaagtcaagtgcaataattgagcttcctaaaggtacgcttgtctttctcaatgtttacctgctgcaaccttcaacaaagaatctttgttagatagagagcacaaatacatataaacatgctacataattgtgtataagtatacaatatttgtcaaaatacaccttctctaagatgagcctatatacttgtttctggtgaattttgaggtacttacaaatggttcattattagaatttacttctttcttcatgcttcacaacaatggttgtctctaatttccatccccattttcaaattagtcaaagtagttttgaatatgtgaaaatttcttgtcaattggagaaatgagaaactaatagtagtacacataattacaacctgttatttttgtttttatattgcctcaacagttaacatgattgtgtttcatttatgaactacttaaggctgggaacctggtattcaagagggagcagcagtttgggatgaggaatggaataagtttcaagatgaaggtttgctctctagtgtttttgtttagaattttttatctttgctaaacagaatcaattttatcgatgcattgaagtaaagtatttttgaaaatatgttgactgatacctgtttatttatggaaacaaaaattaaaacttttaggatttgtaaatgacatcacagctgatgttagtccaacatctcagttagcttctgttcagagagaagttgatggtgaccttgagaatgaatcagtattctcccataatgaagatgattatgcaagaagctttcgtgatagtccattcgtagaaagtccaactcaagaattttcagacactcattatggtaaaggttctgaatcagatgcagaaactcataggtgggggtagattatttctttgtttattatcctcttgaataattttatccctttgctgatttaaaatctctccccgcagaagctttgatgaatcaacttggggtgctttcgacaataatgatgattccgactctatttggggatttgatgcttcaaaaaccaatgtaagtgtttgctttccaaagttcccttttcctagccttttaattcaatactgaaacttgccagatttttctctgttaaatattcacctaaaggtgttctaaataaaggctatttaaatttcctaaaagcttttttttagttgaacttatatatgaagtctaaatgtcaaaagtgaaaggcattgtggacctggaaataatgtgatttacgtccttcaattgttagcttgatacatgaaacctttatttgaagaagttattttttcttgttaagtcattctacatgtggacctggaatgcattttacctacttccgatttgtacccatatctctgaactatttaaggttataataagagataagagcaagaggaaagagacaacaactgattactagcaagcattgaaaggttttatctagtgcttagaatttttcaagatttcatcattgggcatgtggttaggctatgaactataactaaaatgaatttataaaaattggatgtacttgtgtctatgcctaatgagatgcaatttctcttaaaggcacactgttaagctctacaatgacattagttttatactactgtttcatttgttgttatcattattaaactttcatagtttcttcataatcttaattatcgttttgtgtaactcatgtcattccttttcctttaggatttagaatctgagaagcacaaagatgcctttggttcagacagttttacaatcaacccagtgagaacgagatctcctaattcagaaagcacatttc

SEQ ID NO: 187502 - DNA, 2149 bp, Cannabis indica
ttaaaacatattaattaaaaatagttttagagaggaggaaggggggtaggtgtgagattgaccgaaccacctacgcacacgtaccatctctattccacaagacttgtctaactcactcactatataaacccatctcaactctctctccttctcagcttgactctcttttctccaaaagagaacccccaagctgtaactactaatccaaaaaaaaaaacctttttttttcattttcaaaaatgaaggccttaacaacaacgcctccctcaactaacaatctcaagcccctaatccgctcccctgcggtaccaacccgacccaattttattcgggtttacccgacccgagtttcgattcaatgcgcttaccgttctgaatccatgaatttcccaaacggcgtcggatccagtcgaagcgattggcagagctcttgtgctattttagctagtaaggttgtgagccaagagcagccgactgataaagccggcggcgcagatcacgtagccgccgttaacggacacaaaaccgctattgatctgaatcttgttccgattgagaaggtttccgaggaaaacgacggcggctgcggcggtaatagtaataataataataagccggtttctaagccgcttactataactgatttatctcctgcgccgatgcacggctcgcagcttcgcgtggcttatcaaggtgttcccggtgcgtattctgaagccgctgctggtaaagcttatccgaactgtgaagccataccttgtgaccaattcgaggtagcttttcaagctgttgagctttggatagccgatcgagccgttcttcctattgaaaattctttaggcggttcgattcatcgaaattacgatcttctccttcgtcaccgtctacatatcgtcggagaagttcaacttccggttcaccactgtcttctcgctctacctggagttcgtaaagagtatttaacgcgcgtgatctcacatccccaagcactcgctcaatgcgaactcactctcaccaaactcggtctcaacgtagcgcgtgaagcagtcgacgatacagccggagcagcagaatacgtcgcagcacataatctaagagacacagccgcgattgcaagcgcacgcgctgccgatctatacggaatgaacatcttagcagatggaatccaagacgattcgagtaacgtaactcgattcgttatgctcgctagggaaccaataattccgagaaccgatcgtcctttcaagacgagcatagtcttcgctcacgataagggaacttcagtccttttcaaggttctttcggctttcgctttcagaaacataagtctgacgaagatcgaatcgaggccgcaccgtaaccgtccgattaggttggtggatgatgctaacgtcggtaccgctaagcatttcgagtacatgttctatgtggatttcgaagcttcaatggcggacgttagggctcagaatgcattggctgaggttcaggagttcacctcatttttgagggtattgggaagttatccaatggacatgacgccttggtgcccgtcacggggagattagcaaaacccatctttttttttttttttattttctatttttaataaaaaaggagtaaaaaaaaattgttattattattattattattattttgtacaccaaaggaaaatttaaattaaatttttctttactcattctctttctttttttttttttaattttaattttgagaatttttaatttatattgtggtctatgaagaatctttcttttattttttttctgctaattaagctgagaaaaaaaaatattggaaggaaggtgtttgttgcttttgggggtaaatatgataaaaaaatatttagttgacaatgtttataagaaatttatttgttgttgcgtgtatgaatatgaaaaacaaatattgcaattttaaatttatttatatctttatataattggtataatgattttacttcatagacttaattaattaagcttaggctagttataaaaaaaaggtaaaaaattgttattattattattttgtacaccaaggaaattttaaatttaatttttctttactcattctcattattttcttttttcttttttatttaattttgcaaattttaattcatgttgtt

SEQ ID NO: 187503 - DNA, 1624 bp, Cannabis indica
tggagaagtagatagtgggggtggtgtacccaatgatgaccaagtggataatgtgatcgaagataataaagttggtgcaggattgaaaaatgaagttggtgaatataattgctttctgaatgtaattatacaggtgagcttcttatgaatagttgtggaatgtataatctttgtgcaatttcttccgtctaatttttgagcacaaactgttttgacttttattttgtgtacagtcattgtggcacattagacggtttcgagatgaattcctgcagaagacatcagagcatgttcatataggtgatccttgtgttgtttgtgctctatatgaaattttttctgccttgaatgttgcctccattgattcatggaaagaagcagtcgctcctacttctttgagaatagctttgagcaacctatttccagatagtaatttcttccaagaggtaactagtaacctgtcttttgcataactactaggatagttattttcattatctgctcatcagtccagcaaaatttgcattttataaggtttgattgacataagtgaaatttcaggctcagatgaatgatgcttctgaagtattgggagtgatatttgattgccttcaccggtcatttactcctgcttcaagcatttctgatactaaatcagtggtaaatagctgggaggggtcttgggattgtgtgcgcaatacttgtattgtgcattccatttttggaatgaacatttccgaaagtatggattgctacaattgtggagtggggtcgaagtttctcaagtacaccactttctttcacaatataaatgccagtgcgctccggacaatgaaggtatgtgcattttactcatggttgataaattactgaagctgttttgtgggtgggttggttcctctaatcttgatgtatttttttatttttttggtctgtttaggtcatgtgtgctgaaagctctttccaagagcttttaaagtttgttgagttgaatcatcagtcgccatgtgatgctgaggctggaggctgtgggaagcttaactacatcaaccacattctctcatctccaccacatgttttcactgcgggtgagttaactcaccagtttttgagtgaatccacttttattatgggagctaggaagaacacatatgttaactagagctataattgtcttgcagttcttggatggcaaaacacttctgagagtgttgatgatattagagcaacattatcggctcttaacactgacatagatatcagtgccatttatcgcggtataggactgaacaacaaatatagcttggtttctgtggtatgtaatagtttgaatcttagtattggcattatttttgtcctttccttttcacttggattcaaaagaatagtttttcgttctagttttaatctaatgtgcaatatgttttactttcattaggtttgttattatgggcaacactatcgttgctatgcatacagtcacgaacataaacagtggattatgtatgatgataaaactgtcaaggtaaattcattttcagtctagtacgtagtatcttactagccatcattccctgtcttacaatttctgcttcatgtccaggtaattggtagctgggttaat

SEQ ID NO: 187504 - DNA, 3678 bp, Cannabis indica
acatgaaaatgaactacaagttgatctctgtcagagtgacaatcaaaggaatgaggtgtgtgttctaatgattaagagttaaataatgttatattttctagggtatcatcatattaaaactaaggcttcaaaaaaaatgattagatcatacttgtccttgtcccatatacaatttcatgggaggggtgtgtgtgagttgggagcaggggttcgatccccacaaaaaataaaaatattcttagcactgagaagaaactgaaacttgtgtttccttcttagctgttgttgtgattacaattctgtagttcttcataatcatagcctcaaattatgctatttgattttcatatgtgccttttctataacattttcttttgggttcattgtagtctagctcctgtgatagttaaacttacaatttttctttcctattgcataatcctattgatactggcaatactgatagttatgaacttggcacttgatttcagattaatgacaaggcaaagaggtttatgtgtaaaggcaaacgctcgtcttatccttcaagcctaccacgaaaactggcaaagcctttagatcttacatattcagaaagcagtgttaaagggaaagtgaacgactctgttttatcaacaagagaagttcatcctgcaaaccagttgaacatacctacaaaagcccggagtagacggaagatgaacaaacagagaccatttattacagaagatgtaaataaaactgagaaagttttggatgaccgacctaatttacacatttctttatttcgtaatggaagtcaaagtctcaaggttagatctctttaaatttgtcacttgtttgtctaatgtagttgattcttgattgaatctttgaattttgctatatatttacatatagatctatgtttgcaggaaaaactatctacttgcctacatcagtatcaggcacgaagatggtgtgcttttgagtggttttatagtgcgattgattacccatggttcgccaaaagtgagtttgttgagtacctgattcatgttggattaggtcatgttacaagattgactcgtgttgaatggggtgtaataagaaggtttttctttttctctgttgtgttccttccagctgcttgtttctttgtcaatacacatgtgcttctggcagatgattaactgaccaaaggatggttaatttgcacatcttgtttatgcagttctcttggcagaccacgaagattttcagagcaatttttgaaggaggaaaaggagaagcttaatgagtacagggagtctgttagagcacattatgccgagttacgtgccggcaccagggaagggctttctactgatttagctcggcctctatcagttcaacaacgtgttatatctattcatcctaggactagggagattcaggatggaactgtgctaacggttgatgatagtaggtaccacattcagtttgacagacctgatttaggagttgaatatgtcatggtaatccttttgtttttcttcttacagttgcatcaatttcacacattgattttaaagaataatgatgtaactgagaatgcatggtttgtgtttatttttgtcacaggacattgattgcatgccgttaaatccaatggagaatctgccgtcatctttcacaaggcacaatttcgattgtcaacaattgttttgagacttttaatgtgtgcaaaatcaataaacagccaaaagaaggaaagagtgatgagcacacaaaggctgtctcagttgggaatgtggataacgctggaaatcattatgcttccccatcaactcatgacatttgtgaaggattaaggcagaaagaggttagtgactcctattagttgagaaccagctttaaaattatgtgatgatttgcttagcaaaagagggggaaatttgtgggtgggtgggggtctcttcaagtagagcttgtgaaatttgattatttttgttcaaatgacaatacttttttggcttatggtcaatagttcttatattggtcccttattgagttcttgtgcggtttctcttttttaatgaccgacacctctttcatggccaaaaagttatgtactcttgcgaagcagactattcttttcacatataagtcttagtgaaaccggcaatcaaactgcttaaatttgattgtcaaaacccaaatatctaaattctttacattaaatttaatgtttcttggaattatattgtcttcctcagttgtttgtgctgtgcctcagtagtaagatgcttttccagcattcattaatgggcctttttttctttactcttgtgaataatataataggattgtctctctacttcttcctactgccatagcttaacttggaagtttgatagtatagttttaaaaatcgtgaatgctgtagtacgtagttgtctaagaacattttttttgaacagggatatgcatcacgttctgatttacaagctaaacttgtgtcctacaaaaccactaccccacaaaacaaagcaaattctcagtcttcgccgcttgcgcagattcgggcaaaagaagctgacatacaagctatttccgaattaactgttgctcttgacaaaaaggttattctgcttgacacccatcacttttacctttagttccttatgttttaaatccctgtgtttagatttcaggtgttaaacaaattttccgaagttttatgtcctttcaaagttaaaaattgggctgatggattacattaaacgtgtataggaagctgtagtgttcatgttgaggtgcatgaatgacgatgtcttggaaaaggaaaagaatggtgacagctctttaaagaattctgaaactttcaagaagcattatgctgctgtactcttgcaattcgacgaagtcaataaacaggcaagaatttccatgagctgtttttgatttcaacccttttcttgtatcatgtgcctttttttttcttctttaagacattactcaagctgtttcctgtcatatgcaggtttcttctgctctacttgcattgagaaaacgcaatacatatagtggattctctcctttggctagtttaaatgaccctgatggtcgcttaagctccgcggatttttgctcacacaatatccaagaatgtgggtctcaggtagctgaaattattgacacttcaaaaatgaaggccagaaaaattgctggtaaagcgatgcaggtattgagaatttaacaaatgcatagccttttcattttacatggtatctgcaagtcatatacagtgctaatcatgcatttcctctttcttgatgaaattttttgtttaatatagttacttttacaaatgatcagatctttaaaccatacaatagacttcaagccatcattaatcctaatgttgaagcttgttggagctaggtatatctttgtgatataagcacgtatgttcatgttctatattgtatactcggactaaagaatgagtcactactaaagtaaatgcgctagtttataatgagtaaacagtggcggaactaggtgaacttatttggaggggtcaaattatttgcataatatataatttttgtatatgtatctatattttttataaagaaatctttttttggagggggacaaggctactacttggcccttcatagttcctccagtgagtaactctacgctgatttc

SEQ ID NO: 187505 - DNA, 2232 bp, Cannabis indica
ctgctacagaaagtttaactcaaccccacatgaagcaaccattcaaaattatgcaattaaggcataaacagtcaaaggtagaacaacaaacaggtaaggcatagcgtaccaaacaaaccatccaattgagtaatgattgactaagtaaaaaaaaaaaaaaaaagggattaaaagtaatgtgaggttcccaacctgctacattgctggcaaaacctttgcctaataccgctgacaagcacaacttgagccttagcatgaatctcacagaccttatgccttctatggtactgtttagcatcactcaaatcagccgaacacttctcagcctgacaacacctcattccagcaccactcgagccttttttcccagaaccaacaccaacacccaaaaccaaaagccctttctttctcttatcctcttgctcagaactctcatcttcatcttcatcctctctcttcaccaccatcttctctttcccactcaccgtcatcctcttgttcctctcaattttacccaattccattaaagacccaacaaaagtcaaggctaacagaacagaacactaaataaataagcacagtggaaatttatttattttttaaaaaatagagattttcatgagttgggatgtggtggaaccgtaggtgagagaagaatataaagtaggaaaaagaaagaaagtgagagtaagtgatgactgaggaccacaggtatctactacatttttatttttttccttcaagttcggtatatggccccagctttttaatttttttttatatatattttattttggctcacactcatggaggagatgacgacgacgaaaacccaattaaaatttataataaaacaaaattataataaaacatttcggaaaaaacgagaaacaaccaattaaaacatgaacatagtacaaattcagcacactttttctttcataggaaaatgtctgggccacgggtgattctcgtgagtggtggcccctctctttcaattcacacaccatgctcgggggaggtaggtccgactccgactcgactatagcatggcagctcgaggtcgaggatgagccaaagccaatgtaattatgtaaatgaagggtcgtacagttggaacacttggaaggaattaataatggacggagaggattggtggtcttgatttggtccacgtggagggtcagatttttgttggtgattggactaatggctattcgaaacgtgtgcgtgtagcacaatgtaggttgtccttttccttgcttttgaaatatggacctctcttctttctttcttcttcttcttcttctcattcttcttcttcttccactacctttttaacaccggtggggacaaagtacagttttacaggttcacttctgacccagtccaacttccagtcattctcttactttttaacctcaatcaaagaatctccacaatgcgccatgaatgtatttatatatacatgtgtatggtgggtggatgcatatatatatatttatatatatatacattaattgttcttgttgacataataattgcatttgagaaagtaaacaagaagagaagaggagtgttaggaagtttggtttggatgtatttttaacatttttaaatagaagatatatgaaatttatggggctcaatcattacgtggaccaaaccaaactcattacatggacccatcattgccaaaatacttataatgacaatgccaattcaaaactaaatttatatttttcaataccaatattttatgttctattcattatttagcttagttttacgatgcaattttttttaaggatcatttaaggcacaatattattctcttacctttttttttgacaaaattcttttacctttttaacgttgccttttgtaatacttttatttttctaaatgttaaatcacaaaaataaaagtagatcgtttgtctttgaaaaataaaaggtgtttcataattatttttgttttttaattgtaaaattaaaaaataaaaatatgttttataaattttatttcatgtttttaagtgagaactaaaaaattgaggtgatgggtggggttaaatttgggtctaggccaaggttcaagctatggattgagtcagggtctaagtttaagtggaggctcagggtggaatcagggtccaaataaaatatggatgaaaaaaatagagatttttttatctttacattttaaaacagtcttttttttttttttttt

SEQ ID NO: 187506 - DNA, 3424 bp, Cannabis indica
atatcctactatattttccttttaaaaaaaagtaaaaactctatttgttttccattaatacggtttcttgactcttagatggcacacggtggaacaaactttggattttataatggagcaaacactggatcagatgagtctgattacaaggctgatcttacttcctatgactatgtatgaactttttggtttatcttttgtaacttgtaaactcagcatttatctctacatgtatatatctgataataatttggaaattaatgaaatttcattttcttcaggatgcacccattagggagacaggggacataaacaatgcaaaattcaaaggtatttacaggtcctttttctcacttcctcacgcacttctctagttcttcctaggatattagtaactcacaaacaaaatatctactgaatttaatcgagttatgtttcttaaacagcatagttccccatttatgtactttttcagctttgcgaagagttatagagaaatatgctggacaatctcttccgccagttccacctgataatgaaaagataggatatggatccattcacttaacaaagacaggcaatttgcttgatatgcttcctcattttgatgttgttgaatctgaaaatccaatgccaatggattctctcggccaggtacctaggattctgcagttttggcttggagcttttttatttaacgatccaatgatttgtagaaatattttaagtcgaatgctttttatgagcagatgtttggcttcttgctatatgtaactgaatatgctgcaaaggacaacatcaatgacagaattctgtctataccaaaggtggattttcctgttatctttaaatttaagctgatgttaagtagctgtgtaaagttgcattctagtttctctgctcacatttttatctctttttaccaacaaagaaaaatacattcttggtgatgaagtccatcacctgtacttgtaacttgtctattagctgtacgatatatcgaaaaatgcaacaagcttagagagttcaaactacgaatttcactatgaaatgttgcaggtgcatgacagagctcaggtgcttatatcttgctcttctggacttaaagatggaagaccaacatttgttggtacaattgaaagatggtcaactcgaagactaaaccttcctcgtactaattgtgtgtctagcatcaacttatttatattggtacttaatatttttttttttgcttcaatttccataacaataataatactgcatgatttcaaaaaactgattatttatttactttcaactctcacaggtagaaaatatgggtcgtctgaattatgggcaatatatatttgataggaaggtaagagaggagaaatcataatgttgtttcagacgtaaggttgttaactagtgtcatttatttgcctacgatcaaagttgttttctattgcagggaatcttatcctctgtttacctagacgggtagtattctcagcaaatggaaaatgtacaaaattcctattcccaaccttaatgagattccagaaaataatcccatcaagcaggcttcatattctagagtttttgatatttcagctcgcaaaaagttaaaagaaaagcacggtacgatccagagttcatgctgtgataaaactcagggttaagatcaataatgaactaactggcttgtcttttgcagtgattgtttcaaaagaaccagcattttatgctggtcagttccatattgacaatgaagaccaaataaaagatacattcatatcattcaacggttggggtaaaggaattgcaatagttaacgatttcaatgttggaaggttttggccggtaaaattgtgcatctctttacttcattgatcgaacagtacaatgccatattgctatttcttatcttttgtttttacagtcaatgggaccccagtgcaacctctatgtccctgctccactccttaagcctggggaaaatgttgtggtatgcatgccaagttccaattatagaaatatgtagatagagagtggctaatagagaactacatgcccaatttgttcatcgtttctaaactaaaagtgctcgcttttgcttgaattcttaagtgtttgttattctgcagatgatatttgagttggaagatccaaacccagaactcgtggtaagctttgttgatcaaccagacttcacatgcggttcaagcaaacaacatttccgccatcagctttagtaccaacactttctatgagatgttctatacactgctaaatacaaggcaagctggagttcagaaagagatttgcatttgcaatttctatttataatccctggagaagtactcaaaggaaagaaagaaaggtggaataatagacatggtgaagggaaaaaaaaaatgtatgcactcctgttaaataatacctgatatttccacgtgagctcattatgctctatcaccatgtaaaggttggacaatggttgaaataaaacgcaggaaaatgaagtcttgctgaacattaaatcttattttcctgagaagatcaattgcttatgtagcttaccaagaaacaaagcttcaacaaaagaacaatgtaatttctcttattttaactggtttcttaaaaaaaaaggagaaaaacattataactcatgagctccaagacaacatggagctgccaattatacactacaattcccaagtacataaaaattaacttggtttctgcttagaagcatcctgttcttgtttagatcctgacacagctgcggttgcggccgccgtcattgcaacagctgcagcaccaacctttgcactgccagcagctttcattgcagcacctaccttcgcaaacgctgcaattcctcctacaagcatagccctcaaggcaactgttggttttacttccatatcttatgccctggacttgaagagaaaaccttccacaacaaacaatatggaaataacaatgtcaaaatacaagaatagatggggtgaaaacacctcatcccaagattttcactcaaagaatttcaaagtatttagaaaaaagaatcaacgtctaaacagaaaacagcaaaacataagatcaaaaatatttatattcctagtagttctacttacacacacaggtgaaaacttgaactagaaatccccatataaggttccaacttcaaccaacttaaccggatttatcgaactcagccataaagacactctcgaccttggaataatgtggttggcctattgttaaaggactcggatgcaagggttttttttttttcgtaaggccaacaagtttcctacttttttccctttttggactccttccttagataataatgttaaaaatagaatgaacactttcataccattaaaaaagcttaaaattcctctgcatgactttgctcaagcaacatgtacat

SEQ ID NO: 187507 - DNA, 1644 bp, Cannabis indica
tatatatatatataataaataaagcttacggttgttatttagtggcaggtgggtgatcctcggcgaaaatccaagacaactaatgtggctgcgctatgagctagggcccctaaaacaacaaacacatggaaaatctgatgactatgtccagctatatcgaatttacctggtttccatttctctggcactctactaacatagaaggcagctcccaaaccatagaaaagagccattgataactcgtatgcaagtgccaccattatatgtttagagccccaatgtaggacaacggtgtgcaccgcgggaatcactcccgagaaccccattgccagaaaaagggtggctctgaaggtgcggaattgaggagctgaaagagcaggggagaggagtgtgatgatggctaagactccaagtactgaaatggaggtgagatagaggagtcttgagatggggtgacaggagaagccgtagtagattggggcaaagaatgaagagactatcatgattgagattccggcgtaatcaaggcgccagaaaaaggagctgaaacgtttggagtgggaggctaagaggtgggaaacagagctgcaaattaaacaggccattgacccggctaagaagatgaaccaaggccatatgggaatgggatctgtggtgtctgattccgggtggagatgagttggagttgaagggtttgggatttgcctcaaatgggaatcctgcaccagacaagaaatcaaggggaatgagcttggtgtcaaattatacggtgagaaattatgtagtgattgaaataaattgttgtgtataatgtattaatgtattgttgtgtataatgtattaatgtattgttgtgtatatgtgatataatgtgatataaaataaaaaatatagaattttaataaaatattttaaaaaatagagtaaagaatataaatactgtagtagaatgttgtaattaaattattcagggaaggattagtttttctttttttttttgcttaattaacaaaagggacatttattaaattgatttatataaaataacccaaaaaaataataaaataaaaactgccacgacaacgaatataggagacagagccctatcatcaagtaccaatgagcatttctttgactccgtgagtaaaaaaattccaaaaaaaaaatgtcagctgcatgactgatctcatctgacagcaagcagattatcatacgttacatccctcggttgtcagtttatgttctgaacaactggcataatcaccacccttgaaatcattaaaaattatatataaattattattaactaattacttattttaataataatattattccactggttgttaaattgtgacaaaacttttttatcacgcggtattggctgactgacacacttttcgacctctcaatttttcattggaggtacatttttggcttaaagtactaattttagccaaaaagtactaattctctcaaaattattgccacaaaaattgtaataataaaattcttacccaaaaaaaaataataataataatatattgtattaaggaagcctatttcacttttatcaaaaaatacacagagagattattatttttagtgacataaaagcatgttatcactattattttttttcaa

SEQ ID NO: 187508 - DNA, 1213 bp, Cannabis indica
ctgcattgttaatcgactacatgagtgtggtgcgatgggcagtttaaaaaaatagtttggggtaaatgttgtgggagtctccaataatactgacttcagctgatttagtatagaaatgaataagctcccagtggtgattgtattgcttgccattctgtaatacgatccaataatatcatttgttgtacctgcatataagatccagtggtgattgttatatgctttgtttttagaaaaaaaatttattatttgtcgttacaaaattaggaggaattttgtctaatgtcatcttgaactaaccaactgaattaacacgacaaattgcagggctgatggagattatggagcagcaaaggtgatgcttaggccggcttctcctggtactggtgtgattgcaggaggtgctgtaagaattgttctcgaaatggctggtgttgagaatgcattgggaaagcaacttggaagcaataatgctctcaacaatgccagggccacggttgttgcagtgcagaaaatgaggcagtttagcgaagttgctgctgaccgtggtgttccaatggaggagctttggaaacactagagctagcaaaagcaccattttactgtgtagaatttataattgttaatttaagtaatgcgaggtttcttttctttgtggaagtagaggctccactttaggatgaaaatttgtaagaatttattggtttcttccctcaatggctcaatcccacattttttttttcttttacttttaatcttttgtttcttaataaaacattgttatttgattctatttgggtcggattaaaataacttgtcctttcatttcatcttattttcatttagactcagctgtaaaaagttttttataatagaggaatagagtttgaaaaatgactttgaatttgtacaaaactctaatccattctatgtaagatagcagtgtcctatccactagtatgggtgctcaaataatttaaactaaaataattagcaattttgtccttttaacttttgacattatctaagtttgactttaaaatatttaaaattttttccttctagtaggttctggctgatgcatctttgtaaattaaaaactttgctccctaagttttaacaactatcaaatcatactccctcaaaataaaaatgagaaagattcaacagtgtttttttggtacaccttcaaaattaatttagatcttaattt

SEQ ID NO: 187509 - DNA, 2768 bp, Cannabis indica
agagagagagagacgaggaggaaggggcaggggacaaagtaataacacaaagaacaaagaacttacagagaaaagtactgatccaacaatggtagcaagagcaacgacatattctggaaaggttgtacgcatggtccatgtcttctctgatgcagcattagcagagtaggcagaacactgtataatggaggcaaacagttggtaaaatgataactaagagaaaaaaatgtcatatgatagtgtatagcatcacaaaaaatatatatgtattaacagatgaacaaataaaaaaatttgtcccaattctagttcaaaatcaaacctggcgtgtggaacctatacatggttgagcactactgaattgccaactattaggaaagccagtcgtggtggaagaaaggtgcctaacagtaaagtccacctctccaataagccctaataaaaaaaaatagcaagaaattaacagagcatcgaacaagtcagaaaagagaaccttaattcaaaaaatgagacaaacaaaaatatacataatcaaataaaatgcatagttatatcaaaaatctggaccattttgctaaggcacaaatattgaagattgataaggtagagtaaaaatctgggtggaggaatcagaattcaaaaattgcagatgaatcaatttacgagtaatgcttctgaaaagaattctaaagccaggaaagatttcaatataaccaaatatccacaacatactctctcaaaaacattcacctatagcaaagtatattcataaaagctggaaacaattctttttaaaaaatatatatacatatatatcattccacaaaaatggaggttaatattttgcaaatgacaggaaaataagagaaataacacaactgcacacacaagccactctctgagcaccatgaaatcataacaacttctttattagtgcaccaaaatatcagccaccgtgagtgtccatgatgagtaacaacaaaatggcaccaaactaaatggaaaagaaaaccatagatttgttctaaagacctatctaaaaattctagtggaaatgaaaatgattgaaaagaatggcagtagagaaaaattctctaaacttctctgcaagattttttttcatcattgcctccacaaactgacaataaaatgaaggtgtaaaacaccagtcagacaaggaaaacgagcttgagaacgaccgtagtttaattaatgttagcttgtgatgaatagaattgactatatccctatttcttgtttcacaaataaagtgggcaactttagccacccttgactagaaacaaaaggcaacccacaccaaagcacacaaactataccattttaacgctgtcgatactctgcaaatgcgatagtatcacaaacataaccattaaggtaaagactagagactttagccagacaacataaaattcagctttgcaaatgttcaatcgacaatgatcaagagcaaatgaaacatatccagccaaatgcaatatttataaactactaatttgcaacctcagtcgtaaataagttccaagtcaagactctatccccctaagactcaacgtacagttttttcaaactacaatttcaccataaaaattcaaaaataaaacaccgaaatgaaattaatagccataaatcaactaaccatataaaattcccagcacgagagcacaaacaatggcggttgtcaccacccatatcaacgcacttttaatcctctttccaacagtcctggtcacaaacaccaccatcagcatttgaaaccataaacacacacattacattttccctattctacaaaatttatatgtacatatatgtatatatgtgtacaaacaaaaagcacctacttgtcctggtccccttcatagtagaacattgcaaagggaatcacgaagaacacaagaaccgcatcgagaatataaatagcaagccacagatctttcatcggcaaggtaagattacaggcaccattgtatatcgcgtgacgacaagcctgccgattcgccacgtccgccggtaacatcagtatggaaatggcggcaacggagagccccaaaacgacgacgaatttgggaaaatacgcctggttagcgtcatcggggtgctgataattaacaagaaggtaaacattgaaaaggaacacaataacgcacacaacaatggcgacgattacgagcgcgagattgaaatcgcccatcctgagctctctctccctcgattcgaatcagctcgaatcgaaaacacctaacctagatcaacaatcctagggtctccttcgtccttcccccaacttcaaattagggtttctcggatctgtaaatggcgaggagagatcgatttgaggagaagaagaggaaaagagagaaattgaagctttggacaaaggcttttttccggtgaggtgggtttgttttgacgtgtggggtgaaattacggtagtacccttggtcaaatggttattttgcgaagagaatttagtaatggaaagagagaaagtggtttaggggtgtaaatgtaaattcagaacaaaaagttcgaacaggctgttgagagctgagacaatggtttgttttcaaacgcgctggaggagagaggagacctttgggaacggctctcgctcgtaagctccgcggtcgtttttttttttctctttaaatttttttgaaattgttttttattattttttttttttgtttttaattgtctttttttagtttattatatttttgtaagaaaaattgtttttttttttt

SEQ ID NO: 187510 - DNA, 1846 bp, Cannabis indica
gttctaaaacagttcctgagtacaaataaactggcattagaaaagatagttagaaaagaggtcaggagatatgaatgagatttatttggtgtataccatcaagtgttttgagagcattcttggcttcttcatgagtagagaaacgaacaaaaccaaatcctttgctgacgccattctcatctcgcatcactcgaactgatgttatatttccgcaacaactgaaatgttttctagtttgttatcgtcaacaagtatgtctaggttcgtaacatgcaaatttgaagccttttccaactgggagttgagcattttgtttcccgccatagtaggtttcttacgagccctttccacgtacatgtgccttgatcctgatccattgtttcaagtcagacaaaatatactgatatggctttacaaaatgatatgaacaaagtcaccgtgttttacctaacagtgaaccgttcaacctctcaacagcaatcatagcgtcttcaggggactcaaattttacaaaacccatacccctcgagttaccctcgtaatccttaagtatgactacattagaaacctttccaaattgtgagaacttggctcgaagaaaatccacactgatatctttatcaatatttttcacaaacagatttgtaaatgatgtttcttcttcattggttgctgtcctctcacttttcttgacaaattttgtcacgtatctaaagtacatagcaaagaaaacagaacatgatgatgagctgaagtaatttagcataataataataataaagaaaaacaaagaagggggctcacaactttttcccctcgatctttgtactatggagatcaccaacagcagcttttgcagagtcctccgagtcgaactggacaaacccaaaacccttacttacgccatttgcttcggcaaccttgcaagactgtatattcccatatttgcaaaacatctcctccaaatctgcactcgtaatcgaacggtcgagattcttcacaaagatattgccaataccagtttttctaggaagaggatttctttgagaccacattattctcatgggcttaccctttagttcagtatgattcagacaatctagagctttagaagctgagaaatcaaagaaagcgaataaagaaaagttatatagacagaaacttataaatgattacttaaacaaaccaccaaggaagaacaaaaacaatttggtgggatatgaaatgtatcttaaagaatgttgacatagcaagataggtaataccagaaagaaaaaggacacatcaaaacagagaagaagcaaaaaaaaatatgatatagtaaattgaacaaattacccaattgatcagtttaagcaaacactaaaaattaaagaagccaagaaaaattcattcacagaacaactttccaaaagaaagctcgaatttgaatgattttttcgtgaaatgaaccaaagaaaccaagaaaattgcgaaagacaaaaaacaagaaagaacctaatacaaaaggaagtaacgaaaaaaaaaaaacaatagacaaaagtgtataccatgggagtgggaaaagaagttgacgtaggcataacaaagagatttcccggtgaaaaagtctcggcagagacgaacggaggccaggggacccataaaacgaaacgtttcgataaggtcagtttcttcggcagttgggtccaggtcacccacatacaacgacttcttgtgaagattagcctctgaaacgggaaaaactgttgtttccggtggtcgtcgtgttctagacggagcgcccacttctgccaccatttttgcgatttcaaaagaatgttatgtttagagagagagagagaga

SEQ ID NO: 187511 - DNA, 5987 bp, Cannabis indica
gcattctcaatattcaatattatttacacttttttatgctttgattgtactttcacatgtcttgtttatgttttgactactttttcacattccgcattcattcattatatttcctagttatgggatctttccagtggccactcttggggcttaatatatatggagctttgagtgcggacggtgaaagcttaagaaaacctaccagaaatgttaatggttccttgattggcggagttggtggaggttcaggtggaacaatcctcctttttcttcaagggcttagacttgtagagaactcatctttgtctgttcttggaggcagtggtggtcctcatggtggaggcgggggtgggggtggtagagttcatttccactggtccaagatcgataatggggacaagtatattcctgtcgcgagtataagaggctccattggcaataggtatggttgaaaattgagacatatggcaaaaataaatgtactcttactgtagctgtcaagtcagtacaagtgttcaagggtttaactgtctaaatattataagtaaaaacatagtaatgggtctattgccttttagtgcaccttaaataatcttgttaatctgtaactaatattcacatactaccataatgtttgtttagtaatcctaatttacttcgtttatgaatcatactaacagcggaggtactgggaataatggtggtctttatggtgaaaagggcactatcacgggaagaaaatgcccgaagggtctctatggcacttactgcagggtatgtttcatatatctaatagtacccaaaaaatgattgtattgtttttacttctgaatctttattgttacttgtttatatgcacacaagggcgtatattgttaatgttgaacagggaggcaaaacatttcttcttcccctttatatcatttctttatcatcactagaaaattggaaattagggtagtacaagctccatgaagtggaaagtagggttacagaagggattctttaagttttaaattattttattttaatgtagaattaaagcaatgaaactcccttttggttgttttagtctacttgtacaaatcaagttgtgctttacataaatcttatttagttgttatacaattatacaggaatgccctattggcacatataaagatactgatggctctgatgacaatctttgtgttccttgttcacttgatcttcttcctagtcgtgctgagttcatatatacgcgaggtatctttatataatcacaaatacttctatgtagaattctaggtctcttctcacataaaattgcatacttgtttcaggcggagttactaagccatcgtgcccctacaagtgtatatctgacaaatatagaatgccaaattgctatactcctctggaagagctgctctatacttttggaggaccctggcctttctcaattttgctatcatgcattttggtgcttctggctatgttgttaaatactttaaggaaaaagtttctcggttcaggttcttataatagtgcaggttcgattcaacatcacagtcaccaccatttcccatatcttctttcattatctgaggtatgtaaacatatgtagacttttctcttttacaagcactttcttgtgtcaagtttttgttaagttttgttttcttccagaattgtgatgggatgatgtatgttttcttcacatataacaatcattactatttactgcataggttcgaggaaccaagtccgaagaagctcaaagccatgttcacaggatgtactttatgggtcctaatacttttagagaaccatggcatcttccctactctcctcctaatgcaatcattgaaatagtgtaagcaaataaatcctaaaatggccaatggcaacatataagatgttagttttaatggtttgatttgaactcttatgtttttatattccaatccaaagattttaagtagaagatttatttgtttctgtgtaaaataatatttttttctacaataacaatcattatgaactgcttgttgtataagacacactttagtagcaaattttagttaaatggcatgccatgccatgctctgtggccagtaagattggaatcataatcgtgttaatatccttttgatttgtttttttttgtcctacatttatgctacaatcctttttgggcaacaggtatgaagatgcttttaacagatttattgacgagttcaattctgttgctgcttatgattggtgggaaggatcagttcacagcattctttcagttcttgcatatccttgtgcctggtcctggaaacagtggcgccggcgatgtaaagtacatcgtcttcaggaatttgttaaatctgaatatgaccattcatgtctccgctcttgtagatcccgagcgttgtacaatcgttttttttttttctttcctttttctcttttttgcatcatctacttggctcttataacaaattgacttattgcaatttagctttccatttatttttttcacaagacttcaatcaccattttctagatttgcattcatattttggaggcgtctgtggcctctgaaatccttccttgtttaagtgcctaggccttccattcatgggcataagacaacttgaacacaaagaatgcatttgacactcatagaatgtgttttgctcagtcaaaccatgctggttctgttgtattcagaaacattcctttatacccaagaatggtagttcaaatggtcaggcatgtggtacaaggtctgaggttcgagtcccttgtgggcattttagcagctgcttttagtcaactctaaatccaatttttagtacagatatagactggtgaatttattcattactgtttaattttaatcatggagtggtaaataatgtaggttggagcaacaccagacctgatggtagcatatattgatttttttcttggaggtgatgagaagcgtgtcgacatggtaccaattatacagaaaagattccccatgtgcataatttttggcggggatggaagctatatggcaccttacaatgtccatagtgatgcattattgaccaatctcatcgggcaggtctttattattcctttgagtgaatttgttggatatgattgggctattatatctgatgataaaatatgaaacaatttttttcagcatgttccagcaaccgtgtggaatcgtttggtggctggtctaaatggtcagttgagaacagtgaggcatggatctattcgttctcacctaattctggttattaattggataaatagccatgcgaaccctcaacttgagttccatggggttagaattgaggttggatggtttcaagcaacggcatctggttattatcagctcgggatattggttgtagttggtgactatcctcttcacaatatggaccagtctgaagtatttgatagaagtaattgtgaaactccaaggtaaattgactcattcaacttattatcttatataatattatcatataatttttaaagctatattaattaagaagtaaaacttggaattctcaaaacaaacataatatgcagtcaaccataaacaggatgggcatcaattcatttgtccttccattttatgatttaattggtgggaagttggtaatctgcaaattttagcttatatgtgtatgatctgatgatgtgaaatctattacatggggaaacgacattaaatgaacatttacttttatttttggtgaaaagcaatgaaagaaaactatgtataaagcacaaactgacggcaaaagtctctttttaactcaaaagtcctttttggagaagttagggtcttagactttgaaaagctattttgtaaatagaataattttagggtatttacagccagctaaagtgagtatgtagattcattatatacaattaattttgttgcatttaactacctatataaaattaattataattcttatactaaagtataggtagttaactataacaaaatcaactacttaaagtatttttgtcattcatttttttaatgaaactaaatagagaaattagctgcaatgattccgaatttatttataagagatctgtttttttgttaagtatccaaacactgaacaacttttaattaaaaaatcatctttatattataattatgcagaaataagtatctttctaataattttattagtttattttattgaaactatatttattagtttaaataagtttttctaatttattgttcggtatgcaaggagtgatgtgggatctacaacttctaagcagtcacaacaaagcttgccatatataggtcatgcattggctattaaaaagattactggaggaataaatggaggccttataaacgatgctactgtgaggtcattggatttcagaagagacttcctctttccactttctctaatattgcacaatacaagacctgtgggtcgtcaggtaactcaaggaaatgattgtgccgcgctaatatatgttggccagttaaaagttttccttctaatttttatttgattggtctttcaggaaaccctgcagctgctgatcactgtcatgcttttgacagatctttttgtcacccttcttacattgcttcaattctattggatttctcttggagcattcctttctatcttacttgttcttcctttgtcacttctttctccatttccggcggggttgaatgcattgttcagtaaggaacctagaagagcatcgcttgctcgtgtctatgcattgtggaatgccacgtctctatccaatattgtaagttacaagaagttgtgacaacagctagaattctttttgctcatttactgcacacatgaagcatattttcctagtgaaaaacaaaattttgttgaattctttttgctcatttactgcacatgagaaatatctagtaaagaaaaaaaaaattgttgaacaaagtgttcagtgagaagcaatatacggaattatggccctccatagacttttcatatttttccttttatctcatgtttggtagggataaaattgcatatgacctgaaatagttttgagggcattagcgggcaaagctaatgctgctttctcgaggacaagtgtgattaagaaattatttttacttggtcaattgtgtgcaattttttagtgtaatgagttatatcctgaaagtttcatgatggaatcacacttccgaaaccacagctcagtttccctgacattttttcctattctatgatatctttatttttttccttattgcagagtggctaagacgatgaagtttgtaatgtacctaggataatgtagaagtaaaagtgttggcattaaatttaagaattgttttaagttttggaaactggaattgcgctagtgttgagattttgttggttttaagtttatgattaatttagtgtttgacctatgtaggcagttgcattcatttatggtggttgtcattatggattttcctctatccaacttcctgatggagcaaatacatggaacactagaaggtgagccgttaatctcttatcttccaatcaatcacgagattccgattttctattttattcttattattaacattaaataattttaattgaaccttccctcagggaggatgctaaatggtggcttttgccaacaattctcttgttgtgtaagacaatacaagctcgttttgtcgattggcacattgccaaacttagaaattgaagattattcgctattctgccctgatcccagatgcttttttgggcacatgaatctggttcgtgattaattgtacggaactgatatctgcatgtgtgttattccattggcaggaaagaggccttgtcttcttccactttcggtacaggtgaggctactttttctggttgaaaatataagttacatatctgtacaaaagtctttgttttatagtttggtgtcgattttttcctttcactgtgccttgtgaccgtagtgaagtg

SEQ ID NO: 187512 - DNA, 1193 bp, Cannabis indica
tttggggaaaacaacatatttacttcaattttcaaatcaatctaagacaagaaactaaaaaaccttaatgtcaggtcgaagatgattatgccatctctctctacactgtttgccaattcttccaggtagcatctgagcaatgtaggaccattttctcactccatgctcttcaaccagtccaattaaaatcctgcattttgtaatacacacaccaaaaatagaaacttacaacaactacatacataaaccaaaatcacaacagcaaattttaggatttaaatgtacctatcttcttctactgtccattggcccttgactggattgttaatgatcttcctgcgaccattaaagtatgtcattcttttcattaaggaacaagaagtagtagtactataattagtactcttgttcttgttatgcatggtaacttggtttttgcagtacccattttgatcagctgttatggttgagacttgattaggtaccacagaagagctcaaattaatagtccaattggaaccaaacatttctgtgggatttgatctacttgggaaaatattcaagtactctcctccattattactttgaaatgtggtatctgtaaagggcttattataactacaattgtagtactgatcatatagaattccaacattgttttcacaactcccatatgtgctagtagtgtagtcttcgaaattgggttgatcaaagattggagcttgggacccaaaattaggatttgatgaggacccattaaggggaaattgatgaccatgatcatgaacatgaaaatcttgaagataagttgtagtaccctttggtatgggaagctctaaattgttgtcttttgagtaaggtttcatgtggttgttgttctcatgtaaaaataatggataataagtgttgttttctctaagcttggtttctagctccatcatgagattgagagaaaacatatatataagaaagaagtagggacattggcctagtgtttgtgttttgtatatatttatggtcaatttttctatttcttgtttatcaagtgaggaagagggtttttggctatttaattgtctttattttgtgttgagattgatcactaccgtcaattctttatcatctaatggctagggttgtttacattcttttattttctattttaagcttttttttttgttatacattttaca

SEQ ID NO: 187513 - DNA, 3768 bp, Cannabis indica
tgatggagttttggatcggttttagaggagaaacccaaggttttcttgcagtccagaaaaggacgatcgattgctactggtatggcaagaccggtcgattggttggtctgcagggggaaatcccagttttctttgagttaggttcttggctcgagatgtttttctgagcttggattaagacattttagtgatgtttgagttaattttgatcccatggagagttagaatttgtttggttaagaattagggtttgtttcaaggattggataagttgttaatcgagcttcgttattgtgacataggacctaggattgtcgagcatctttccactcagattggcccgcacacccaatattggtttgaggtaagaaaatctttatgtactgctaagcgtgttggtaaaaaacaattatcattgtttgtgactcgattttgatcaaggtagtgatgaggaacgattattatcatttatgactcaattatgatcgaggtaatgatgaggaacgattattattatttgtgactcgattatgatcaaggtaacaactattatcatttgtgactcgatgatgattgaagaaacgattaatatcttttatgactcgattatgatcgagaaaaggataaagatacgatcattaccgttaatgaaatcagtaattactcccttgaaaccgcatataggtttcttacttattgggtgctttatcgagcaatgatagtgacatacgtagctcgtggataatgagtgataaggatgctttatgaagcattaaagtaggattgtcttataagacaattaattgattatgtgattatgtattgagtgaatatctttttattatgatgatgaagtcgttaactatgagttgccatgaatttcttataatgcgtaatatatgtgtttgtattaaattatatgtgcatgctgaatatgtaatgaatcgtgggtatgtatattttgtcatgttgtgattacttgcattttacatcgcttttgatttagtagcttttcttgtagagtctttgtgactcacgggtacttcgtggtgcaggtaaggaggataggaaatgtgttcaaccatgagtcagaggtttcccagccatgtaaatatcagccgtggtgtcttggctttcggtatacacgatcaaccctttggctatgtttggaaatgtaatcttacttttgtaataacagttttgagacttgttgtaaaaaaatttataaacaggagatccccgtattatggtggtattttgtatgaaatttttattttaacttaatcaaaagcctttaattaagccacacttttcctaatataatagattagttagaaataagtttgtaaaagcacacacatggcgtccctgtgagtcagggcgtgacatcatggtattagagcgaccaaggtttaatgatcttgaagactagtttgatatgaacattggttgcgacgactcattagactcatagtttagtaagtgctaattgttacttaattaatagactatttgttgattgtttgaattgcctgcttatttgaaatgtgtaagctgttagagaggcatgataagttttgatataaaattgttaattatgtatatgcatgtgcggtaatacttattagcattattctacttagaaagattttaacgatggaaaggatcggtcacgagtgtactggaaggtgtacccgaggcgatctagtaaggataatcgcgagtttaccaggctcgaagttggtggtgtgagtatgaatcctccactaccacaagattgggaacaaatgtatgttatgatgtaagagatcatttgagttgcaaaggtagcagaacttacacggttgatctcgggcaacacggtgatggagtatgacactaaattggaccgattggaaaagtttgcctttgatgaagtggctgctaaggctaggattgctaaatttactcggagatggaaagagcatatcactctggatgtggatatagtttccaaacaattgggaattgtctagctctatgctcaggtggctgagctagtcattactgttaagggtgcgaggactaaatctaaaagagaaacggtatgaggaggagtcatgagggaaagcatctaatgttgaatttgatgagagtgttgaccctaatgacccactagttacaggtcttagtaagagaatttatggtaatcaagaattttgaaactatccagagggctgagatgcaagagacactatcagggtaaactttaaaccaaagcctacttcgagggtaaagtagtaggccatctgaaaaggaattgcctatagttatagcgatcagaatataagaatgataacatatttgttcttgctcgggtgtttactttgacttagggagagggtgatgttggtccttctaccgtgataagttggattcctattgatgatattttgttgattgcttttattggttctggtgcaacgtattcttatattctgagaaggataattgaaagtttgtataaatttaatgatgtgttaccaagtggttctggtaccttactgcttactagagaacaagttattttccaacaggtggtttaggtcccttccagaattgtggaggaaagagaatggttggttgttttagttgagctaaaattagaggattttgaggttatattaggattggactgacttgtaaagtaaaatgcaaccatcgattgtgaaagaaagatggtaactcttgaaccagaaggtgaggaccgattcatgttcttgggcaaggttcaagggtttcgaattccattaatgtcggtgtttaaggcagaagatttgtaatggaatggatgtattgacttttaagctagtgtggcaaatattacaaaaggaacatcagtgggatggggacataatcttgtggtccaagagtttctagatgcctttccagagtagctaccaaggttaccaccgaagcgagaatttgattttgaatggaattgatattgggagcataacctacatctaaacttctatattggatggtaactgcagagttgaaagggttgaatgttctgttacaggagatgttgggcttgaaattgctagaccaagtacctaatcttgaggtacaccggtattgtttatgaagaagaaggacgaaaccttatgagtgtgtattgaccactaggagttaaatgaattaatggtactgaataagtatcctttgccaaggatagatgatatgttgatcaattatagggaaagaaagtcttctctaagatcaatcttcgatctggttattaccagttgaagactcgagaggaggatattcccaaaatagcttttcatacctgatgacttcatagttgtcttcattagtggcattctgatttcttccaactcaaaggaggcatatgagaggcatctttggatggtgttgcaatgtctctgggagcataagctttatgctaaatgcaagaaacacgagttttttttggccccaagtaagtttcttagggcatgaggtgaacatagatagtatcttgatagatctggtaatgatcaaagcagtttagatttggcttcgagccaggtttacaactcaggttagaggttttttgggattgactggatgctacggaatatttgttgaaggctttctacgcccttagcggaaattactcaaaagacttgaaacagaggttaattattacatcagtgttaacattgccagtcagtgaggagaaatttatgatgtattttgatgcttctaaacaagggttag

SEQ ID NO: 187514 - DNA, 2016 bp, Cannabis indica
aaacactactagtactcaatcaatcaatcaatcaatcaagtacaaccaagcgtaaaaaaaaaaacacgtagatagcagttttacacgagaagaaaaagctagcaatgaattctaagcaagccgttttttaaacaaccttgaaagttgaaaaagaaaagattagcaaaaagccagatacaaatgggtcaagagaagtcccatcttttgattcaaaatgtaaaattctagaacgtttttaaatccatgtgagtaggtatcaaagcttcaatgacaaagctgaggttgaagaagaatgaatcaaagagatgaaggtggtatgcaacgtttttgcctactacttctggatgcagagccattgccgtctccagaagtagcaggcgtcgaagacaatgatgttgacgataatgatgattgacgagtagatgggggaaacctacttgaatggctcctcattttcttcttctggctgtcacaaactccatctgatcttacttggcgaacctttgtttcgttcaaaccagcgggaagaacacaattgcagaaaaggcctaattaagttcatataagcaaaagtaaccaagatttagtaagtacattgcaactcaaattaggatttgcttagaatgagaattgaactaatgttagcaaagactattttacaaaagttactaattaccctattttgataaatgacaatttgaactctgtatttttgagcctaattttagtcaatttttttttaatataactaaaacataaccaatggaaaatgtaattccaaagtattgttaattgttatgttcaatattaagctcagcctactattatgtttcgtttcgaataaaacaaagggtgtgattggtaacttttattgaatacataattggtaacttttattgaatacataattggtaactttagtaacaaaatgtaaaaaatggtatttaataagaatagatttgttaccaagtcgagcaagtctgttgacccaacgagggataggcttccctgttaatctgagacacacatcgttacaaaagtgattacagttcttggtgataagatgataagtattaccagaatactcttctgctaatttctccattaatgtacggacatcttttggcccaagatctgttctaccaatcagaatagattttctgaatgtgaaacctggacaaaccttaggttccacttcgaaaattccagttgttgcatggtcatgggctccgaatgcatattcaacatcatggactgaataaattaataataattaatatatttatttatatatatgaaagaaggtcaattgatgtaagcaaatccattattaaaaaaattaaattaaactacaatactataaaattatatatagaaaaatccttagttttaatcgattgccagaacaattataaattaacccaaatatactaataattcaaaatctcgttatctattttctcatgtactttccaaaataatcaaaaccagatccaaaatggataatataataaattagatgaagaaaaaattaatcctaaaatggataattcagggttttctttaataatttttttttaaaaaaataaataaataaatcacagccagatccagacttcaatttacttcaaaaacatattaccggatctaaaaaaacaaactttgtgtatataaagttcacttttccaaactttctcgcgaaacaaacagatgagaaacctcaaaaaaggaaataatttagaaagaaaattcaattaccttgaacaccagaatgataaactccaagaccaagccaataggcgtagccatttatgggagtaagatcgtatacattcaggtacaccggaactttcccagtattcttcttcctctgtaccaaaaccattcgacaaagcatacttttttcttcttcttcttcttccaaatcagaaaacccagtaattaaaaaaaaaaaagaaacttctaacaccaaagattgttgaaatcgagagagaaaaaaaagaaagaaagtgattt

SEQ ID NO: 187515 - DNA, 4254 bp, Cannabis indica
ttttatgatcttcattatgcaattatcaatcatgtttttttaatacgaattcaattttatgaactgatttaaattcttattcaaaatttaacattaaccaaataagtgaaagcatatcaatcaattgaaattttcaaagtaaattacatttgaaatcaagtctatacaatataaatatgatgtactttctaaaaaatgagtcgataaactatcatagacgccaaatctcccacttcatcgtaaatcaaccaatcataaaaaaaaataactaggatagaaaagcccatttgttttggagctaaaaggagaaaaaaaaaataaactcacatgctgtccagatcaataaaatcttccttcaccagcgaggctgtaagcttatagagtccaaatggaacaggaccgtttacttccatacgctgataatattggaacttaaaaccgagaatttgtgcagcatgagactgaaaaacacaatcaagcccataactaaacataataactaattcactcaatgagtgtcaaacaggcattcataatatatacatacgaagatcgcttaccttgggaaataacggaattagatccaaaaagtcactattatcgggctgaagttcaaaacactctaatacctaagtcaaaataaaaatttatcaaaagaggtattacaatggatcatcaaccacttctagaaacagaaaaaagtaattgaaaccgtgagaactcaacaacttacaatgtcaaaaacacgatttggatccaggtcaaaatgaccaattaacgactgcaggaataattgtaaatacggtaatcagatacgaacataaagaaatgagaagtaaactaaataaagttcaaccaaaaagtaaaaccttaattatgccaatagttgctcctgatacactacatgatgaagattctgtgtttccacagagaagggtaacctatattaagaaaatgaaacccaagtcaatataagaagactcaaattacattaaaattaattaaaaaaattagcatttacaactgtctaacatcataggactgcaaggttacactgtacaaacttccaaactaagagcttttgttatgagcttaccagcttggcatagccttcactctcttctcgaagaagattaaatttagtttgttgataaagaagacgagtgtttactctaacctgaaagtaagcaatacagatacatcaaaggcatatcgcatatgaaaaaaaagttctagcaaatgagatcataaattgaaactaatctcatttgagtaattatatggatattctattattgtggagaatcaagcagttatacaagtccaacatttggttaaaacaaaatgcctttttatttaatctttctacaagatacatttacaaggattaaaaccccactgcactcactgacacacacacaaactgattcaaataaattccctatggtgatcaagggttcaattagattaaggtaaatgaattaaatgtactggagattgatcacatcattggaacaatataacactggtaccacaaggtacacacaatctgaatttactttacatgaaaataaataatagattttcttgttttcccctctggtagttgatacagaatataaataaaatatgtgtgcatacatacataaatatataataaaaacaaaccaatcttattgaaagtactttgggttgcttgttatgtaaggttgccaaaatatttgactaacatttgcctacctctttacttttcagctcttgagccttaatcttaatcatttcagcctcccaaagaaactcttcctacattagcaaatcattatatttatcagtaaaagaaactctcaaaaagtgctacaaaagcaacaatcaaaaatccatcaccaatgaaaaaattaaatgacaattaaaagtcacctcacagcgctcatggagaagcctcaatggaactaacccagagtcaaccagccattttgcctgaaaagaagggacacataaaacacacaaacatagtaaaagaaaacagcatagaagaaaataaaatccagggtcaagcaagaaagcatcacctagtctattttaataatcgcacaagtttaataaaaatgatcagaagaaaaatatatcagcagaggatgactaacataaactgaaaaaataaacaaataacaaatggaaatggtgacttgttgaagactatcatccatactttcaagcatagttaagtgattgatggactgtaacttcccaccaccaccacacaaaggaaaaaggataataacattattattaaataatagagtacgagtacatggaacattagtagtattaattaactcaatactaaccagctttgttagacgagcacgatattctccaggcattgtaagctgcaaaagtacaaatttatactttaaattaagatgtgcaagtaaaaaatagttagaaaggcaatttcaaattcaaataaatgacattacacacacatgtccaatatatcagcaaaaattcacacaaacaggtatttcaaaaaacataaatacattcttacttcttgtaataccaactaagtttcagttttaacttttatgaggattaaaacatgataattttatcacttccagcacaatgctgccaaggtaggcaaatttggaaaaataaaaatcaatggcaatcaaagttatcatagtgggagctctctgaagccacttcttctaagcgaccattttgttttatttttaatttctagttttttaacacgatcctagttgcttccctagaaaccaagaatacgtcttacttccacttaaagtatacatgtaaaacaatccatatatatacatatatatatatacacttcattagaaaaatagcaaggaaccgggcaacacatttcaattcataaaagtgtgtactacttatatctgtacacaaacttgaacaaccattaaaagtgccagcatgcttgtcatcctaataatgaagacttatttcttactcaaacatatccacactttttatatgtcatcactgtgttgtactattctactatggaaaaagattgtgacatgaaatattcaatttttcatgattttgcttagatcaagtgatctatctgtttgtggtcactttatcttagttagatcgaattaacaattagctgtattagtctctaatccagaatttctgttccctaataactcaaactacataactccaaaattcaaattacatacagtcccaacttacttgtactcaatatcaacatttaatattgaaaaattcaactacaaattaaaaggcaataagtaataatagcaaaaacatagaaagctcacatcttgagccatttgggttactatatctgcaagactggagccaatctcttcgtctgtaaccttatccgtgaacacaacacaatccaatgccactttacacttctgaagcggcaactctccacgagcctatcaatcaaatgagaattaagcaaaaaacttcaagtacaacagattcataaatacaaattcaattatccaatacatcataagaaattaaaaaaggaaaaaacataccatgctagagcagagctcgtaaagaaagcggagcataggaacgggatcattgagcttaaaattagggttcccagccttccattcacggagacagtcttctgtaacgtacagacactgtacaggtgggagagacattgttgaggaagagaaagtgagaaagtaacagagcttaatatgaagccctatgaacaagaatgatggattaaggtcgttgtcggaggggatttcatgggttgaggacgagagatttctgatcaattttagggtttcagattaatttttttaaaattattattattttttttttgttcgaagcttttgctgctggctttgctttaggggtttggggacgaggacggtgtctgttccttcgtttcctattttggatgggctttcatgggcccccaaaataattattaggcccatttgttcgagctagattctttacttcgggaaaaaggaaaaaagccccaagaaccggggcagagttttgtgggctgagatagaggaagacaacaatttgaaattcttacaagtgtcactatttatcggattatttcataaatatataaaaatgacaaactttttacctttttatggatttacttattttttacattttttacgaatcctttttcttttacaaaaattacagttatttttcgttgttttagcttacata

SEQ ID NO: 187516 - DNA, 1584 bp, Cannabis indica
attttagttcttataattggtgtgtaaaataaattacatattagttagaagtatacggttcgtttggtacacggtattgtactatgtaatattatattaaattatattttatacgataataagaaagtcatatatatctacaatcatcgcaatagattagattcgatgagttcgatgactataattaattaaacgaactaagaaatatatttttggtgaataaataattcaaattactcaatgtagtcgacgtacatgccatgccctgcctcaattgtaatttacgtgtacatacactaatctatgttggcattattcgtaaatcaataaggaattaagatattctcttaaaaattgtatgtcatattgtgttaaaccaatttaaattttacacgtcaattaattttttatttattaaaaaattaactatttatacagtttttttcttaaaatacttacattaattaatgtgtcacaataaaattggtttaatacactataaattatgaaacacaatatattaacagaaaattcatcaataaggaatctattttttaacgttcagaaacgggtttttcttaaaaataataaactaataaaaattatacacgtgtaggaaaaaaagttggaatatatatcaaaaattaaagttcctgtataaattttgtatatataaaaaaaataattaaatatatgttatgtatatttaagttccaacactgtttttacacactgatgctggatatatattatgcacgctgaaaataaaacactataaagccatcaattttggtgactatatatactgaattattaaattattaattgataatttttttttttccagagttacaaaaactaaaacttaaaaaataaatatgtaataaaactttttttttggacaatcttgaaagagagtattggcaaaaaaaaaaaaaatattattttgatataattaatttgaaattataaattaattgatggttaacgttttataaagatgaaaattaattaaattaatttcacgttaaatacgtgcaagttttaaatatagttattttgagtgaaaataatctgaaacagtcaatttttggggcatttttttttgtcttgattagatataacacattatctactctctttgagcaaaatgctatatatttttctgtaaataaacataaatactgtaattagttagaaatattcacattaatcgcaagcacttatagtcgacgtgtcacatatcaaggcacgtaatgatgatgttaaatttgcatcattaattttcttataatttcaagaaaataaatagattaatcccttgcaaaataaaaaataaataaataaataaatcaaaagaaagtcactacgattaatttgaaagtgacttcgtaattatagacctacttttattttgaggtgcttaactcaagttaattaaagatatgatacgtgtttaattaatcaaatctacgaattataagatataaattaggagaggggaagaaaaaccctgcttctaagggaagagtaatttatttagtcccaccaccgtctcatttttcatatctaaccactccatat

SEQ ID NO: 187517 - DNA, 3282 bp, Cannabis indica
tctctctctctctccctctcttcacgttttactcggctccacaccaacgaggtgtgtacgaccatacatgtaaagaaattgaggtcacatattaactcagagcaccttgaaaccccaaccccgtcatcccttaagtttctcctccatttttctgatctctctctccctctctctcatcaaagccgaaactttttggctttgacctgaccatctctggtcatcaacgaacaaatagaatttggttttggtttcctctcgtcaagagcttcaagaatgtgaggtccgatccttcatacgtctcatttgattgagaactgccaccacctacggtggagctccgaggggcatctcggccaacaagagcccaacccttagagagggagagggagagggagagagtctggtggggttccatcgacggtgatgtctgggttgcagagctcatcgaggcaaaaagtgagggaggcaaatagatgaaatcgttttaggaattttgccgctaaaattttagtttcgggggtcaattgctagcagagtgaagctattaaaaattttgtcgcaatttattttagtatgattagtaaacttagaatagtaagatgatggtggttgatggttggatgggacaagtaaaaaggttaattggtttttgtatcaaaatgggagacttatagtttatagaaaagggtaaatgagctttattgatttggtttttggttgatacattttggattttggaatattaatgaggtatttataagtgagcgaataatttatctatattattctagttctattttatttacagatttttctaattgattatttacatacatttttttagattcttcttgattaatgactcctattttttaaaatattttagccttttctaatttatttattttttctacacctgatgatgagtttttagatttttatgcattatctaaaagagtgtagaaatgcgtatcactttttttaatagagtcatatgttagctggacgtaaattccttatttaaaatcacttggacaaaaaaaaaaacttaaaaagaaaacaatcctaggaagtgaaattcgtgacaattttcaaacaaaatttgcgtgttacacaacatatcatcttgtttaacaatgttcacttttaaggaatggatggtgatgagatgagatgagatgagaaggaatctctcttttcatttctatttgttattttaaagttggcaaattaatctttaattgctgatttgattttcaacccaacaaataaaagaaaagctctcaatatacagtttttaactaaatgctttcagtttctttcacccaattcctaatcacattccaaaacttgggttggaaacacttcttctacagccaggaatctaatgagtctgctttatctatatgccagtggaaaaatgcctaccttataagtttagttaggctaaaaagaagaaatatgaaaatgatgggaaacaaagtttgaacataataaccacaacaggttaatttgtatacagaaagaattgtcaaccccaaaaagaaaaataaaaggttgaattttcattgttagagaatggtttactactgtggaccagaccatgcaataaaataaaaattgacataacgttacaacttttgtgttgctttgggataagttctgtttggaagaggtgatgcatgcatgcactaaagggactttgagcaagttgagtgtgagtgagtgagtgtggccccatgggggccatggccagcttatattgctttcaggagagaatgaatgaatatgaatgaatgaagtgaactccactttgtcttgctttgccaaataatggcaagcaaaatgggtatggggaacctactatttttgtcctaacaaacattgctcatcaagtcatgatgctttattagactctctcacttctcttttttttgaaaggagactgtgtacttcaactagtcttgtttgtgtgtttgtgtttatttattcttggtaaagaataaagccaaaatagaggaaacaacgtttgaggtaaatgaaaaggtatacaccaaaccaagtagtaatagtaatagtaatagtactatttattgtgttaacttggattattatgttaatgttaagtagtaatagtaatagtaatagtactattgtgttaacttggattattatgttaatgttaatcttatcattagtctacaataattagtattgtgttattgttatgttagtctagctagaagatatgattgaaaattgtgtttgcctttttactctctcataatacttttattatggttatgttacgtccactgtgaaaaattaatattttatattatattaaatcaattcaaatgtgccaactcaattaattaatttttttaaatattattaaccatgtagataggtttttttttcttaaaacactcaaattaattgatgtatcatatttagattagtttaatacattatgatataccattttttaacagaagatcttatattagggtagattttgaccatcatataaatatgtatgtatgtatattccatttcaactacaatactaaacctaatattaaaaaatatatctttttattaattttttttacataataatactattataaattattaaaactgattaaattaaaataacacattacgtttaataaaataaacattacattactaaaaaataaaactatatttaatgtgtaaaatataacacacgcttgaaagattaattaaattatattataaatcaagatgaaaacaaagcaatttacagaaaaagaacacaaacatccaaacatagagaacaagaagaagtatggctattaatggatggattttcatttttttactaaaacaatataatagttattaaaaaattcaaaagaacctcaataggagaaggcaaaatgagtacacttgattgatccaatggccacactcttagcttttgtgatttcacaaataagttctaattttttataataacattatttaggaagcttttgttccattatacaaattttcatataattaattaaagattttgattttttagcttttatatcacttacatttattttatacaattatgttcttttaagattcaaaaatcacaagtaggacgaaatttggttcaagattggtctcaataaaagttttattggtaatattttttttttttttaatgtttagtccgtaattttaactataagttagctaagtatactcttaaaatagacactgagtttttttgtaatgatg

SEQ ID NO: 187518 - DNA, 2044 bp, Cannabis indica
tcttctttttttttcttttttgcctgtttttttgttcatacgattcaaaagaccacttaatgaatcatggcattgttataaaaatgctgatctatcatatcattcaggaatatttttcggaacccattgaacatattaatcttctttggaattaatttattaaaatcatattagtgacaaaaattaaaatgaattatcatgcgtgttacatttgaagagtggtgactaagagcgagctctataatattatgtacgaattactaaccgaaagaaagtgcggttggtaaaggccggttagtgtttctgccgaaatatgagagaaggtacgtacgtactaattatattattaaactaaatgatatgctaattattattaattatatattaagtaaatatactttttcacttatattaagtctacttaggaaataaaaaggttaagtagagtgtgcttgtttttggcttcaaatttatttaccgctgtctttgacatgtagttatgctttgtatgttaaaaatgaaattttatttctttgtcaaatattctttgatgaaccttttcaagaaagttggtatatacctttacattttttgtgttttattacaagaagtagttatgcctctaattatagttgtgagaatttgtaagtgtgattaagaaagtaaaatatatatatggtggtgtatggtaagatacatggtttattatatctcttatatggtgggacactgttccacataattaaataaatataaaaaattgagtcatataagaaataaactaatttagttattaccacttaattttaagatgaatctcattataaagtttctcacacattaatattttcatttttttttttttttttgatattgggaaataggaggattcaaacgtgaaagctcctctttataaggaaaaatgtataataatcatattaatattctcaactttcacaaacttttggtctttatatgattcaaactgtagctagttagctaataacacatctggatcatctgactatcgtaattcctcacgtgataatatgatgagacagtacgacgggcagaaagattaattcttacgtatatatatatattaatatttaatatgtataaatataattgtgatggttctctatatctcagacgatgactaattacatatataagatgtagtacgtacgtatttccatatatgtgttcaattattttatcgcgcatgtatactttttgagcatggctattggcaccacactgccttcagttactaattttttatatatatatttatttaattaaaatgtgaagaatccaatattaatgaaataacaatatgttagaatattagttttgccatgaaattagaaaatatatatagtacattaagattaatttataatattttccgtaataatttttcaaaaatatatattaatgtagtacttaattaatgatttttcaggagatatataattaataatggtcatttctcaaaaatgtattaatattagaacacacatatgctgataaaaaaatattttatcaaaggtctttccattccatatatatatagtactagactctagaaacaatgattagctgaaacatatataagctataaaaagaacaggaattaataaactaaaatgcaaatacaatcaatatatatacatatgtatatatatatatcgtgtataataaaatgcgccatgcgtactagttcttaatggcgtgaccgacaccggggctatggccaggagcggtgggcctgaagttgctggcggtgtggccagctggaggcggtggcggtggcggctgagattcaccgatgatcacagcctgtccatcttcactaggcggcgcagccggagttgcattattattattagcaataattgcattattgttgttgttgttgttgtggggtctgttgttgttatttatcaaaggtcttccatatatagatggaattccttgactcaatacaacaatgaaaagaattagtactacactacagctaaacaatttgcccatatta

SEQ ID NO: 187519 - DNA, 3287 bp, Cannabis indica
aattcccagtattcaacaagtaacaagttctctgtattaggctaatgattctacctcaacttccacaccgtatgctgtttgcaccgaaacctttggcccgcccacctcatactccagtagtttccctgaagcagctcctgatgcaacagtagcaagcctataataccatgttagaattggaacgaagcaaagcaatgataactacattgaacaagtctccattttatgatgataaaagtaagaaaaacatacctgcaaggaacaacaatatcttgttcacaggccacaagactatgaccattggtagcttcaacaatgctttccactcttaaattaagatacgaaacacctgactccacacacctaggaaaaattaatacatattacatatctatgaataccatttccacaattctcactataaagttaccatcagcaatttaacatgtataaatataatgtgcttttttttcactgtacaggctttgtcttaccttcttaacagttcctcgtgaagcaaatgacgactaactcgtccataagcacgaccaatcagaataggatcatcattgtcaagataaacaatggtgtctggccatacatgctcaatacaacctgcaagtccaagatctgaaaacaatgcatattttaatattattaaatctacaataatatctagcaaaagtagacttttttttatttagaataaaaaaataagaaaactagtaatataatatagtatttgagtagcttatcttgaatataatatatgtaatctagaacaagcaacaatataataaggcaaattttgtcacaacagttggttgacaggaagagataatcaataagtcattaaaaaccaaaacaatgtcaaataataatacatcatcataaacagctacagtattagtgtattagaaatcataaaaacaaaaaccaaatacaaagcaaggtacccttaaattcatcttcccaaacaccataattgtttgtgaaagggagatctggtccaatgagtccaacttttaatcctaacttagctgattccgcagctagagcaagacccgcaggaccacatcctatcaccaccaaatccagtattttatcaccaattgaaattgcaggaagctgcaaaaaaaaaaatatatatataaaaatagataaacaaataaggctttactacatgattccttaacagaaaccccaattttgaaaatgattaatgccagaattaaaacgaaactctaaaaaaggttgactttctcatgctaataaaatcaaaatatacatgtaaagtcatcatacaaagcactgtgtttaaccttgtcagagagcttagactgtaattccatggacttgttctgttgcatttggacgaaaacgagttcagacccacctccttttatgtaatcctcttcgtctgcgaaaccttgtttcaccgccacacaactctcactccccgcattggccatcactcgcagacaactacgcctgcaaaaaccatagccacaaaacggagcttttctcttcaccaaccctcctcttcttagcctcaaaccagacccaaacgacaccgtcacggccacaaagttccgagcaccgagtcctatactctccatcccgagcatattctaaaactctttcttcttcaagaccctaacatttatacataaatactaaataaagaaaaaaccaaacttgaccgagttaatgcaaagtctgtctctttctgatagtttagttctctttcagggggaagctctgtttttggcgttaatggcggagagagttttgtggataacaggggtgggtagtaaatgatagggaaggaagagaatgaaggaaaaggagggagagagttatatggtgtgttttaattttgtgtctgcgttgtcaaacaagtcatccgtaatatgacacgtggaggcgtttgattagttctttgactcggaaaatagctacccttatcgaaaaccaaccaacggcggcttttcgtgcatggtaccgtaccatggtccaaacacaaaccaaatctctttcctctttgaagaactgagtccaaaaaaaatatcagtaattataaattttcctaaggaaaactacaagacaagaaagcttttatttatttctttatgaagaaacttacatgaataaattgagagagtgagagtttagctaagtaggggaactaaactgtacattatacgttacgtggatcccaataaagccatttaatttcttttttagtatgttttatttaattagcatgatagtttaaattttagaccaaatatcaaatttagcaaaaaatttcaccaaggactaagcatccaaatttatatgcttaatgtagttctacatggattagttacatgtaatagatagatcaacatatttttccaatcattttccttattttctttagaatacattttttttttctttttttgaggagagagaatgtcattcgaggttaaaaaaaataccaaagtcctacacgcccaacgaacaaaccacacaatctcactgagagatgacacaaatatttcgaaggagcaaaaagttcaagacttacataagagcatctaaagggatagagcctcaaaacaaggcctaaggccaacgccacaaaggcatagagtgcacaacaccaaaaaatactaactaaactaaaatacaaaataataagtaatcaaataaaataaaatagcttccaagaactccccaaaacacaaaaaatactgcttgaaagcccaaaacaagcaggttaaaagcaaaggaccgctgccaacttcctacaagaaaggtccacactcagtctctcattgtggttttaaacagtgaagatgctaggacaagggaagcacatccctctaggtaagatccaagtctccccttctatatctataacactctgaaagttaacatccagccattgtgcaccagagccagtaaacataaatagtaacccacttatacactgagatttgaaaaaggaggaagaaaaacaacactcatagccaaagcacacgcttaataaggaccacacccacccattaacctcaaaaacgaatgaagagagccaaaacaagcctaccaccatcatcactatgtcgcctaatagagcgggaacctccgattggaggcaagaaccatctcaacagagacgatcagtctccaagagcggcggttggtcgcctacaagaacaggcaccatggaatcggtcccaaataacgatgtctgacacccacctgacgcaccagtaccaaaacccaccataagggga

SEQ ID NO: 187520 - DNA, 1039 bp, Cannabis indica
cttctttaaaatcgaagcacaagtatagtatatgttcatgtctaacttgggtgctaaacagaagatccatgtcacttaccattcttatgaactttgtcagcagatagtgataattcccgtgataatttgttctaaatgtcgaaatattcggttgattcataaatctgtctatgttcttggttgctacttaatataagatgatatgaatatggatttatcacttttgttttcggttcaatttcttttgaagttttaccttttttacaatgtcttttgattgttttgtgtttcttctagactcggttaacaatatgcgaaggacatgatggaaccgaaacatcaaatggggatgtgttgatctttccggacatgatcagatacaggttatttacgagctttttccttttctgttaactccggttagatttccactcttcacaggaaaccttaattcattgttcgatagttaagactgaccataaactcggttaatgaaacgcaggaggctgacacatttcgatgttgacacatttgttgaagaagttttagtgaaggagggtgaatggctacccggaactccagaaacactaaaaggttcatatattttcgtatgttctcatggttcccgagatcgtcgatgtggagtttgtggaccagctctggtcagtaaattcagagacgaaatagaattacttgcattacaaggaaaagtctctgttagcccatgttcacacattggaggacataaatatgctggaaatgtgattatattcggaccaaatgttaagggagaagtaactggacactggtgagaaagaacattactattattatgtcgaattcgtcgtttcttttcttttcttttcttacaagtttcaatagtaattagtagctgatgatcaatgctattacattgattatgtttatacaggtatggatatgttagtccagatgatgtatctgcattacttgaattgcatattgggaaaggagaaattgtagataggctttggaggtactattttctttctttctttct

SEQ ID NO: 187521 - DNA, 1712 bp, Cannabis indica
atatgagaatatattttagcttggaaaatttgtagatgtatattgtacacgccctttaaaaaagatgtgataaattaaattaaatacaataagattttagggttaaatttttacattgaatttgaattttagggttattaaattttttttgtttgcatttgtgttgagaagtaagtaagtttttaatgttaattttttttttaatttaattcaatattatttatttattataatatatgtatgaggattaatttttaactaatgtaattatttttacatttaagtccttatcttacaaactttccaattatgtcccattaaaaagtttttacacctacataatttttatattttaatctttctttttataagtttatgtaattttatacttagatattttattaatacatatatttcaaataattaaaataactatataattttcactcaaatgaaaaaggaaacaaaatcattaatgtatcactaatatatccaatatctagcatagactttcccacataaaaataaaatattaagaagtgtaaatatatctaaatatacatacatacatatatatatactagctagtagtagtggtgtgtctagatctatgtgatgatcacatgcatttgtgccttaaaagcacatcataaaatcaaatggtctataatttaatttactaatttggatttcaaacttcaaaccacaaaccacaaacaaagagagagacatcattttgtttcacatagaatttcgaaaattaattaatttattttttatcttttgggggggataatggtgtggttaccaattcaaaattgacacgtttcccacttgcaaaatttgataataaattatagacatttcaacagtatgggattctgtaccacactacccagcagtaaatgaattatatataatatatactatatgttatgttcgtttaccctttttactgttttttatctctgaaaattgttcttcaacaaaggtggaccaccaaacacaaccaaaaatttcaaaataattcatttcaatctttttcctctggccaagaatctttacagagttttttttgttcctttcttctccccccacaaatgggcctccccttaatattaatttaaatcaattatcccaaactttgtaaatgattgatttccctaaatgggttattcaagtttacacgaatcaacaaaagtgatttatcataagcacaaaaccatactactatacatacattatcaactcatcaaaggtttttctcactatgtttgtatttagctaatatatactcataaattataataatatatttgcatgtgtcattttatatattatgtataaaaaaaattctctcctagtattcctgccacttatctaaacttgggttcttataattattccatttggagcatgagaggtctcactagtcacatcaaaccctttttttctcaatctatatgtatacaatatttgtattgtgaagtttatattattattaggttattgctggtaattgtcacattttttttttggctcttactatacagtaaattcaaactactcttttatatattcgattcgatataatttatttattacatgataggaataataataatagagagatagtacttttgttttgatgtgtatataaataacttattcattggctaggtagtgcgtactattttgtatatggaataatt

SEQ ID NO: 187522 - DNA, 975 bp, Cannabis indica
ttattttttatgtccattatctgggttcagtttttgttaattatactgttatatgcatcaaaaaaagctacggtcaaatttatatgtgctacataccttgtatacttttgatcgcaatatagattgatagtgggaaagtagtagagatatgggaatagaaaaggatcataatcatttccttcccttttatttgttgtgtctaattcaacttttcctcattttatgctattgggactttgatcagaacacacagacacacacatatgctatccaccttattcttcttattggtttctgatagcaatatatttgtacttattatttgtcttttgtagaggatctgtgaaggggctttctgttttacttgagcctgtatttttgtcacaacgggatgtgcaagaactcttgtggatcagctttctcgccagctctatccattacccttctcatcattgatcttattgaatctggttgatgaaaatggtccagatgaatataaagctcccgtaaccaatgatgagctaactgagctgaatcaccggattcaagatgggaaaaaagaaagaagggagagggttacgagagaacgccaagggctctcagaggaacatgaatctaggatcaatgaagatgtgcaacaacatgtcagcaatggggagattggaacagtacaggctctggagaggagtcattctggccagcggaggtctcagcaacagcctcaaggacatttggttcgctgggagaggttcctagctttcaggtcgctaaaggttttattggtggaaaatgatgactcaactcgccatattgtcagcgcgctactaagaaattgtggctacgaaggtcagtacgtttcagcaacatgaaatgatcattgcatttctctaatgcagaagtatacactctatgttaatggctttatgtttgattattgacagagatgacttttaaagtaaacactgtagtagatct

SEQ ID NO: 187523 - DNA, 2367 bp, Cannabis indica
aagtgttttagctttggtgggaatactatttgtaaagtggaccacaaaatgtgacaatataaattatatccacatatgtaactagagttctcagtggtcctaatcagcccttgaacatatatacataagcattttaataatgttataggaatagtaaaacttttttcttgattatttcttaaatcttttgtttattaattaagtatatatatatatattaatattaggctttttggttttttattcatctttttggactttcaaactttggtatttttttttttttttctatatccctttttaggggattaaatagtcattctaacatatatgtcttcacgactctttctctctacgattatgatttgttccttttgctccttcttttcacactttaggccgatcttggtgcttgggattcgcggaccgaatttggccggtggcgtcaggcgtcttggcttcgtgctgtagcaggttgaaggcagagtttcctccattgggtagctgatgtgagcggagtgagcatttgccttctttctttcttcttgagacccacgccaatgcccaagttttctagcaagtggccgtcactatggtggatggacatctctgttgaggtgtctcaagtcggaggttggtggccgtgggtagctccggcctcaggggttggtggaaggcgacgaaggtgggcttctctgggctatctccctttcaataattttagggacagcgagttgtggtggtccttcttaggcgagaccttaggctttggattgttgtttctcttctatttttctcagatctctgtgttccttgggtttctatccagacatcttgactccggtgcacaatggctcatggttagctttcggagtgttgttgctgtataggaggagactcgggttttacccaaagagatgtgcttctcttgtcttagcgccctcactgtttagaacccccttgaatggcagagaataggcttttattgttggaagatggcattgtttctatcccttgggtttgcttgtcttgggccttcgagtgacctcctttgtgcgagggaaaagtcttttgaagctatcttatgttatgtttttatttagtttaaattttattttttgtttagttttgttagggtagaattctctgtcctttgtggcgttggctttgggccctttttgggggtttgtccccttcgatgcttttgcgtgagccatgagcttaacgctcctttcgatatcagcgtggttggccaacatttgagtcatcttctagtgagatttgtgcagttcctctgttggacttgtaggattttgacctttgtttaacctgaaatgaagttccccttcaattttttttttggacttattcaaactcgaatatagggcttacttattagatgtaatttcttcatttcttttcaaataatacaatttttgtcaaaatagcctcccatacacttcaaatctaactctcatgtaatgttcttcatcaaaagaaaaaaacaattgagactgaaaatcacttgtttttcaactgccatttgagtttttaggtgttgaatgaaatccaataatgactacattagactactgcaatgggtttatgaagctaaaaccaataggttaaggcgtcaagtttattcggcaacacttacgacaactatatatactgtatatatattatatatggtggtataagaatgaagttttttaaaatataaaagtttatagaattaatgtaattgtaaaaagaatcaaatatgatgtaaagagtagacgatagtgttactgtcaatctcctattataatttcttagtcaattttcgtgtccaaaaatatatgtcagaatatttttattaaattttttcatggcattgttcgttatacttacaacatcatccctgtaaatttttgaaaattttcgaataatttacagtacggaaaatactttttaaattttttgaacgtgcgtgttaaactggaatatcaagaactctgttttcggcattgtaaattattcaaaaaaatttcaaaatttacagaaatgatactgtaactgtaacgcataccgctattaacaaatttgaaaaaacaatattctgccatgtgatttcaaacgtagaagttgactaaaaattacaataagaaattgtaattagcaatcctcaaaaatagaattaaaaatattatgccaaagaaagttacaaaccagaattagtatggttagagcatgtaaggtttgaaaaaaaatcaggtgatgtacttgagcttggttcttttaattagaaaattttacacaatatacttaaaaatagatttatttttgatatttttacgaactttttgtagtttatatttttacggt

SEQ ID NO: 187524 - DNA, 3336 bp, Cannabis indica
acatgtgtattcctcagtataaattagtcagttttcccctccataacgtatataccattccattccaaaagaatagctagccaactattgagtaattcaagtttataaaatgcaccacgcagaacaaagaaatactaaaagaaacagaggttgtataatagaatagaaataagactagagtactgtaccccatttttagctctttcaaatccatgcgacttgctgacatttaacagcacaatgtcatcagtaacttttcacatatctaagaataattcacgaacggtaatgagataaaaaaaactatagaaagaaggacattcaccagcacttttcttctgctgttctcttttcttcttttgttgttcatatctatatttactgaaatcagataagaaatggatactatggtttagaatagatttcatgctctctgtccattaaccgattacttttccctttataaagaaattactttctaaaactgagatcttaggagacataaggatgaatcataaatgatctacatagatagctttgtgtgtgtatgtgtatacaacaaaattcttttacttgtaatccattattttgaggacgggtgggtctgcctccggcgataatataacctgcaacagcaaggaaagtataagtctctcaaaatacaaaaatcaaccgtaacttgcattaaaaaaaactcaaggtgaatgcttccatatttcatgtcaaaagaacacaatgacaatgaacttctattcagtttatatatatagtgtctaagcttgaactccatcatgcacttaataaactcataaccccacatacccatagcctacttagtcaacaataacaacatactctaatattcccccgtcatagaagatagagaaaaggaaagaaggccttcaaaaccaatgataaatcagtagctagttagcaacaattggaaattttcagattattccttttccattgaagttgccatctttagccacaaaagggaaaaaaggtactaaactttcaaaacataacattgtaatagctataagtatgtataaacagatatatttgagagagagagaaagagagagacgaacaagatcaagaccagcatcgtcagccatttgaacagcctcagacttagtaacgactcccacctacatagatagatacagccaatattaatcacaaatcccaaacttaaacacagttaaacaaactatctgattataaaacagaattcaaatatcaaaaaatgacaatgttgtgaatttttagctatgcattcataacagtagacacaacattaagtcactaaccatattctgccgttcatcaataagcctcacggagcctgacctattttcaaaccacccaacaaaaaacaaaacccacttcaatttcaactccaattagctcaaatttcaaaacccaccaaaaaaaattcaaattttggacaacagaagaagattaatttcgattaacctgatggtggacaaatcaagagcttggtcatcgtcggaatcgttctgcttaaaacgcctagaatcttggcccgagtaacgagacccgccgccgccgccataacgggatgtaattggagctccgcaagtggaggaaatagaaatgtgagaggtgaatttgatgaggtcagggtaacgaattttaaggccgaaaagtctggaatcgaaggaagatagaatgaatgaagagggtgccgctttggctggtgctgtggtccgactacggaccaatttaagcgaacagctggtggtgataccagccatggcgtttgagctcaactatgctacagtctacactgataagtggtaaggatttggcacattattgcttatatttttctccttccttatccacaatttttgctaatgagaagaagaagactacagaaggaagatcaagactattgggccgtaagtgggccgtgaagaaggcctgaaatatttctggcccaaagctgtagaaaaattagattggaaaatttgaatgtatacccactttttctattttcttacaaaaatactacatgccacgtgtctttatagggttttgccacatcaattattaaaaaaaaatcttcttttaaaaaaggtaattggacgttggatgtaactgtttgtaacagttgtttactttttttggttttaatctatttaaaaattattctttattatttttaaatattaaataatcattacataaatctcactgttcatcttcttctaattttctttcttttttcgggcagttattgtgttgtgggaagtttattttttttttcaaatttttctattattcttattactattattattatttataatactaaatctaacaaggttcagtatatattttagtcaaacaacctttaaagttatatggttctgttctcactcataaacaaattgatcattctaaatcctaaagtcttcaacctcactattatactctttgccaaatccatgtaactccttacaattattatcattcaccatcatctaatgtctctaaatccaagaagcttaaagtatttgaggtaaataattctaagtttacacgtctattgttcacaatagggaaagattcataggtcttgttttcttattttcattttcaagtttatgtcggagtaaaactgtcatatccccctaagtactaagtactcatccgattatagtgatcttggtaccgtcgcaaagctaatttggtgatctaaaaattttatgaagaacctagtttccaattcggtgctattctatatcaaaatttatcatctttccgatgctattatcatcttactcataattttagaaaaattactttcacttaaaatataataactctctcaattttgatctatttttaatgatctatatattattttaaatcttattcgattctcataagtttcatgaaaaatcttttgttaattcggagtcataccacgtcgaaaagtttgttttcttctatattatgttattcatgtcttgaatgttgtttttgaaaaactattttagtaatatataacatctctctgaatataagtctgattctaaaaattttagtatcatttaaaggtaattaaatattcttaaactttcatgaggagagcattccatagtttagtatatttctatgtcaaaactttatgtgtttgttgtctcctgtaattcactactctattctttctcagaatttgttttagtaaaactataataactctctcagttttaataaagacaacttttactgaatccatgtaattcttggttaaaattataaagaaattagatagtttatgtgttgaattgcataatt

SEQ ID NO: 187525 - DNA, 2856 bp, Cannabis indica
actcgcttttcgtcacggctttcgccgatgccgacaacgtaggctcaaagttcaagccatcgacgccgcccaattctcgactacgaatcaaactcgctgcagagttttatgattcaaacaagctcaagatcgctgtaattgggttggtaacttcggccaatttttgtccaagacattcatccgacatggtcacaccgttctcgctcactctcggtccgattactctctcacggcacaaaacatcggcgtctcttttttcaaagacctcgacgatctctgcgaagaacatcctgatgtgattcttctgtgtacttcgataatctccgccgagttcgtccttgagtcactgccgcttcagagattgaagcggagcaccttgatcgtcgatgttctctccgtgaaagaattccccaaaagcatgttgctgaaggcactccctggtgactttgatctcctctgcacgcaccccatgtttggacccgagagcggtcgccgcggatggaatggtctttactttgtcttcgacaaggttcggattggggacgaggaatctagggtttccaggtgcgataaatttctgagtattttcgctagagaagggtgtagaatggtggagatgagctgcgccgagcacgatcgattggcggctgaatcacagttcataactcacactgttggaaggctcttggagcggctggagttggattcgacgccgattaacaccaaaggatatgagacattattggacttggttgagaacactgctgctgatagctttgatttgtattatgggttgtttatgtacaataagaactcgcttgagatgttggagaggttggatttggcgtttgaggctttgaagaagctgctttttgggcgtttacatgatgttgtgaggaaacaactgtttgggaattcggaaaagttgcagatttcccgggaaaataacacggtgcctaattactctccgaatggttctgctttgtcacctttttcggatgctattaggtaaagtaacacaatccattgacttgaaaaaagaagaaaaattattctattcccctttttgtttgattgagctcgggaatctgaaatgctaggttgaaatacttgttagccaaaggaaaagaaaaaaaggttttatctttatttttaatctgctagtaatcaatgctgaaggtcttttctactagatgtagaattgggattctgtattctttacttgtgtatcatgtatggaaatggatttgtcaatattcattgtgatctttatctttcaggtcacggaaatctgttgtacccagtgataataaaatccagatttttaataacttagataaggacttaaagcttaagattgccattattggatttggcaactttggtcagttcctggctaaaaggattgtgcgtcatggccacaccgttttagcctattcgcgatcagactactcggatgttgctcaaagattaggggtttcctactttgctgatgttgatgatctttgtgaagaacatccagatgtgatacttctttgtacttctattctatcaactgaaaaaattctcatgtcattgccaattcaaagattgaagagaaataccatgtttgttgatgtgctatctgttaaagaattcccaagaaacttgtttctgcaaaatttaccgcctggtttcgatattctctgcacacatcctatgtttggaccagagagtggtaagaatgggtggaatggcctaacttttgtttacgataaggttaggatcggaagtgacgagccacgagtgctgaggtgcaacaggtttcttgatatctttgcacgagaagggtgccaaatggtggaaatgagttgtgcagaacatgataaacatgcagcgggatcacaatttatcacacatacaatgggaagaattttggaaaagttggggttggagtcgacaccaatcgacacaaaagggtacgaaactttgttgaaattggtggaaaacaccgcaggagatagctttgatctttactatggcttgttcatgtataatgtaaatgcaatggagcaactagagagattagacctggctttcgaatcattgaagaagcaactttttggccgtttgcatggtgttcttcggaggcaattgtttgagaacgctgaacctgaagttttgatggaaaaacctgtgttgatgctgtctgaaaatggtaccatgatccaatcttcttcggagacttataactttgagaaagaatgagttcaagctttctcccacaatcccactgctggtaaattaaaccgaaacccatccttttaggttttcacagctatattggctagtcttctgatttgatatgaagggttttctatcaagttcaagtattgtggtagcttgattggtccatcttcacagattaaatgctgtgcctccccttttgctcattgttccattagctgtattagattttgtgcagcaataggatgagctgggtgatgcattttaagtagaatattcaatacattatttgataaatttgtttaagagaaaaaaggaaataaaagttgttgccctctatataaattaagtggaggcatgcatttagcctgaagttttgataagtttaaattggtgggagggtttttttttagtgtttccttcatctgcggttctgattttggttatatgtttggttgttgtaacttggagttatatttttagaatgcacaagcacaagcacaagcataagctacattgacacatttgattcatttttgttcttcaaaatgacattaatgaaataataagaagtttttctattgttggcctatgtgagtagtgatcggtagtgctctaaatacaagttat

SEQ ID NO: 187526 - DNA, 793 bp, Cannabis indica
atagggggtgttccctccctccccttggataaacatatatagcaatttggctacatatcctagctctcttagctaatccataggaattaaaacaacgactaatttaaatcaaagagcaattactaaaagactgatacaaatccagaacagcaaaagacaaattccaagaactccaacccgatgggcattggaacaaaatatttgagaaatgatatgggacaacttaaaataccagtatcaaaaggtgtcatatattgtttatattattatgtaaaagcaacctgtgccgacgcaattcaagccagtaaaactttgaaatttaactgccttttggtgcaaaaaatttttaggaattgtttatcttaaccagcggaaatttgtgccggtaaaaagcaaatactttggtgggggatattctctcgagtacgaatattctttgttggggtaaattacttctttaccggtgtaaatatgcacgggtaaaagatcaaatattttggcggggaattctcgagtgcgaatattctttggcgtggtagatgactttttattagcgcaaatatatatatatgtgcctgcaaaagccaaaaaaaaagtaggtggaaaatttttcatttggcttttcagtaagaggaaaaacttttagcgacacaaatagtgaaacagtgggctttattttttaggacttttattattttgtgtaatgaacacttttatttgtgcaacgaattaatgtaccagtaaaaatttcttaataagacacaaaacgggtttcttcttcctctctctctct

SEQ ID NO: 187527 - DNA, 2288 bp, Cannabis indica
cacataaatatgtatatatatgataatgaaccaatggcaacaaaattaatatattaattataattatttattttgtttcgagaaggttcatcattgttaattttaaacaattcgaccgataatgtacttttttttttttgtcttgaagattatgacattacagctgtttatggttaaaatcatttcaaaatagtaaaacttccaaatttaattatttgactaaaaaaaatgtaaatgtaaatgaatagaaaatggttaaaaaaaaaaaaaaaacccaaaaaaacactaggacaacattatttgttgtcgttgtataagctatatatggagttatttaataatactatatgtgtatatatatatatattttatgaaactaattacttaattagtaatacaatggtgaagtattatataatgtactttgatttctaaaaaaaaaagtaactttaattttatgacaatattgcactttcacatcacttgactgttcattccaaaaataaaaataaaaaactataatggatcaaattcttttcggaacatactaaatgacctataaattatattatagttgtgaataaattattaaacacattactatatgtgttacatatatataaattataatggaaattcctttgagaaaaaaatacacacaaatgagcaaataagagaaaagtgctaaattaataaaaaaattaaatgaaaaaaaaaccttatattaatgatatttcgtgatgaaactaaattttaaacttaattaaataatataacaagtctttactctataattttttcaccaataaaaaatagatcatgtcgaccttatattacctcatctttttaattaattaggtcattaataaatgtatctgaagaattttttatctctataataataaagctccacactaaattaaagtatcaacaacaatacttagaactagctagatatatttctgaaaacaataaaagagatatgatgataaggttaatttgaactcttaccgctttttgtattgtattgtgcttgtattaatattatttcatataatattatatttgatattgatttatattaataaaattatattatctttatcataaactcgatcccctattcaaatttgggatttgagtctggagcgaaatcggcattaggatctgagattcgagaacagggttgctgtttatgccaggtctgggtcaagagtttgggaccaggaccgggattctcaatcccgaatattttgtaaatattataatacaaattaatacgaataattttttatgaattaaataatacgatttacattgtattaaaatttatagtcgtaataattaatataatataatattttatccaaatataatattacttattattgaataaaatatgagaacctgccaaaccagcacgtaattaactcaaacaaatactacaccgcaccacatatagtaaatattatctactactaaatttaccgcaccacatatagtaaatattatctactactaaattataactaagccttaattttcattagcatacatttagtcacaattgttactagcttggtataataaatttcgttatatatatgtgcaataaatatgtatcacattaattaaaaaaaattcatttcaacttcgacataaattaaattgttttccgaatatttagtccattaaaatttttcctcaaactcaatagagattgttgaatttgaaaaattccgttcaatgccgtttaattttattaacaaacgtttgaattggacaaaaattcagaattacaatttagtgcataaaatttgaatgacacaatgtagtacattgacaattaccatatatattaagcatctgttagtaaaattaaacaaaattttttgaatttaataatctcaataattcaaacaaaattaacaatgttaaaaatttaaaaatataatttagcctaattagaatttttgcccccctaaactttaacatgtactaaattatgcccctgaactttttttgctattaaaaattcctcctatactattgagattgttagatttaagaacttttgtctaattttatttaattttactatttcagttattgtttttgtactaaaccatgctccacagactttaatatctatcaaatcatgcccctcgaactttgacatatactaaattatacccctgaattttcatatatgttaaatttttttattaaaattacataaaagtccttaaatttaacaatttaaaaagttcaaggagcatttttaatga

SEQ ID NO: 187528 - DNA, 2120 bp, Cannabis indica
tagtatatataaatgagtagattggatttgattgaatacttttacatttcaatcaacattcaatacgcacaaatacgaattttagattttccaatttgcactaatgcggtactttacagattagattagattaaatcgtgcagattgtattgaattaagtattttataaacaccccctaaataactacaactattcatcttgtaaaacattattttattattttataattcaatctctatcttcctatattaaataatataattcaataaaaaaatatggtgtagaaaaaaaaatagtgcatgtaatataaatgtgtaaggttaaattaagaaaaaaataataataataaagttttagtaatatattttaaagaatagagtaaagaatcttataagaatttgttatccatgattctgaacaagtgaaataggacataaaaagggaagataatctcataatctcactaattacaacccctcaataaataaaaggaagattatatggttgttgttgattgttgctttacattgtatgtgaatttgtatttcttgcttgagtctttgtaactcaagggtgctttgcggtgcacataagaaaaaaaagaaagtaaatcagccatgaattagagattttctaacgaatgtatatattagttcccccgacatactgtgcttaattaacatgaccatagttttgcaatattttggctaagtataaatattttgtaataaaataatacaatggtacttttgtaaaagtttataaaaggggatccccgagctttataaattttaaaagttaataaattataatttcaaaattatttaataaaagtttaattaaatcacaatttctttcctaaattgttagtttatcataatgaactaatttataaaagcacacacgacgtgcatttacaggttagggcattatattgacattctccttctcaaaattaatggcacacatacaaatgtcactatcaatagtgtgtcacttacacgcttactcatgaactgggcctcacctactcgaccaagtgactaatattaaattgtatttactctatcagtgggcttaaagcaccaacaaaaacttttttaggtccagattcgcccgaccaattagccaaaaaagcctattactatgtcccttcatgcaaaggattaacaattttatgtgcaaaaaatcagttaatactccacaagcaaagagcttaataatattgatttgtggattaaggctcgttaatgccccaaccatgtaaaaatctttagctcaatcttcttttgattcgattttcgaaaatctcgataaacaagattcaaaaacttgtgtggagtagatgctcaaggattaatgcctgaagatattttgatctaacttttcatacaaagtatatgtcaatttagcattttatttggcacttcaaatcaatcatatatgcttcatacttttacatataattaatcttagagcactctcaatggctcatttaaaataaagatttttaaaatttttaaagaacaatgggacaaaaatatcttccaacaaatgatgtaaactcctctcttttaaagcatctctattttattaaatacttttctacatgtagacaatcactattcatcatttaaacatattttgataatatttcaactatattatatttcattttattaatatgtatcatatatattaaaaaatatattatttaaatgatacgaagaaaatatagaaaacaataacaatttataaagttagatttagtagtgaaaatgttaaatctaatagttacaatttagatataagaaaatatctatttctaatttattcttagtaagtgaaataaagatattttactaccttctataactttgagaatttgtatcatatatgctatactttaaaatgatgtaaaacaaaaaggtggtattttagtgatatattttaaagaataaagtgaaaaaatgttaagagtattcttaaagttggtacttgttaatttatttctcgagggcaatgaaatgaccaacacattagcaaaagttagtattaaagatgattatgagaaccattctgttgatgtaatgatgaattataatgggaaatttgattt

SEQ ID NO: 187529 - DNA, 2981 bp, Cannabis indica
gggttcttaataaacatgggaggtcagttatagacatgtagcctaaacaaattctcctttacaaccaaaaaaaaaagaaaaaaataagcaatgggaaaagaggaaggaagatgaaaaaagtaaaggttgctataaaactactcaatataaactagtcttagtcaccatcgcgttaacagcaacaactatttacctggatatataccatagataatcagaatagtcttttgtcacattcaaatgctccaatataccctgaactgtaaaactatcgttgctccatatgccaattgactctttaacggtcatccaggattttgtgacatagacactgttattcttagtcccaaattgttggcttaaagagatatctgaagaaagagacaaactagactctactgatttgactgaagtttgtgctgcaacctactcaagcatggaaagaaaaagcaaaaatacttatgagaaaggctgggctaaaatcattaacatttccatattatcaagtaaacaaaagacaggaagcatgctcaaaatcaattaattggcacacttcattatagtatacaacaagaacaaagaccgtactccagaaacccattcgaaaaattggaatgtacaacagctaaactatctaagatcaaaaatgggaagagagatgcatatatcttataatttcatataccatcctcttgttcagttctacaaggtttgcacaacacattaactaaaataaacattcaaataatgtgtcaagtcaactttgaagaaaaaaatctctgcaattgagttccttcagcaactagatacatagcaggaagagagcttttctcatgctatcaataaatttaagatgacataaaatagtttaaaagaaaaaaaagttaacttctttaaaaatccaccaagtcaattatacatactaattggtcgtttgatctcatgtagaacaattaacaatgaagagtcaaatatatagattaacactcagattcaaataaatagattagcattagataggatacataggtaatagtgcattgatgcataggcaagaaatgcttaatgcccattcattaatagtaagtgcacaggaatagaaacacctacctttgcagagttgaacactgtgtttttgcaatcaggtaaaatactaactgaccaagctggtaaattatatttctgaccacggaatgttacagtagcagagttatgttcatcgatatttgcaagaaaagcagagcatctgcttttagtttggttcaaactgaaatttaggtcctcaccaagcacattttcactatatacatgggcctgcaaataatcacagaacgattcagaataaatttaggacctggacacatcaaatgctagcaaaatcacatgaatactattttattaatggcagtcgaagaacaatctgtactagtacagtatctttttggaaagtcgcaagcatgagaggattaagcttttttataacagactttaatgatacacatctaatcccaaccaataaaataaatctctaacaagtatgaatataaaatctctttacacactctaaagatgatcatagtgatcgggaaaggtaagtgctaagttccatgtcatgaagtaggcatacgtgacagtgagttttttcttgtttctataatttatttttcttttctatttcaattataagtcatcatgtgcccacataaccaaaagttaggcaagaaaaacagcgggtcacaccaacctcctgctttggtcctaatttaatatactggggtgaatcagcagcaaccagagaaggttcacagagctttatagcagcatgcagatcctttagatgtccccatttaggctcactcagtaagcctacacaatgaccaaacgtgctttaatctaaatattttcgcacttattttcctttcgattcagaatatttatatggaaatcactctttcctcaaatagacaaacaaaaaaatccaaataaagcacgaagaaaaataatcaaaagtcactaaccatattcatcaattggagcatcataatcataactggtaatatagaacggtccgccagaagtccgaccaaagtttgttccaccaaagtactgcaaccacacagatgaccagtgatgcagcagaatgcacatataattaagaatgaaaatatatatgtatatatatgaacttgatggcataaagtatgaaatttttttttaagaaacaaaaattggtattaatcattagactaaattataaagtaataggttcatgtttgcatcataagattgaaacatgaaaccctcaaaaagtacccaaagtacaatcaaaaaagtaagaatgagatctaaatttgctcacaaaagccgcataatttttcccatccctgactaaattatacccaggttgccacccagagttttattttatcccaaagaaagtcttctgttactgctttgtcttacaaaaattctgctattttcatatgccaatcaccaatatatgtaagaacaaatttccatatgttttaacatcactatataccctgaaagtgaaaattttgctttagaaatttggctggtgcaaagtcaatattaccataccatatagtagttctgaaagctccctccacgttggtaaaagcgtgcgactgcaaatgcaaggtcttctacaggtctgtgaggcaatcttccaccccatgtcgtatacctttaaaacagcaacctaaaatgataatttatcgcttataaagcaacaaaagttcatttgtaaatggaatctatctagtgatagcttgaaatttataaaattacaagcattacttggatgacagcactacatactaaacgacaaatagcataaaatcatgcaagtttagggaaggggagggggggaaccatcttgcgaaagctgaagtattaagagaaacaaaacagacaaacaacaaaaatgcaaaataatacatgaagggaaaaaaaatgaa

SEQ ID NO: 187530 - DNA, 7156 bp, Cannabis indica
gaagggtgatccgcgtgcccggttcaactcgagatcagtgagttttgggtcggtcaggccttgtaccatgtttttcagttgatccaattgtgcttgcacgaataaatgaactggttcagcttgtgcccgaactatgtcacattaagatctctttgagctggatcttgaatgcagatgcctggctggacagttggtgtgatgtactattcgttcaagccccttcttctattcaagtcacccctgaggtcacgtgtagcacccaacctattaaatattgaggtactaagtggtctcagcatctgacttgtttgaccggtaggttgggcaaaaattttagtcgagatcaagtttttaggcgtaactccgcctaaagggcggtcaggaaggatctagccatctaccgtttggcccataggttggacctgtggtcgtggattggttggcttaccattgtgagtttgggcagtatgtccagcaacatactcttctgtaactagacgcggtagctagttgttgattggcaacttggtaggccctctttatcagtacgttggcctgcctcatgcgatcgtcaatggctggttgctgagcccttaaagtttccatctccctgtccctccactctataaacaagcatctctgctcgtgtaaagtgaggtttatagcaacataaagatccttatgatcatagtgaaaagcattattatggccttgcatgagtccaagggctagacggaggttttggctatctatatcatctctgaccgtcctttgagcattagtggttgacgagactttcgtgttgggagtggattgatcgggtgctgaactggtattcctagtctcttgcacacctggtgtgatcctagccagaggggaagtcacacgatggcccacattaggaggctgtgtattagcctgtttcgggtttgtccctagtgatcctctcatgttcgtaggggtctatacgttaagatcgatcaccattggatcggtctgatcaacgaggactttgcttgtttgcaccaccatcctgtatgcctgttaaaacttaagacaaacagcaaacttgagttcaactctcaatgaaagcatcaaaacgttgacctcacttttagccaacgatagtgagtcaattaataagcgattaagaatataattaaaatagagcaaaaacaaataagtaataaagaacaccaaattttaaagaggttcagccccgtgactgtggtaatagcctactccccttggattgtattaaattgagataaagaacaaagtgttttcctctctcaaagctcttacaatgaatctttgagtaattatcttagacctctctctcgaaagtaattcttttgatccctttctcagtgaggtcaagtcactatttatagggccttaatgcatgagggtaggtttcccttttgcttacaatgtataaaataggaaatcacatttattacattattataattcacgaaataggaaaccagaacacgttgccatatttctctaaattgatcccacgattgtagggattgcattcgtatctagactcgacgagatcattctgagataactaactcttgatgagtagttcagcaagctagatttatacttgctcagatgatctgttttttgtcctgcgtgtgtaagcaaaggttatacatgcagacgtacaatatagagtctgtttgggaccttcagctctgcccaagtaccaaaaatgtaggacacgtgtcacttgatccttctgccatgtcgttatgcaaaaaattggataacaggatgtattgcctataattaattattaaatagtataaatggtaattttatttcataattaattatcattaacaaatagatagagttattatctaaataactagaattgaaaaatggcattattgaagaaagataagttttcttcattaaggaggcaaaataatggcaaaaatctaactcatgggccttcataaccggttcagccatgagggtaattttaggtcgttggatctttcaaatcatcccatttaattaaaatcgtaaaccttatgaatccttgtaaatagaacataatggcctttgattcaaaagaacaccttttggactctctcttgtctaacaaattcaataaaaaagagaacctattattttctatgtattatttttgaatttctctttgtttttcctcttaaaatttgttgttcttggtgttaataaattgcccgcacatttcaaagcaatactcagcatagtgaggtagattgtcttgttcaaattgttaactgaaggagaatccaagttcagatcttgatcatgctctgtaatagaaaggatcaagggttagagagctgaatggaaggagtcatattattccactgccattaatataaagttttcgataagttttgtgtgcttatttcactattttaggaaatttatatttaggatgttagattatagaattataatccaacatacatgttagtaaatctagatcttggtaaaagattcccaacaagctgttgatcttttggtccatctcccagatggaaacattgaatgcatgtgcgagaggtggagtttcggctttccctttccctttggatttcacaaataccccagataaaacagcctttgggatagcctctaaggaagttccctgttgtagtcctccatcaagaacctttctctgagcttcctcagtgaccacttcctctgtaggagcgactgcaaggttttctttaatgtccaccgcttcgagattgaattcttggttcaaatgcatcactggaaaaatggagaggaaataaaagttaagcaactagacacccaatatccaaatgatcaaatgggcatcggggaaggcctcccctaaaattgcttggagaggtccctgctggacccatcactcctagaagcctgtctttgctagacgactagaagtgatagaatgagaacctagggaaaatataccagaacaaaatctaaagaaaattctagaaattaagtccattcggagtcataacaactccgaatcgacatacaaaagatgggcgaacctaatactccctcaatggttcatcatgcttggttcaaacccaaattctagagtcctaaaaacatgaaaagtcctatagtgttcaaatgaccatgccctaactttccatactatatcagcactcccactgtacaaaaatttccacataatcctgtcctagaaatgtagttctacggtcaacatttcaccattctaacatgctagacatcctaaagctaacttgaactaagaatttttattctaaatacaaatagtaaatattcaacaaagcgtcgggatacttacttggtacatgagtggggaatgaaagattgttgtggaaatcctcccaagagtgttaaatcgagttcatcacgcaattgtagctggcttgaatgtcaaaagctttgtcttgcttggagtggaacagtttggggattgtcagatctgcatctagaaatcgagctgcacgaagatttaagaaatattggattaggcaatcaagacttcttgcattcacaactagaaattattgcaagatgaaagtttccttgaaaaggagaagctctagttataaattcaaaatggagatttgaaggtctgaaatagtggaaaaagaaaaaataggcttaacgaatccatttatacctaggtcaaatccatgcaatttaaatgaatggcctagatcttctctccaaaaaacacaagttgatccaatggatgggaagttaaaaagatggcatttaaaactttctcattgcgtttatttttcatcattgcctgcctcaagtatcgtacacattaaagaggctcatttaaatagacttgtaatcattgaacttttttccaagagacgcgcccgctacacgcacattatcaacaaatgcattaaaagcacctcatgtgtgtcacaccagtggcacctttagtttttagtcctttaattgatgaaaactcaagggatacatccgtgatcccaacaatcaccacgtgtcaaaatactttctctaagagacagaagaagactgcaagctcgcacaactcaaagagtccaaaaagcttgggggtaaatattatttgtgtttctaagaaagtgacacatgacataaaaaagaagagataatcccataatctcactaattaaaatcccccattacaattctatcacagagaaggctcatggaaccaagagtaagtcaagactaagagataagcataagtctacctcgcctcatccttacctcctagacacggaagatatattgtctctctaggacccagagtggtccaaacttagagtctacccatcagatactcagatgggtactcaaaggggctgtcgccaacactgaccgcccaagagtatcgcaaatatctaccttggatgcttcccagatcacccagggacagttatgcttttttttgacacagaatcatatcttggccctttgtccaggcatggtagtgcacgtatctcatccacctttttgccagatagttattccaagtctttacttttaaaggtcaaaccttttgacgacatgtgtccactacatacaatggtctcaaattttctagctattacacgcacgagtacaattgtttccaaggggcccaatagtcatctcttttttgcatgtaattttaaccattagtgagaatttggcagaaaccctaggcaattcgtaggtatgtccatgcccgcccttagcctataaatatctttctatttccatacaaaggggtgatagcaaccacaatagttgaagctctactaatatttttttgagtcttattcttcaagagaatctaagaacacaaagttagggtttcttgcaaaatattgtaaactcatcaaatacgcccttggaggctaatagactgactcgtggactaaggttaattaacacataaaccacataaaaatatccatctcatttatttttacattttaccatttctttagtttttgaaaatctcgatcaaaaactagtttctattgacctcgcttttagccaacgacagtgagtctaaatagtaagcaacaagtagtataatatgtgtgtataatataataaagtaaataaagacacgagaattttatagaggttcagccccgagcagtttggtaatagcctaatcctctcggttagtattgacttaagaacaaggaaaataatcccttttcttagagcacttacaatagtatctctgaatatgacttcttagataagtttttccccttttgcctagtgagtatgaatcactatttatagggctataagctttggagggaagactttcccttctgattacaattgatataaatggaaagattgcatattaaatacagaatacactaataaagggattcagacagcttgccatatctctatgatctgatcccaaaattatagggatttctttggtgactcacaatgcgagaattgaattcgctaagcgttggcgtgctgttcggactgctcactgcccggttaagaaggctttgtctgagcgaatatatgtggtgccttgttcggcatatctcttgcgagaagatacacaaagttgattccatgtgtcaccatcgtgtgatgccacatcagagtgtaaaaattgagacaacatttgcccccaaagtctatacgggactttcgaagttgcctgtagacttcatctgagctgcccttgcgtttgaatgggtgacacatgttaggcgcgtttgtttaggattcgatgtgaggctgaccaggcgtctcttcagtttttggcgaattaatgctctgactcaattaatgcctcaaaacctggttttctctcaccacgtttgacggttacacttaattatatttgattcttgatattttcttttggggaaaccgatacgtccaaggcatttaaaatgattaccctttcttcatctttctgcctataaatagggttgtgcatccttcacgaattcactcttacaactttctccattaaacaaactcagagcaaaaagaggttttcacttcaagtctgtcgtgagatttctacaaaagcatccgagaagcttcgtttgcactgaactcagatgtcaaacagtgagtaagttttcaattccttcttctttttactttccatgtttaatttttgggtttcgaatatgcgttcttgaccttgctatataccataggtggaaaacctacgattaaaactttgccattttctttgtaataatctttgagctttgcggttcatgacgttggccttttgatcgcacattgtctatctttcaccttgcatattcaaagcttcgtgaaactttgccctaaacccaaaaattttgatcttctgggttttgacttatttttgaatgttttcattcttttaaatctgttgcgtactcctggtcggcatatttgtctatttattgttcgatatcccgactaaacactcatcttgtgtgttattttttgtagatgaacccttgtgagttttggggaagcaaacatcgaattgaccaggacttacatcaatttctgtacaaggatcaccctcatcttcgtgctagtccgtcctcttcaagtgacggactttccaattgaagccttgaagattgggaagtgagtagtgaacactcttctactctagaacctgaagtacaacagcactactactctgagcagatcgttaaagagggatacgaccacttcatttgggagttgaagaaaggttagaggcgctatctgccgtccaactggacatacgttgtctggccatatgctgctgacactttgcctgctagccctccaagttcgaggaactttggtattccctttgctgttcctgccgtcatggttgctcgacattcaccttagtatccgtccagtcaaaggatgatggctcgaacaaagaaaacgatgtgtaagatcaatgcatcaaatcctcacgtcgcccagctccccacactaccgagcgccaaacaagatccacccgtcctggaggagggggatcatgagggagacattaaagtccaggaaattgaggaataggacgatgtccttctaggcagcccttctgaggctgaggaagaggagaaggctgaacctctaaattttgggggataca

SEQ ID NO: 187531 - DNA, 1102 bp, Cannabis indica
gctcgagtggatcaagggggcttcgatcattattttttgcacttagaaccttttaagtatatcatgaagacttatgttgacaggatagataaaattattaatagtccaagtaatctcgagtcattgtcttaaatgattaaattagatcatattttgtcaatgtcttttctggggtttagagatcatggaaacttgatggatcaggaggacatagttttattcactgacgaaaagccatttaatgactttcctaacggttgcatctgcgctagagttctattttatgctcatccttgatttcatatacttgcttttaatatttaaattttttctaataatgttgtggatttttcttgttgtagagacaccagagtaaaaaatattgatgtcaattgtgggctccatcaactaaaacattgcccaggctaaggaatcgctgggagccaaggaccttaaaagattgctggaggtaaaggcaagggtaaaagtacaagacagtaagaagggcccataaaccaaggtctccaagcgctcctcccaccttcggtgcctgggggtctccacctgttaacaagacctttgctagggtagagaaaacccatgtgaacgtgggagagggatcccgagaaatttcaagtggtggaggagttttaaaggttctatgtaaagaccacttagttttaataaagaaattagcagataattagggcttaattatgaaattagattattaattataatttatgaatatatgaagatttatttaaatttagggtgtattatgtatgttatatatgaaattttatattttccatgttttgtgttcgacaacattggaacatagcattaggccaataaaatcacattttagtaattttgtattagtgaggtagtatagttagacattgggaatgtcaggattatgcaaggattagaatgaccaaaatacccatatgtgacaagtttgcttttggccttgggaaagggtacaatggtctttttggccttttattcttttgtctgttagggatttattttgtaataagaaaattttaattattaatataggataattatcagattaacttattttgcaaaaaat

SEQ ID NO: 187532 - DNA, 5085 bp, Cannabis indica
agatgatactaggttctacattgtcactgaacgaccgacttccctgaccaaacagaaattctcagataagagagtatcttcagaacacatcatcaaacacgtaggccgtatgattactacattggagaataggacagagcacttcagcattaattccatccatcatatatatatatatatatatttcattcacccattttaatctcacatctaaaatgttcaattacgtcaattcaattctcactttgaaaacaacaaaaaaaaattatttttctgctacaattcaagtttcgaacataaagtattacaatacaacaataccacttctttgtttgcctcttttctatatcattgtcagtttctaaatcatttccattttactcttcacaaagttggagaatgcaactgggttaataaagctccactcaccagagacctagtaataacagctcgagaattctggcttttctctattggcttttcaacatctgcaatgccctgaaacatataaagcaacacttgaatgtattcagtgcagcttttgattatccatgagctcaaaaaggacataacattcaattctgaccaatctcattttgccagaaaaacaaaaacaatacatatatgtacttaaaaaaaaattgagagagtcaaaaaatcctaaagcatacatcatacaacttttttgtaaaatttatatcaattcaaatgtaaatataaattttgagaactgactcccaaagattacacagggggaagggaacaatcctgctattgaatctcattataagattccacaaatcacttacaaatttacaataagggataaacacagagataagaactttgcagatgatggaggtaccagattcagcaaattcatctctttattaaacacacacacacaaacacacaagagactatgactttgaatcttcctatcagagattgctagtccaaatgaagttgtcatatttccatgccttgagcatctcaaacaaatgtctcttctgcttaagtgattgattccagagctaatgatcacatgacccaacttcacattatttcacacgctgtccaagaaaccaaaaaatcaaggttgatgatggtccactagcctccatagttccctaacgttgcatgttccaaattatatcaatctattatctattcaatcaactcaccaaaaactttagttgtcattttctttattgtgtgtttctggaccatattacagaagatggacccactattttgagttgtaatgacaatggtgaccataccaatgatctctttatctgacctctatctctcatttcataaaagccctcagcacacactgatcaaatctaagtccatcgtcattaataagaaaaacaaaaagaagaaacaagacattttctgtactttttaaagatgtaagtctaataccttcccactgtggggtcagggtggttcttgtgtttctaacatatttaaaaaaaaattggttatttgtaccgcaagtctcagaagaactatataagttttagcaagtaagtcctcaattgacaaattagtctccaaatataaaagttttagcaagttaatcctgaattttattttttagtaaatggcccctgaacttttagtttcttggtaatattaagtccctactgttaaatagtagttattgaaaatggaaaagagactatatagcctcctacagtaattgagagcctaagctctccaataatgctgaggaaaaccatagttctagaataatctctcactcgcatacacactatatgagcgggtcaccctacttgagaattaccaaaatacccctccactcactcatacaaccagctagccaaaaactcgacttaccattgtacattctgtctattccctctcctagcataagtaaatctaaaaatgtttccaaatgacttggttatttctaatgaagaaggaggattatgtgagttcaatatctctcaccttccacaacaatatgatacaaacacactttggggttcagatgaaaatggatcgttttgataacgtgataataatttaaccaagtctgtaaacttctctttgttattgtaataagaacagccttcaaaatttcaactaatcacccccatgtggctttaggaaacttattcatataatctatgaaaattatatagtttgctgaagtggtagtgcagggcttgtacctgttgtgatctcaattgctccgaagcaagctcaacagctttgctgccaccgagaaaatttggatgtgaagaatttatataatccatctttaaaaaaataaaaagaaaaattgattaatcagcttagcagttggatctgtaatgatatacaatattaagaatcatgcatctatgatatacaatatagaattgttacttatgtaatgctcaagataccaaaggaactaacctccatctcaatagatttcttatcattctctcagcaggctttacaccatcacgtacaaactttaccataatttcatccatgcgccttctcaattttggaaacctttgcaagtctgttacttcacaagcacgactaatctgcaacaaaacaataagcttcatgttaatatataaatcttccaaagcattacataataaaaagaatctcacctttatcagttcatcataaacatatcgtacacactgaagactagggtccaacaaccgagaaatctgcctcctaaccaaaacttcaaatggggcctgagaagtggaaaaagtaaggagttatttttttcaaatgcttgtcctcacaactcttcagcagggaggaaaggtaagatgcattgataggtgcaacaatacagcatatgccatatcatactctcacctctggaatgattaatacatttctagcaccagcagcattttgaatagctatccgaatatcatcatcacttaaaccctcacaaggatcaacttcctacaattacatagccaaacagcttgctcatacagtaacaccttatttttaataatttatctttgcaccatataaatcagtgcaaacataatcagtgatactttcatggcaaggggatattaacttaagtaatagaaacaatcatgaccttagcgagatcgtagatcttactaaacataaaatatttgcatacatatgttatcaagaagcataaaaacaaagcacaaagttgttattatgttgaaagtatacctccaagctctttacaaaaattgactgaaatatataaaggatcctggctccacctgacaattctttagttgatatatcctgactacttccatccaccaaagcagaaaaatctgttaattgaataaaacagtattagaaacgacaataagagatttccagtaagaaataataatgaaataacagaaaccaccagactatcaagattttaatattaaaaaaattacgaaaatagtgctcgagtccaatgcacattctataggttacgaaaatgacagaacaaaaaaagaaactaaattatgagtagcccgataacaggttattgaaagtcaccttcacaatatgttgacaaaatgttcaacaaaattactcctttttccacctggttgatatacaggacaagccaacaaaatgaattggaagaaataattgtcatggtatggtagtgagacaaggcaaagtatagatttttaagaacaaacaaataaataataattaatagatgatggagaaacttttacacgcatctaagaaacaaaatttgccaattttctgaattcggagttcaaatgatcattttcagattttagacatgtaattatccattttacagttgcatatttagaagcaaacattattggagatccaatttccaaacaaatatgacatgccaagcatatgcagaaagccagagacactctcataacccaatagcataacagaaagaattccgccgattacaatgcaacttacattagcctctacaacatttccatatgtctgaagttctttagcaacagcaatcatttttgagttcagctcagacttcaaacttgggagagccattctgatatgttgttccaggatctgacatgtgaacaaccatgacaacaattagaaagaaaatcggaacaagtgaataacaactgaaaaagcaacctaaaaatgggaatcatgcagtattaatgatgcaaagaaaggagttaaccaacctgattcagcttctttgatagctggggaatgccacaacaaccagacagaccactatatacctttaatatgaaaggaaaatgaaaattgaacaaaatttaagagccaaagaaatttaaaccattcttcaagtgaaactggtaagcaaaggaagtgcaaagtacaggatgatcacgaaagaatttctcttcacgggaaagagcatcagcaatgctacggtttttaataatgtcctgcgactcagaaaaggagcagagcaaggcatcagcttaattgcatattcctgacaaataaaataaaaaatcatcaaactggtttgtccatatccataactagagaccacgcaccaatgaatgtgaccttattattaaattttcagtatcaaacaactgtttaatcagcctgcatctcacaactactagtatatactagatgaagagcaacctgtggtgaccacataaagatagtttttacaaaaggaaaggtatgtgtacataaagatgtttgaacagatctttttatacaagtcaacaatagtttctgttttcatgtcttaccactttccccaagaaaaataaaaaagttacctcttggctccgattaataacaccgatgtaaccaaggcgaagtggaacgactttcccaagcaaaaagttgcgggcatcagttcctcgatccattatatcaagctacaaagagaaccacaaaacaacattatagcaactcaagagtacaatcaagacaaatactaaagagagtgaaaagtatccttcattttattttgaaaagaaaataaacacacctttgtgattacaccaattgttcgagaacctgttcaagaatcatgtttggcacaaaaatttaggaggtagcacaaaaaacatagag

SEQ ID NO: 187533 - DNA, 2445 bp, Cannabis indica
gctagcttttgagagtgagttctacccaagtgcaactaacagatctttaatttaaagatcaacaatcagtagataggatcgaattctagagctttgaatcgttgggttgagatgtcaatttaattaggtcttttttttttttgaggaatcaatttaattaggcttaaatgacaaaaaaaaaaaaaaaatgtacacattgactggtagatacctgctttgattgcattaaaggagccaggcatgcagagactgctctttgaacagcttctgaaggggtgttcagaacttctaacaatttctctacaacagtatgaactttagggtcgtcctgaatcaagaaacggatgttagaagaaaaagatcatttcatcaataaaaagaagtgacaagacacagatgttagaacaaaaaggatcatttcatcaataaatagcaggaagtgacagacagaaaatgaggttgaggaataaaaaaaaaatcaacaccttcgccaaatgctttgccaatgccccagtgaaaataacaacaccctcacgaaccaaatcatatttctcctcgtctgatgcctaatagaagagaagatgtaaaatataaacattaaaaaatatatgttatacaaacacatacacaggaaagtatacacactcttcgcaaaatataacactttattcctccacttttgactttttccagtcaaaaatgagagcagctacctaacaggtagttttgaaaacagaatatattgttggaaaagaggacctacctttttgtttaagtagttctcaaagatgggaaacaataggggaacattttcttttccatgcttatcgataatcatgatgccagcattaagcattcttcctctaacatctgcattaggatctgcctgcacattcaaaagcatacagaatgttaatgccgtcagttttctccttttcgaggaaagaatcaacggttgaaataattgttattcaaggttattgaaaaaagcacaccaactagtataaacacaaagcataaaattgttttttgttcacctataaaagttttcaaataagagaatgaaatattaaaacaaaacgaaacacctaccagtgctcgtgaaatcagaaatgttatgacaacaggaaggtcttttgttctcaaaacatcagcagcagcatgtaacgccaaagcaactccttgtcgacccagccaaccagcatcaagattatcatccatgaaaccagaatctcggatgtacagagaaaataaggcagacagagattcctgaataataaaagactttcaataatctacagtgctaaggcaaatgaagtatgtcagatcaaacataaacacacctgtatagtgtcgggcgattcatccaaagcagcagctaatgcctcggccgcagccaaccgcacattgtaattaatgtgggaaagagctttaaaaagtccagaataatcagtcccaaagtcgtacccataacggtcccatatatcttccgctttttctgcaactgactgaagagcgatataataaagggacaaaaaccaaaaccagcaataaaggacttgaaaataattttcccccactatgttgcctactcatatcttaaaatttaagaaaataaaataaagcaatggaaaggaaacacaaaatttcctcaccctgattattgatgagctgataacaatattaagaactctccataaatcaatgtaggaaacagatacttgaatgataaaaaaaaaacttgaaatcaaatttgatatagattactctattaatgacagaacaatataaaggccaaaccaatcctcatacatgacagtgtaattatgtaacacattgaaaatttagaatctaaattcatagtgaggcattgaagatgttaaagatagtacagaagctacttgggacagagattagttagccactacaacaaggaagcgtttatgaattttcatttcactgaggactgactaaagtagagatatcagtgctttgtgtatgctttatgtttagttcatagtgctgtgatttaggaacttttatcttgttctctgcttccctgataattatatagatagcaggctttggttttatatctataataaaaatagcaatgttttgttttaaaaataataataatagcaaattcacagtacattaatgaatgtctacttcttgtgcagatgttaaaaatgacaaacctatgaagtactgtcactaaattaatagacagacatttgatggccaaacatgaaattgcaatactctcttcggggacatttggaaaaatcggaacaatacaaagaagattaggcatggcccctgtgcaaggatgatgcacaaattgggaaaacgtgaaaatgcaatattttgatttttacaataaaataagacacctctaggtatgcagtgaaaatgagaaagtgcatagacacaataaataaa

SEQ ID NO: 187534 - DNA, 1594 bp, Cannabis indica
agtttagaaaatatcaggatgggaaacatgggaaattacctagttatgactcggatgaggaaaccgagccatttcatcctgatattctaaattttaatttcctcaggattcaaaaatccacacatctcataaatatgatgggactacaacccagtcactcatctgaataacttcaataccataatgcgagccaacaacgtctcgaataatttgtggtgcattttattcccggcgtctttaactggggcaacaagtagctggttcgataagtttactcaccattcgataacatcttgggaacagctgtccaaagactttaagaaacaatttcaagctgctagagacagacgacctgaagcatcatccctaactaacataaagcagcaaccacacgagtcacttaaggcttacctgagtcgcttcagcacaaccgctgcaaaggttagaaatttgaatgacagtattcaacttactgctctttaagcagggatcacaaccgatcttccaacggctgggggcaaggaaattagaaggatatctaatgcttcaggtttttagaagagtagcattccatttagatatcttggtgtgcctatttgtgccaataaaatctcttctcctgagttttcaattctagtggagaagatgacagccagaatcagagtttggagcacaaggaatctgtcctttgatggaagaatagtcctaattaagtctgtgctactgactatccacatctattggattcaaatactcattcttccaaagaaagccataagagaaatagagggtatatgcagaagctttctatggttaggacaatgtatcatgaatgggccaggcaatattgcttgggaaaagctttgcaagactaaaaaagctggaggaattgaattcctggacattacaaaatggaatcaagctgctgtgatgaaacatgtttgggcaatggctacaaagaaggacaatttatgagtgaagtgggtacatagtgtgtatattgctcatgaagattggtggggctacaatgccccatctcaaagcagctggtattggaggaaactagtgagcaccaaagaggttgtcaaactgatcatttcacctgcttaatttactgttaatgaattcaagattgcctatgtgtacaagctgctaaaccaagaacaaggggacttccatgttggtaaacaggtatagagtaggctcaatattccaaagcatagttttttgctttgaattgtagtacacaacaaactgaaaaccagagatagacttctgcaatttcatattagagatgaagcaacttgtttgctgtgtaatgattcaaaagaatctgtccatcatatgttttttgagtttaggttttctcaaacctgcttacagcagatgaaagagtggctggattggagagctcgaacttaaaacctgcagagcattttaaggtggatagatagggacaaaaagaccaaattcgagaagagttatttcactgttgtgattgcaacactggtttataaaatttggtaggctcgaaacaaactcttttggaactaagaaagcactgagtcgactgtgctggtccaagaagctaaat

SEQ ID NO: 187535 - DNA, 3327 bp, Cannabis indica
caacatttcaaaagtttggaatatttttctcaccaaggtgtgtaaccttcactagactgcatccttgccaagtctgttccccatatcttcagagtaaggtcatcgctgtggaatcagttaaatgctatttcagcttcttcttttttttcagcatgcacagtttcgttatgatgtactttgttactcataccaagcaagaaatccaaagtaaaagcatgaaggtgaagaaagactgtgttccttacctgctgctgaccattttatctccactggaattaaatgaaagagcccaaacagtggaagagtgaccactgaaaaaacagaaaggaaaaaattaaaaacataattcgaattaatgaaatcaaaaggcgtagttacaattacaaacaagttgaaaaatttgagagatagggaaagagacagatcatacttgttcggctcatctaaagtttgtacacaagtccaattatcatcatcgccatcatctgcccaaatctggtgtagttggtacaacaaacaaatagattgattatctagatgaccgcagatatataaaaataaactcttaatgtcagcttttaccttaatactattatcatagctacaagagaataaaacatccatggtcggatgccactgaaccatttttacatcctgtgtatgaccttgcaacacagcaacacactcatactcatgtcctggctgtacttcccaaatccaaacagttttatctcgaccacatgtagcaatcagtgacccagatgcattccatgaaatacttttgacttcattttcgtgaccctaaaaaacaaaaccaccactaacagtacttacaaatatgaagaaaaatatatgaaacacaaactaacaagatgtgaatttgagaacaaaatgatgttgtttagtgcttaagcttccaatgtagcattctcaaatcactcttgcatattcagaagtttaacttgaactcaatgtacaaaactatacaggtattagatgaaactagtaaaattacttgtacaaacattgcctactactgcaatgcaactaatggatatcagtacctccaaagtagaaacacattcataatcacccccaacgttttcccagatagcagtggtagcatcaaagctcacagtagccaataaatttcccgaaggtgaccaagcacaagatcgaacagttctagtatgtgtttcgtccagaactgcctgcacagtaccattacattaataaaaattctatcacaatataatcatgaaacccagattaaaatgctctccaatttagcattagacagaaattcttcattggattagcataaactaattgtgagcaacacaaaaatcccaaataaaacgatctggccagcttaattataacaaaaagctcaattcaattaaactaactgacccaatatcacgaagttgaagtcactttactatttactattcaatattcaatattcaaaaccaagaatggagaaaataaatgaatatacgaagagcagtaagtaacttctcatcaaccagccagaaataagatcacaattaaatgccacttccttattcagtgaaaaaaaaaaggtcaaaccttgcagttccatgaaccagtggtaagactctcctcccatatccgtacggttttatcaccgctacaagaagcaaataaatagggaaccccagctacaccagtggctgggttccaagccaagctccacaccctatcgctgtgaccctcaagcttctgaatctccctcagctcgaatctctcatccaagaactccataacccaaaatgcagggactactattctcgattcagcagttcaaatattcggtgtatgtgagctatagaagccacagactggttgctcagttttgtgttttaggtctattttgtggactgtgacacgttgccagcacgcactgagctacgaataaaatcaaatagtagagtttagcctcatgctgatttgcaacaaaactatctaaactttacttttgttacaattagtgtctgattggttcgtgattcaaaaactataattttaaaacgataattctgaaataaaaatatgaattcagttattgaaaacttgtttctcaaaatgtgattggttcactgtctataaattgtttttttagttttaaaacactgaatctgtgactggtagaaaatcaaaaaacataacagtatcagaatatatataattggttcaactgaagattaataactattaattaatagattaagtaaatttatagataaccatactacaagcaattgaactgaagtttcacataacatccacgttcatcattaacaaggcttaattcacgacaaatacagaaccaaataatctatcaacaatcaatacatgccattttatatagacttgggcaaatagtaatcttttccaaaacaccttttagttagattttgaaaatgatatatgtaattaatacaaaagctacaaaaacagtgattactgatagagatctcctctaataagatgaaaaacatgttaactgaaattggtgatgatcactgcaataattcaggagatgaagtctgataaacaaaacaagatgaataaaagctatttcaacttgatttgtaagccatcatggaaaatttcttaccaccaaaggccataaataggtggtcaatttcacataatacgcttccatttccattaccctataaagggtatgaactaaggagtaagaaatttacaatactgaaggaaattcaagcccatctcaaagaataataagactaacaaacaaccaccaaaaccagctacacttcacagcaattgagtgtagttttattctatcttattcttctatgtgatctcataaacaagtttagtcaaccagagttaccatccaaaaactaaacccactatcaaaacatttgaatctacacttctataaaagaaaaatatttccatttcacaacatcgtcaaaaaaaaaaaaaaaactgggcaaaagattcaattactcaaaccatttatgaaatctaactaagaaaaagtttaaaaagagaatcagacaggaataagagattgcttcgcgtagaatgaggaagagcgaattttaataccgttggaggttggagccgtcactgagagattcctaaggtttgttcagttgttggcgaagttggtgtcgtggtcgacgctgggtttgggtggaagccgtcggcggctggggctgcagctgagggcgagggagacgtcgagagagaatcctttcgataagaaatttggtctttaaggtttttggagaaaaattctcaaaacagaaaacgaggtttgtg

SEQ ID NO: 187536 - DNA, 3073 bp, Cannabis indica
ttacacacgtttcacacagccaagaatgtacgaaataccaagaagctttaccagttaaactcctccatattcgcaggcttaacatcaacaatattgaaaactctgactgctaatctccaagttccaagattgattcgcaagtcatcagccgatatgaaagtttcaccatcacttaaaagacaaggatgagagagaagagttagtaagttctaaaacactgagcagaagatgacatttaaaatatgacatttttcaacatataagtagagttaataccataatatatatatatatgtataattattataagaaacaaaactacataaataaggataaacttggcctaaaaatgacccaccaaaaagcaaaggaaagaaacccaaactagttttacaacaaaacacttagaataagggggtgaagataaaatgcaaaatacagaattaatataagaaaaaatgccatcacctgttgtttgaaattgaattaatatgatagtcgtgggcatgagcataaacccttcgacatctagcaaccaagctggtttcttggctagttacctacaaattatgaaatactctaggggttagcaaaatgatcagaatcaaagagaattcaaatatcttaatccatggattgtgaaacaagagaaaaagaaatctgaatgcaatacatcttaagactataaaaatccaagtagaaactggttgcacacagaaactacatctttgaatctaggagattagatatgtcaatgctacaaaaatgacaagtacatgagctaaagagtagtatacagaagatataaaccaaaacatagataaaagatacagagactattaaataatattggtaaattagacaaaaaaaaaagtttcggtagtgtgaagtttgtttaaacagtaagacattcaagtgttgagtagaaggaatatagattcagttgcatttggctccttcaactatgtgccgataaaacttgggcattctggctttcaagcattgggttgacaatgacacaatgttgaaaatttaatcaaatcatgacaaaataggcacaaaatcaatggtactgaaatatgatgcaagaaatcaaacaaaccaaaattaagggttaagtacaactaccacaggtaaacgtaatgatggaattccccctaatgggatcgacaagtcattgctcagataactattcgttctgtctggacaacctccatttgcaagatatggtttcgggctgctggaattacttgaactggcaatacttccatttccaacagctttagaaggatccagattaaagtcagagactttcttgaccttcttttcttgcacctgtttatctcaagaaacattaatcgcactattcagtaagatttcttatatgtcttaaaatatatttttgatacttcgcaatgaatagcagcaatttccaagcccccaacaccccaagtcatgaatgctccagaactgtaaaatcttcactccttcaatcaagtacaatgcttgtaaactacaataaaaactttcatgcaccagcccatatttgatacaaatgaacagacccttttctagaagataataagagtaagagtacacaaatgacataataactagtacatgtctgtagtatgcattataatttacaactggaatcattgcttacagtcaaaacagttatggctggatttccttcaagcttaagcaaggctttttatatttatttatagatctgtgaagcttaagcacagtttacactgaccttccaaaatttaattgtcttgtcattggtagagaggagaaacacagctgaattggctgtttggcaccatcttattttgttgattttctcttctatttccaaactcttgagataatcgaactgacaaaaggataaagaaaaagcaatgtgattattgggccccacaaagtcaaacttgagatgatataagatatggaacagcttaaaaggcagaaaagaaaagataaaagtttatacctcaggttcgtggctctgaaactctgttttataacgaaactcaggatgcctagtaacagggtaatccatcctctctaaatcccttctggagtcgccatgctacacatcaaagcatatcaagacaaactacaatagtacttacaattaacaatgcctgcaagggtatacagaaagaacatacatcttttgtatcagtcctctcgaagagaacaacacggcccccacggtcaccagtagccagaaagtcaccacttttatcaaattcaatagcagaaataatatcaactgcagagaaacaaataaaaatgagaaattcagtttcagagagagagagagagagagagaagatgagcctaaatgcagaagtggtttcacataatagaatataaatatgttgtattcatagttagtgcatatacatgtttaagtccaagctaaaaagaaaattggtcaaaagacttgaaactgcctcgagaaaacccagaaaacatatgagggggagccctcccctgtacttgttatacttccctacaggcttgcttcttgcaggaaagctataatgtagtatgaataagaattagtctaaacaactcctgttaatctccaatgacattagcatccagatcaattaaattctgttgagcaaatctatgttgcctaatcactgaatacacagacctcttagttatttagccatctttataaagctgacatcaacctttatacattctcttcaagcataaccagtgaaacatgccctgaagcatcattcgtttctataatgtataagtaataccaagaaaatgcaaaatcagtacagggagacaaagcgataatctttctcacttcatgacagttacaaaagaaaatataaagcattagctttctaattattaatgggagcaagcgaaaagtttgattttgatataagttagagaattacagctatgaacatgcagtaaatgaatctcaacgtgtaaatacaaaaatgagtgtgattttggatctgcagtgcgctaattcagcaagtatacacaagcaataagggaagcagagccactaaacaagtaaaag

SEQ ID NO: 187537 - DNA, 1894 bp, Cannabis indica
acacggggcccgaacctagactcagatctcgaacccagagacggaacacgggacccggactcaaacgcggacccggggtcctgacgtagacccgaatcctgaatccaaacccaaacgcggacacagaccctggacctagaccctaatctggaaccaggcctggacacggacccaaactggcgcacaaacacggacccaggcccagacatggacctcgaacccagaccttaacccaaactcggacccaaacctagacccaggactgggacctgattatgaacccgagacccgaattcgctcccggtctcggatccatacctgaacctggaccctagatccaagacccggactcgaatccagacccgaactcggacctggaccccactagactcgggccgaacccagacacggactcgagactcgctctctaacccggacccggacccaaacctcccttccaaacaacttctatcattctacgagactcctttcggatggacaagttaaaatttcgggaatgtctttctgaatgacttttaactttttataacaaaaataacttttagagacctttacatttagagaaactataccacaatattaataaaatttcatgatttattaaaaaaatctcaaaaattataatatatattatatatttttatggtttttcacttcacatttatacctcgtttaataatattacaatcttgaattcggtacaaaaatcgcaaagtcttcattcatgtgctaaaataaaaccttaatattcattatgaaagaagaccaacaaccacatatatttttatatagatatttatctaatagtgtctagcaccacttaaaaataactccttgtgattgatgagtagtatttaataaaaattattaaattatatgagatatcatactcaattacaatagtcatatcaccttaaagggtgttagataccacttatttcttttaacatttcacacttttatatatgtatgaggtgatagtttttaatctattacctataaataataatttttataatttttacacataaataaataataaatatattttatacatgacaatatataatgtagttaattacaagaaatatgcatatattttttaaaaaaattataataatttataatgtcaaaattataatttaaagaacttataccatgctcggataaatattaaaacaaacacaaacgttcaattaactgattgaatgttggttaaaaaaaacttactgaatgctaattttggtatgttaaattaactataattcttaaccaaagtcaattaaattttgttaatcaaagtttgtgctatgtggataggagataattttcaatgtgcttgtgagactattagccttcacttaccaattctatattgtttcatgtgaatgaattatgtttcagaaaagattaactataattttggaaaattttagaattatctcatgtaattatattagatgccatcatttaaaaaaaaaaacataaattaaaattatttgtatactaaaactacctattgataataattaaaacaatcactatccacaatttgtgagatatataatatttattgtgcatttatttgtttattgaggtttgttttcttttgagattgattgtaagttgtaaacaaatctttttttttttaaaaaaaaaaagtaaaatgaaaaaaaagaagggaaattctaggtatgaaaaaccattgggtgtgttagtaattttattctattatttttttttatcaagcattgggtgttagtaattgaatatattaatggagatggcgactgaagtacatgatattctgagtagttaatagtcactcaggcccaccagggcccaacaccatttctttcttcttctttttttt

SEQ ID NO: 187538 - DNA, 1132 bp, Cannabis indica
ggcttttcttgtgtttctgtgtagcaggcttttcttttgtagtttctcgatttcccatctgattataaatgcttatgcatcttcaggttgtgacaagcttggcagatccttctgcgaacataatatttggagctgttgtagatgaccgatatcatggtgaaattcatgtgactattatcgccacaggcttctcgcagtcgtttcagaagaccctattaacagaccccaaggcagctaaactagttaacaaagtagcaggaggtcaagagagcaagggagttccccttcccctcaatgcattaacagctcctactgttccatcaagatcatctccacgaaagcttttcttttagttcctttttatgatcctgtgctcttcttttccctgtgctttcctaatgatattaaaagttgagtcttcttataatatttttctggatggaagtgccattgtttggcttctccaaagtttgtaattaaggtgacgaaacgagcagatgtagatcatttgatgtaagaaaaatgaaaactgcaacaaaaccagtggatctaaaatagaagtaaaattgttttcttctttcttaaaattggttgttttagagctcaaaggtcagcaagtgatttgtttttattatgctgctgcaaggttacaataagttattataatttatgcctttgaacatccctttggtaaattatagtttctcaagtacattagtttacatattcacatttataacctattacaatcctcatacaagagattaaaattcaatgacctattccagttaaacttatgattcacataaccttgacagtagattcgactgatcaggaatcaatcacaagaagagggctaactcaggtttgggagtaaaggagaacacactttcaccaaaaatttcaaacaatgacgccagtaaatgacctgcatccatatcctctttccaagcctgagcaagaacagaagatttctttgtcatttgacctcccaactctcttgttggcaagctttcatttgttaacgaccgagacattgatgatataacaccctgggaagccacaatgccagttgaaaatccaccttgcatgtcagtttgcaattgcatggagttaatcgccatgcccccca

SEQ ID NO: 187539 - DNA, 2013 bp, Cannabis indica
acacacacacacctcctggagtatagttaacgtttctaaacgcaagcctcagttcaatattgggggggcctccgttgaaagcaggttctgaggcgtaggtttcaaatgttctcttttttaaaccatgatgataaaaacaacattgtaattttctttgtaattaataatgccgatccttgattgacagaataaactactcaaattttctactgtttccaacattttagtaaagatttagctctgttaagccatgacaaacttatttaaagacatgcaaaaactacaaagaacccacacctttgcattggatactatgagatcaaaatcttgaagaaatgccgaacatgtaatatactgcccagaatcaactcgctgcaaaagagtagccatgtccattgggctttggattactgaacgatagttgggagcgtcttcatctgagacaggatagtggaaggcactaaaccgtttatcatataaaatcctgcagtgaaggaacaaacatatgaataaacatagaggaatatgatgcaaaaaatgggaataactaagagagtgtttggcaccgttactataaactggtttttgtttataaaaacaaaattctgtctttaatcacaagtaggggtgtttggcattgttctcagaaagcaaattttaaaacgaagttacaagaaaattttgaggacagctaaaagttgttagtttacatcactttttttcttcagattactttgatcccattatttattacaaactttttaatcatatatttatttattatacaaacagaactttttaatgtatcaaacttcaaaggagtacaatacaaagaaaataaagaaagcaagctttaattcgaaacagagcgtataaacttgggatataaccaaactgtatgtcattatgtagccacaatgccaatttaaccttcagcaagacccagagcctatacatgtacagcataatgcttcagctcttttttctttctttttttatcttatcacacaagaactgaaagactttgattacttgcggggaagtcaagttcaatcatttatggagaaggctttaagcttataatcgatcaaaagtaaattactaataatatttttccagttttttaatgtattttaacataatgtgtctatatattattcacaagagtatgtggctcgtggcaatcttattaagctaattagatccatactttaaactggttatcgtgcctttaagttcaaacttctcttaattgttgccacccaaacacctattcctttttagtttttacaacttacagtatcctagactccgcacaaaatccattatagatagattgttccaaaattcaaacaatctagaaccatgcaccagcattacaaattacagcaatctgcccactgtttagtgctaaaaacctccatgaagaatttacgtaaggtgtttttagcttatgtcaatgccacacacaaacacaccacaacggacatagacagtaaaatgcaactaccactggagattttaaaaaaatggcagcattttcaaacattcatgagaatggttaagggctatctaaccggttgcaaatatctcttaggcacatccgcaatcggcgaagggcatgctgctcagcttctatcttggcttttaactcagagatctttggtccacttaccacttttggagccttaggaagttcaggagtagatgacaactcctgggttttctttgccatccccaccgataagactgacaaagcagcttcaattaaatgatcaaaaaacaatattctgtcttctttagttagttcaccaacctcgtagctgaaaataaaaaagtaacaaattacgtaatatgtaggctgcagaaatgtttacagagaaataaaaaaatagataaaaatctcctcagaaggcagagtttcaagtaagtaaaatcataattgtatgctacaaattgttttatttcagtgtgaacaaataaattataaacaagatcacatttatcagacga

SEQ ID NO: 187540 - DNA, 2312 bp, Cannabis indica
  modified_base (2280)..(2280): a, c, t, g, unknown or other
tcctcagttcagggaagacccatcctttaaaccacaaggcggtcgattaggagaaaatgatatggactatgacactgatgagaagtccatggcgacattaaggcgtcatcttcggggagctcgagaagagtattaccgatacaaaaggttagctgatctggtctcttagtcaaacatctctacttacactgttcagaaattgcatgcattccttagtgatttcttgttcaacctcatgtccactttatcaaggatatatcttttatggctaattagctaattaggcaacttctgatattctgtttgtcctttggaaaattgctttgactccattgtaacacaacctctttccttcatttctattggttgggaaagatctcagcctgtcatgactcttgactgaatgtatggatttttactaagaagttctgcataaagaaagagatggttatttatctttagtatctgtttcagaaattttctaatatttattatacaatttgagtatatgttgtagttattctttctttacttaatttctttatgcactgaccgttttttttttttttggttttaaaaagaagattaatttataaaagaaccttttaattttgcctttgttttttttaaaccttcatatttgatcttgtgcatgaaaacgattctttagtcatttatataccggcaatggttagctttattacttatatataggaaaatcatttggtaggggcatatcgtttggcaccacctgtaggagtgtctctgtaattaactcctaaaaaaattatagtccaaacattttttattttacggtgtgcagtttagttatttaggacctctcacaagttttcgtaatttttttttgtaaggaagttttcataaaatgttgaataatttaaattgccaaatatagaatttaagataatgcgttctatgcgcataaaacatactttaaaacaacttgttttcgtgtttttggcacatggatatgtaacaatccaactttttttaaaaaaatatgacaacgtatattgtagttatttgaaacttcccacaaatttttagaaaatttcaaataatttatagtgcccaaaatacgaaaaaggttgcattgaattcctattttatacattcgtgaaataagttgttttaagctggttttcaacaatgtaaattattcggaatatcttgaaaattggtgtaatgtcctaaataactacaatgtaccgcaacattaaaaaaaaaattaattacaaattctccaattgccaaaaaagagggtgggggcaaaaggcacgacacacgcccccactgtagaaataatattaatgtatacttatatcttttttcagtgagtatatgacctatgtcatggaggcccttgaactggaagatactataaagaactacgaaaggcgaagttctactggatggtgtgcctctactacgcatccttgttctcttacggtctatatgttgttttctctatttttatatgttcttgtatgtttgttcaggaaatatatttcaagcttcaggcctactcggagtggaaagttaggctcatttattgatactatgggtaaattaattagtgaactagcttttgatcgattcttccatcttttttttggccacaactttattcagtatctcaattatatgtgaattattgaatgtcggtcactttatcctgaagttctgaaattcaattgttatttttttttgtagaatttctttggcgctgcatactaagcaaacaatttaagaaagtcttggctattatgcttggtatcatgtcagctgctattcttttagcagaggcaaccctacttccaaaatttaatttatctcttttctcgattattataaattctgttcagggacaagaagttcttgttcaggtatgcttttatttctgtgctacttataagatctgcgtactcttatatttgcactcttataaaatagagcacttatttgttgtattttgctcataaattgaaattatcttgctttttctttggtttgatatatatatttttttaaaaagttctgtttctttgctcttccacatccattaactaattacttttgttctttttctaggtatttgcttttattcctctgatgtatatgtgcattttgcacatattattccttgtttcaaaaatttggcatgtttacattttactctctaacaccaagacaaacaagttcggtcaacttgcttatgatatgctcgtaagtttgctcatgacactatctaatgaactntgaagcttggctaactcattttatatttacac

SEQ ID NO: 187541 - DNA, 1391 bp, Cannabis indica
tgttggcaggtacggaatgtagcattggggattatatctcgtaggataaattgggatcaattgacaatgttggagtccattgatcgtaagcactaatgcattattcattcatgaagggttttattgtgatttgctccttatttagtttatgaaaatcatatcttcttataataggatttagtttctcaaaggaataatgttcttaatgctatcaattgtggctctacattgtacttattgttttgtaatctgttataattttacagaggtaattacatggtaatatatatcgtatcatactagattactagttaccaagttctagttctctgtatactcagaattgtattcatatttccagtgcttttaccatctgatctttaatgttgcagtgttctttgcctatttccgtcgaattttcaaaaatattttcaaccatgctgagcagatttcacaggttggcaatatctattgtgcataatatttgttcttgttcatacctctggcttaaagagcattaactcttctctttccttgactaaaaatgtcatttacattcctttgtattgatttttctgacaggcaatgattgtcagaggttttagaggagacagcaagtctcacacaatttataacttatctgaatcatcctttggtagagcagatattatttctttgttgtgcctggttggggttaccgctgcttgtgttctctcagactatcttcttgtctaactaacacgaggtactaacttatatatcattattattaagtgaacaattatctatcttagaaaattctggcttatttccatgtctcatctactcgaaatttgattggcagagttaaaaaaggtttcaacaacttgttaacatacactcgcacgggctgttggatgaggagctagcatgacatgattgggggaatgagtgacatattagttggaaatggcaaccatggtggagtccattaagtatagaacggtctataaaaaggacttgggagatacataatttcatattctttgtttacatttttttcccatctaagttcaaacacattaccaattgtggtcattagcaatgtttagatgctgcccttgttatctttttagagttcattttaaacatgtcttgactgctagcttttgtgtttatatcagccccaaaattttcgtgtgttggacagggataatgctgttaagaaacaaatcataaatgagcaattctttcttcttttttttcaaggaaaatgaaacaaaagaatgaaaatctaaaatgccttgcaattgtatatagctccagtctgttgggagacaaggaccaaaaaaagaaagaaagacaaccaagtacaccaaaatgactgtggccactggccactgactggtgga

SEQ ID NO: 187542 - DNA, 2134 bp, Cannabis indica
aaggatttatttatcattagttactcactcccttattgcgactactcaaatttgttttacatgattagtatttaattttctttttctttcttaatacttacccttctagaaatgggtaaactcttcttaatctctacaattcaattctttgttttttttacctttttaggttgaaaatctttgtgggatttctctcacccaacttgcagataaagaaagtccaaagaggccaagtcaacgattcacttttgtcaaacgattcacttttgtctcgctgataagaactttccctcaatccaaacaccctcgctaaactccaatttttcacgttcacaaacacacgaaacagagctttctcttaacttttaacctattctccatccctctgtctccgtctcggtctcgccattttcattttcctttttttttttttttttatatcatatgcggctgacagctaaacctgtgtgttgaaaaagcctctagctttcacacgatcacaattaaaaaaaaaataaaaaataaagaacttgttatcattcaaatcacggggcttttgcttttttaccactgtttcaacttgttcacactttcgtttcttatatctttctttcttcaaacgactgctttcagtatattcgtcttgtacatgcttgagttctgtgttaatgggttcctgttgcagttctcgaatcaaagccgagagcccagatcgaaatggtactaacccaattcaatctctttctttctttcctttgtatttctgtaatagagaaaagtgcagctaattaagcttccttgttcctggctttggcttttcatggaacattaaatagaagctttgttgttgttttggtgtgttgtttgaatgaattttcaactttaggtatcaatgcttattagttttacaaatctggatctgcataaaaattggtgctctattttcaaaattgaaatgaagacaagtaaagggaaagtaagaaaggagtattaatgaaaatgatcacaattgagtagataatagatatgcagattaactgtttgagatatattgatttgattcttctttcttgaatttacttttcgagcttttccgtatgataaacttagtctgattatgcatgcatctgccatttgtagggcttaagtcaaattatggaagcaaagtctcttcagcctcagtaccttcaacacctcggacagaaggtgagattttgcagtcatccaacatgaagtgcttcacttttaatgaacttaaaacagccacaaggaacttccgtcccgacagtatggttggggaaggaggttttggcagcgtctttaaagggtgggttgaggagaattccttaaaagcagccaagcccggaactggtttggtcattgcagtaaagcggcttaaccaggaagggcttcagggtcacagggaatggctggtgagttaccttgatttctttccattttcatctccttacttcaacctttgataagtttactagtgttcccttgattatgcttttgattctgaacccttctctaatcactttgaaaagattgtgtatagaataggtcacattttgtatttctaacacttttgtttcttctcaaattatagacagaaattgacttccttggacagctgaaacatcccaatcttgtgagattgataggttactgtttggaggatgatcatcgccttctggtgtatgagtttatgtcccggggaagcttggataaccatctatttaggagtgagttattgaattccttcactgctttagctggtcttgagttttgataaatagcattatcagtgaaatgatgttctaatttatgaaatgcaactttgaatgcaacaggggcttcttactttcaaccgctttcgtggagccttagaataaaagttgctttaggtgctgcaaagggtctagcgttccttcacagtgatgaagctagagtgatctatcgagactttaaaacctcgaatatcctgctcgattctgtaagtgaaaagcatatgacattggtgaaacctttttagcttctcatcaaatattacttagactaactggtcttcttttccattgttatttaacagagttataatgcgaaactgtctgattttggattggccaag

SEQ ID NO: 187543 - DNA, 1699 bp, Cannabis indica
atggaggagaagaaaaggatgatgaacagcatagccaattgacaccgtttatacaagaacgtcaactacaacaacatgaggaagaagaatcagaagaggaagaagagattgaaggagagatagaaattgatgaggaaccggaagtagaacatgaagaaagcctcatcagtggtcaatatcacgaagccagtgattattttgatcaatcaatatcatctcagaaaatcccttcaccaccacctctgttaaggtcttggagttataacgaaattggtgatgattcggaccgggccttttcaacatctccacgtcaagaattcccgtctcaatcttactataatatctccaggcattgctcttcttctcgaaaccattcttcaatggtaagttgtttatctgttctatttcgtttaagcttcagcaatataatgtaaagtacatattaggatatgaaataaatctcttgaataaatgaaactcacaggaaatggatctaatttttgaactaagaggacaaatggagcaacttagtcgagagatgtccgagctaagaaattcattaaagagctgcatggacatgcagatgatgttaatgcagcaatccatgaagcaagaaactcaatcaggttattcacgccattatttctaccaaaaataaataatactcaatttttctttttatttttttgggtggggttggaagctttattatgactgacactctgagttattttgtcaaagcagcagagggggtaccaaagaaaggaaactgccgcatctgctacgcaatgaaagttgactcgcttttatacaggtagctttcattgttctaaaagcaaaaaacttgccctgactgaagctgttttcgtcatgtcgttcgattcattttgtatcgttttgttataacagatgtgggcatatgtgcacgtgcttcaagtgtgcacacgagttgcaatggagcagtgggaattgtccaatatgttgtgctccaattgttgacgtcgtacgggcttatatggattcatagactaactcccgaacgagttcttgctccagaggaccgtctctttcattccttaacgaaacaaaataatttcaataataataacgacatgcatttgaagagaaatttaatcggttcattttgtttcttttttcttataaagaattataaatattaaaaaaaaagaactctcactgaatatacggcaggacatggtttgctctttctcacacatatgttctctatatgtaatttgaggagaatatttacatttcatcaagtatctttgtattattattactttacttttcctaaaacatgaattctctggttctgtatatgtaatattttcataaatcttatttatgtaggaaaacgacactaacttgtatccttataaagttaaacaatgaaatattgcttctttcaactactccgtttctaccgaagtgaaagaggagtggacctccacaagtcttccacacaaagcttcaataaatgttgaacagtttgaaggaaacttgttaccacaacagataataatcatagagctaccttaggaggcccaaggtaagaaaaaaggaaagatggttacaggttaagttacatttcacatgccaattgaaattatttctctaccaggaaatgacattttatagtgtaatgtgaaaattgtaaaacaaaaaaaaaaataaa

SEQ ID NO: 187544 - DNA, 1730 bp, Cannabis indica
accgctcgcggaaggtcaagtttgatgattttgagactgtaggtatgggactacacaattaaaaatggcttaaatgaattgattggtacgacctatatcaacaaggtgtatcttattttctagtagcccatcacgagagaactccatagttaagcgtgcttggcttagagtaatttcaggatgggtgaccttctaagaagtttttccaggaagcgtgcgagtgaggacaaagcatgctggaaacactcgtgttggtttgtaggaccagtcatcagtccaaaaagcagtcaaaatgacgtattcgtgtataagaaccatataaatctgtgggggaaggcctaatggaggcttgaagcggggatgttacaactttgacctaaggccagtcaatccaggaactgttcaaaattcataacaaagtcatccagactaggatataggtcaggtgaaaatcctaaatacaacttcaatatctagaatgagaatactgcgtacgctcttctaagtatgctggatggacagaagattgagccagaaacctatgaggaagccatcaaaggcaaggatggtaagaagtggaacaatgatattaatgaggagatgcactccctgactaagaataagactaagataattatccctatacttaaagggaagagtattgtttcatgtaaatggttgtttagacataaggaaggaagatccaaaggtgaaccagtaaggtataaagctagattagtgactaaggggctcacacaaaaggaaggtgtggactacactgatatttttttctttctcttgtaatcaagtgcaaaactataaggttgatgcttgccctggctaatcaatttcatatggaaattgaccaaatggatgtgactacatcttttctacatggtgagttagaggaagacatctacattgaacaacctaagggttttgtagaaaaggggaaatgacatctagtgtgtaagttgattaagttctgtatcgacctaaataaataggcaataggacaagatgtttgatgctttcatgactaaataaggtttttctaagagttactatgacacatgcctctactatcatggaagtgatataaggatgtcatctacttactgctatatgtagctaacatgttgatagtcattatggaaagatctaaggtaaagttaattaaggagattctcaaatctgagtttgagatgaaatatatgggtgttgctactaaatcttagggatcactattatatgagacagaggaaaagtggctttaaaactgtgccaagaagactacatatggaagattatttagaagttccaaatgacaagtgctaagaagactagttagcccatcacaagttagtacaagatctctaaggaagggggccttaatacaaagaaagatgtaagatccagctgttctgtgtggcaaattatgtgtttttggtcatctatctgttggctagtctcatctggtccttttagcataataatggtttttattatttcatcttggcaggtcagctttagttggtttaaaacattggacagctatccttcattgagagctgagttgttaagtttgttgtttttgagttgttagtatataatcagggattaccggttttctaactaactcttcttctttgattggatatttttcatttggttatttttgctctgctacggcagaacttttctttgtttttcttagttaatttgcaggt

SEQ ID NO: 187545 - DNA, 2335 bp, Cannabis indica
cattaacactagagaaagcttattaatttgtatgtatgaattgatacataaatgtctatcacaatcttagggtcaatttaagttattttcctacatcatgtttggctttggataatgtaatttatttttctacataatatttggctttggataagcattaaagacataatatgcaccactttactgatcacatcttcatgactattatggataaagacttggtcaacaagcttttagaccaaaaccatattgaaaccttttagtgtacatgatcaagatatagatgataccccatcacctatattaattaaatatttgccccatcatctgtataaacataactatttctttcctataaatatataaatgtgtgtgtattaaccaacctccaccaactttggctcactgctagaatgcaagtaattagagactctatctctctctcttttcaagcattcctcggcctgaaattttcattataattgttataatcataatcagcaaaaaagaatatacagattgtatacgtgacaagatgagcaatgtgacaaactaccttcaacatgtaatcaggacaagaatcctccaaaatccaataggaggctttacgagaataatatgcaccactgtccagtagcattggtccctcaaaatccagttcataagattccatatgtcccattccaatttcaacaaatatatctataacattcttcagcaatgctctgtcaatctgctctccctcacgctccttgtcaatctggtattcaatcactaattactaatgctcacattaacattaaaagagtccaacatgctacaaaaacatgagcttaccaaagcaaccacagcatctctggccttagaatttacctctctataaacctgatagcacataaataaatatgaagtaatataagtttacaatcctattcatgtatatacatgttatcccaggaaggataggaggccactaactaagtctcggaagcaggcaagtccaacttcattgagtggaggaagcgatcgacgagcaatgaaatatcgatccaggtaaaagaagaagcgtgaaagccacctaaccataactttatgatttgcccagcgtttcacaagttctctcagcataaactcatcatgcttttccctaagagagggcaatacctagaataaataaataaatgaaacatgcattaattgacattttgaaaaattataaagaagtttaccataagggatagctcaaacagtcgggcctaaggtttgagtccctcctgaataactacacagtaattgttacttaaaatagtccaatttaaaatcaaaagaaaaaaaaaatgacaaaccaaaagcaatctcagcaacaacaagcatacatgtttcaatgctaataaaggttaaccaatagaccttgtgatggacaaaattattaccgaaaaaaattaatcctcaccattgtcgtaatatattcttcaaacgcctctcggtatttgtcataaagctgttgagaataatcatgcgggggcttttgtgtacacatgttgtagatggtactttacatattattaaggaaagcatatacaatgtaagcagaaaaagaaaaaacagtaggtggacaatgagagagagcatttttacattcatagatttgctaaaaataacatcaaatataataaataaataaataaaaaaaaaaggatacgtatacagcatcatgtattcctctccagtgaaaggaggttcaggtaattcttccaaaattctcttcagctttgtaatccccttttgcatgtaagtccatccttcatccagctcaataactttacgatccatccttggatatcctcaaactagacttctgtaaataatgacacaacactaaaatctaaactggttaataaattattatacatgtttctagtgtttcctatgtatatttgcaatggaaaatttgtttgaactagtgtgagagttcaaaaactgggtgtttatgaaaaaaaaaatcaatagagaaaaattactaccattacgaaaaaatcatataagaaaaaggatcaataccatattgatttaaaaaaaaaaaaaaaaaaaaaaaaaaaaagaggttgtgctatcaattccataaactagtgtatataaacagcaccaaatataaacaaacatgcttaaaaacatgatgaaaatcaaatcaacgaacaactcataactaggaatagaagcatccacaatgtatctcgaacacgcaaaattcaaaaacaataaaacccaagctcaatgatcccccgcccaaagtactcaagaggataaaggaaaaaaaaaacgattacaaaccgag

SEQ ID NO: 187546 - DNA, 2116 bp, Cannabis indica
aaaaaaaaaggtccaattgtattgttactgatctcaacaagtattattatgcaatataatcattttctggtgcagttatcaagatcttgatgcccctgatgatgaggtcactgtaatcgactaccgaagcttgtaagattgtgattaatcaattgcaaattctatttagtaggcttctttccccaaaggaagtttgatctgcataaaatgaaccgtagacccttaatcagatttcggtattcggtttcgcattctttttcgatttttcctatcaaggggacataagtggatggcacatgtaccatattgtaggatggtagttgtcttaacgattccttataggggtctctgatgtcatgatcttctgattctaggattgtcttaaccgaagtctcatgatttttaattgtaattgtaaactttctaaattgtaagtataaactatggatgaaactatgctggttattctttcattgaaaatgtctagaatgtgattgtatgctactcaagtctttttacttttcaattttattcatttggaattaaacattttacatggggcattttcacaatattttccaacgcaaaagttgagagtataattcgagagaaaaataagccactttgaattgagtaatgatattcgcacaccttaacaccaaaatactatacactttagctatttttaaatagtccaaattttacaattgtactacaaggtacaaaggataaaattaaatttattttaataaaaaagtgtaaaagaatcaacaaaaatatattctgtaataaatttaacacgagttttattatatgtcaaatttattatattatacactaccaatttagagttaaattttataaacaatttaattagttgaaaatatttgtcacccaagaagttcagtgtaaaaaaaatgtgcacatatcattcctcttttagatttcctcgagtaacatcctaactactaatacttataaatgaactctttttattcatttcataaaaacatttgttgtttattgcagaagtggtataataaaaggttaaagttgttgattgatgaaagcctataacgggtttttcaccaaaaaaaaagtgtatttccatgttaattttagttggataccatcaaacaatttcacatgaatatttctcactagttgatatatcaaagcctcacagtcacagctgatttaacattgctggagagcttgaaacattaaatagcaagtggaaataattctgtcacaaagatatataataatatcattaataaataaataaaaacatttgcatcaccaaacaagagtacaaagacctctaatctcggaagctttagatacaaattatcagccaaagagctcataaagaaattttcacaattcacaggttttacatttacaaataagtttccagcacatagttacatggaaacgctgtatattaggtgagttagagaaatgaagtgctaaccctaataagcttaaacctaacgaaacgtgatccaaggaaatgacaaaaatatctaattaaggctaaattgttgcaacttgttaaataaatattacaattacacatatttggttataaactgggaccaaccttgaataattctactgctagaatcttttcagacaacgagaattggcagccatgagtcagtaatttgtgttattagcttggcaaggagcgaagcatcgaggcacaattatctctataaagtttgttcacagaataaaactctgcaatggacatcaatttattaataaattacagcataaaaccatttaatagaaagccaaaagaaaaggttcaattaaacttggattttctagcatcgttaacgaaaaatatgatgcataaggatcagaaagtacatgaaatatatgctcacaggtttcatagctgctcacggatgtaagccattgatctcaacatggaacctagtgtatctctggatacttgaaattttacctctgtttcccctgttgttgtctttgtgtcttggagctaagataagatcaaagcaaaaatatgattgctcagttcaatttaattcaaaattgaaaattgggtacataatcatatgctactagataatttttggaatag

SEQ ID NO: 187547 - DNA, 1044 bp, Cannabis indica
gaacttgagtcagagctggttgaaatgaatgcaaatagcgagaagttgcaacgttcttataatgaacttgcagaatataagctagtcctgcagaaggtacatcttcttttgcattcttgtaattctcgttgcaactctcctcatgaaatatcatgagattggaatgtttgtagtcttcgattcaaacatgattaagttcattcttaatgttgattcttctactaatgggaaacctttaatttagaggaatggatagtgtgccttccttattgccaagctgtcattaaagggttatgttgtttgcgaattgataataaaatggatagatgtgttctcaatataaatgaaaacttaaactgagatgaagtaataacacggttattaacttaattatttcctacttttcaggcagctgatttttttcacgcagctcatagcagcgccctggagttgcagagagaatctgaatcacgtgaagcagatgattcgctggagacccctctactactagaccaagtactagcgccagctttgattttatttagagctgtaaatagtctttcaaattaaataattgactcgatttggctgttctgctaggaaatatcgactgatccatccaagcaagtgaagttggggtatcttactggccttgttcctagggaaaagtctatggcgtttgaaaggattctatttcgtgctactaggggtaatgtttttctgaagcaggccacattggagaatcctgttactgatcccatatcaggagagaaggtgataacacttctttcaatagaaaaagttgaatagtaaaaatatagaaataactgaagtgtcagtcataactcgaagtatttaagtacccctttctctcttctccctttctcacttaagttcataatgttattaacatgtctttttttaaaaaaataaaaataaaaaaactcattccaattatctatttatttttgaaaattttctgtttcatttgttaactacttcacttaagcaaaagtaaaatattatgctaattgcttggttgtc

SEQ ID NO: 187548 - DNA, 2659 bp, Cannabis indica
cgaatacatcgtctcctgacattcttcaatgtttctctggatggctcaaaaccagcgtttacctagcacaaaatatcacaccttttggattagcatcttcacagaaacagcaaataaaagaccataattgattgcgagttaccatgctatcaatcacagagagcgcggctttctgatctcggtttataagatgagcatcaacaagtatcatgtatgactttgcattcggcttagtgtccaaacttagcatgtgttcgaacacccttgaagcttcaaatgtctggcaccatcacataattaattagcaaacgtataaatctatgtcgtgcaaatgcatacaaattagggactcgaagaagtggattattccacatttaatcatccgttctaaagatgggcagcatctgctgagagatctttactttttccatcttcctccacacaatcaaccttaatatgattatgtgcagcagaacaagattacctcaagacatatggaaggcctatatgcatggtggagaacataacaaactaactaaccaaaagccacagtgggcttacaaagtgcaagtctctttgtgagagagtatggaagtgagaaagacaatgcagctaagacacccaccttcttgagcctcccaaatgcatacattagagcattgtaagaatgaacgttaggagccaacccaaaggaagaactaatggcctcaaaggtctggtatgcacgatcaaggtcccagatatttgcacaccctaatattacacagtttaaagcagcaactgacttgtagggagggtctgcacgactcaaattctccagttgaaaatacacctggaaaagaaattaacagttattataaaaaaaaaataaaggtaagaaaatcttcaccttctatgccacaaaattcacgcatttattattttatattaaaaaaaaaaagcaaaagaactaccaacaattctatcattaggacatctaaataaataaataaaatcaatagtaatattatatgtgcttatcttcttgtatcagtaagttatgattatttatagttgcactccttacttgtttaaatgtctattaaggtttatatacaacagaggaagagttatcaataagtatatccttagggatttcaaaatcaatcaccacacgtgtgtatcttcttgtttcagtaaagttaacaagttacatgttaatatgcacaattaatagtattatcaaatatatccataaacaaaaatgaagggaaaagataaaggatatacacaagattgtagcgaattcaaactatcgtaattaatggatagaaagacatactgcatctaaagtctcaaaacctttcttggaacacgccacaaccaatggtgataaagaggtgaatggagaaaatagttcatcttctgctacattaggggaatgttcataagcggactcaaactcatttaaggtactaaaagctctccgtagctcccccaatgatgacaaggcatatatctttgcaaggtaagattcgggattaggaaccttcttttgacgcaatgagcgctttaggattgaccatgaagcatccaagagattagaattgttagttctaccagcagttcctagtgctgatacaagtaatccttcatccacagaaagagaaacagaaggccttgcttgttcacctctagcaatccacttggccagaaactccagggcatgataacctaacttgctattgtcctcttggaatgaatgatctgcaatcaagttgcacaacccccagggaggacaaagagctttgttttgttccattgactgataactccaataaaaaccaaattaaacaagtaaataactaaacattattctaaattttgcacctgtaactacaactccaaatgtagtagcaattacataccttgcacttctcaataaccgaaaccaaagcatccagcctgtgagttttgagacagagtcgaacaaaatctgtaaacacctgaactgacaatgtaacaccagatttcaatgccaagtctataaatttgatgccatcattaattctatttgtctgaaaaagcagggcgagaaccaaattatatgattcatcatcaggcagagattctttcccagtttgcagcatcctgcattttattgaaaggataagggtcagtgaaaatgagataagtcaatgtgttaacgaatatataacttttgtgaagtataagacaatcataagcattgtcttatttttcccattgaaagatttttgttaatgaaaagtacttttcaaagtattaacaaatcctagcttcttgcaaaaggacttttaaattaaaaagggactttttattttttatccaaacacacttatttttaattcttaaagctaaaaaagagcttatagaagctaagccaaacggggctataagtacatgtaccaaaatgctttactaagacaactaacataaacactgtcatggcaattagacacgatacaacctgcgtacttaaaaacacataaatcttgttttcattcaccaatacagcaatgcatctttttaaaagaaattcataaaaccataaaaattcctcaaaaacactaggaggattgatttaattgaacagtcactcatagttttcactataactgcaatttcaaaaaaaaaaaaa

SEQ ID NO: 187549 - DNA, 3965 bp, Cannabis indica
tgtgagaaggagttggaaaatcagtcttgtaacttgaacttgagaacaatagaaagtttataattttatctatattttgagatagcaatttgaatgcatatttcatctttcttttcatcttagatctaagcttgaagcatagtttgattttttggccaataagttaattgatgagttctcaccgtgaacaaaccttgtatctcaagtttagagatgaaggaaggtgtacagagatgtgtataactaagatctataagtgtctatttaaagtaatgtcatagttttaggtttagaattaaatggactaaagaaaaagatataaaatggcctttattagatgccttaatcaaatgcctataggagagcccaatggtttcaattttaccattttagtcatactttatgttatctgcattttcaccgaaatgacatgtagatactaattaaaggaggataaggagtcattaggctgcataagtgcctcacattgagctctaggaagataacaacataaaccttgcagaacaagtccccataagagaagtcttcttgggaagaggccacgaaagagatgtccgcgagctaacaaaatcctccattccaaaagatggaaccctttgctctagcaagaggtacaagcctaccactaggatgcgttagtccgggatatgcctacaactcgcaaaaattcagtccgtgtatgccaggctacgggcccactgactgcgcttttttaccatgtacggtgtcagagtttgtctcccacgccacgctaccatgcagagcatgcttgtccttgtgtactgtgctaagagatccaacggctagggatgagggacattgaaatgagaatgacactgagacgactcatgtctagagtcccgctagtgtagctagtacgatctgacatcggtaaagaccacatagaaaatgtgccacctaccaatccaacgatgggtgttaatccctatgaagatcaattgaagacgagatgcgccatggaattgacctataaatactctactagtgcacaagaaagggagagagactcatctttcagattttcacctgaaaattcgagacatcttcttcacaaagaaaatacatcatattgtaaccctacagataactctagaatattcatactaagattcttcttcttcaagaggaacacgagggaataggagctaagtccattattttttatttgtataaacaatctctagcgaaagagcctaataaaattgactcgtggactaaggatagttaatgcttgaaccatgtacaaatcttttgcttgttattgagttattcataccttcattacttttttaagctctaacaattatgtggtttccaaaaaactcagtaaaaattttggtgctgtcattgagagctaaagaaagagatatgcacggcggctaccggtagaagcccgtctacaagaaggtccgtgcaagaaaagaaggaagacttcctgattgcttgtcgaggtttggctgaaggttaaaaatgtgcaaatccgcggtgttgcccagaaaaagacttgatgccacagttttcccaagaaaggtggtgaaagcaaacacatgcattcttaaaatgcctactgcactaatacctatccttaggagctcaaatttggcaagcaaactctgtaggggcaagatcaaccgctgatatcctcaggttcagatccctcagcatatcactatgtgcaaacagagcagtgcaagaggtactggggtcaggcgaaggagctacgacctaatgcaattacaacgactaactcaaaaagggtcctcagattcaatgactctacctagctataaactccaacaccgacactggtgcgaggcctggagctgtctcccaaagaatacttcccgtgccttttctgtaggtggtaaagtttccctaaaatagatcacgcgatgatagttgctgagatttgaccttcagtatcgtcggccgctgctgggttactagtgaggcctagttatggtacttttggtagaagtagataacgtttggcaaagttcagtccatgccattcttgttgcctggtgtagctgcaaccccggagttacaacaaagggaagcaactcgagacattgtaaaccatttagggaacccttgtgaaatgcttgtcccattggaagtcagtgtttccactttaaagaccctcaaatggcctgcgctttaccgaaggagacagactacccgagaaatcttgggggtgtgaccatgcacatcctaaaccttcctcatgctcaagagaaatgcgctaacctactctctgtgtgtggaagatcattaggagtgtcgcacgccttcaaccatctttcctagaagggaaggaccgattgaagtatgctttactcccagcgactcttccgccctttgatcttttcaagtgaaatctaagcttgactttttatacaacttcagccttcctttcaggaagtcgaggcttgttacataaaaattcatcatgactctcgcaggcacattttttctagtgcaaggaagatcaccgggggtacaatatgtcttcagccctctttcccagattggaaggacagcttgaagtctatcctaccctctgtgatgctttccctttgatctttttaagcaaattctaagcttgaatttttatacaacttcagccttccttctcggaagccgaagcttgttacataaaaattcaacatgactctcgcatgaacgttgtttttgtgcaagaaagatcattgggggtacgatacgtcttcaccccttcttccaaaattagaaggactgcttgaagtctatcctaccctttgtgatgctttccccttgatcttttcaagcaaagtctaagcttgaatttttatacaacttcagccttcttctctaaagttgaagcttgttacataaaatttcaacatgactctcgcatgcacgttggttcttgtggaagaaagatcactaggggtacgatacgtctacaaccctccttcccggattagaaggagtgcttaaagtctatcctaccctccgtggtgccttccctttgatcttttcatgtaaagtctaagctttaatttttatacaacttcagcctacctccacagaaggcgaagcttgttacataaaaatgcgacatgcctcttgcatgtacaatgtttctcgtgcaagaaatatcactaggggtacgatacgtctttaaccctccttccaggattggaaggactgcttgaagtttatcttaccctctgtgatgccttccatttgatcttttcaagtgaagtctaagcttgaatttttatacaactttagccttcctccccgaaagctgaagcttgttacataaaaagtaaagatcacacttgcatgcacgttgtcttcgttcaagaaagaacactaagtgtatgatacgtcttcaaccctccttcttggattggaaggactgcttgaagtctatcctactcttgtgaactgaatgatacttcacctttcagcatttgtaatcaaatttaatgttgtactcgttgcgcactatttgcctttcttagtgaaagccaaaagtttgctaccgtattagttcaacgtgatttttgcttatgcaagcccctatgcaagggagattgtttgcacggggatgctggctcgacttttcctcttagaaatcaacggcctatcgcgccccaagaagcctagaatctcacatacgaggtttacgccacgaggagattgttggagcatataatagggtcttgcgtagaaccccatggttctattcctgaagcctaaaagtggctatgaaactaccccaaaaggacaatttacatcctgaaacaaggcgaagctatgctcaactcctcaaagatgaggccacaagttaaactccaagcaaacgaccaaaaatttgggtctaaaattcccagctcattttgggaggtataatatgtctgattgctgac

SEQ ID NO: 187550 - DNA, 2670 bp, Cannabis indica
tctagttaaaaagtaataggaatgaataagaaaataaaaaagagaattcacataggattaactgtttttattaaacaaaaataattataagagaacctcacataaaccaattagttccacataagaagatccatattgctttaaagcacattaattaattgtatatacaaaatgttaaaagataattaaatttgatgcatgaacagaaacgtaccactagaagaacgccttattgatgggcacttgactgaatgctgattgtagcttgaggacgaggaacacaagaaatcatcatactggattggctcgctccataatcgtatgctttttctttcttccattcatacttttgtttcagtaaatagcaactttccatgaagaaacttttgaatgaaggtggcagtgtaccttcaaaagatggtggcatccctttcactggaagtgtctccaattcggggcactcattcaagcgtagttctttcaaggatgtgagctcttgaaatcccttatcatctaaggttttaagataaggaagatgagtaagagtaagggaggtaagactagttggcaggaacccttgctctagaaaggataccatatcttcacctttataccttcccaattcaaagcttatcagattggaaagtgcttgcaaattccatttctttctagatgcaaacaacttgtagcagcctacgagtttgagcttacgcaaactgagaggcaaccaaatttaggaagtgattctaactcttgacaatcaacaataagtagttcttgtagagaaggaagaacactaggcagtttatcaaaaagaaaccttaatttgctgcaatttgagagctccagttgagtcaaatttgggcaacagaggttgttatcagataataatgtgatgttatggcatcctgtgatagaaagagtagatagagtgtttatggggcttttaaatagcaagaaagactccacatcttcataccagtcaatttcgacagtcctgatattggggaaggagtctatatgaagcaattcaatggagctttcagagtcagataagtcaatggaaagctcttggaacgattcgtatatgttagcagctaaaacttctataagctttctacagaacttgatacttactttactgacattcggcatcattggaagcgaagaacaaagctttgagcacattaaaagatcaagctctttcaaagatggtaagtggaaagacaagtctcctaagagacttccacaccgttgtatagcaagtgatgttagctttggaaaagcttcagcatttggcattgaccattccttccaattttccagtccatcaaatttcaaggtttccaatgatgcaaatggtgtacaagtagtcccataaaactcaacacccactctctctattcctttacatccttcaatgcaaagagtttcaagagctggtaattgcccaagtgtggacaatgtacaaagtttagaacaatcaacaatttcgagatgtttcaaactaattagattatggaaatttttagggagcttagtgagattcaaacattcatctattattaatgtttgtaaattgtacaacatggaaaaagatttgggcaactctatggatgaagtgtaaccaaaacgcaagtagcagaggtgccttaattcacctattgattcaggcaattcatagacaagtctcttacaaactaaacataaaactcttaaatgcttcaacttcaacaattcttccacgaaacgctgcactaattcgtctggaaccttgacagatctgcccgcacacaaaaatgtatgcaaacaagctgcttgagagatagatttgaatatcatatgagaaccaccttcaactacaatatgccttgcttgctttatcaattcaattccacacaacttgtttctgtctaaaaatataaacttttctttagaaacaaaactagccaagtcaactatgagatcatgcatcacgaaacgatctccttcataactattcatacatggttgaaaaaatgatcgcgacactaaatcattaaaatactcatttcccagttcatctcttgttttatttccacttgattgcttctccaacaaattaaaaatcatccacaatgagaccatttccttctttgtaaattgatagtccttggggaatatggtacaataaacaaaacatcgttttaaatgtgatggaagataatggtaactcaatcttaaagctgccggaagagtgttatcttctctaactgcaaaatccaacacatcactctttgctattctctcccactgcttaacatctgtatggcacaagagccttgcaattactttcacagctaatggcaagcctttgcatttttgaacaatttctttgccaattcttttcaagtctaaaaccatattgaattctttattgctagatacaatctttacaaataactccaagcaaacttcttcattcaactcgttaagatggggaaaactagttgttcccatgatggatgcaactttttgacttcttgttgtgacgattattttactaccttgagctcccactttgaaaatcaccctcattgtatcccataagtcaaatgttcacaccaaacatcatccaaaactatcaagaacttcttatccttcaacttttcttgtatcttctcttgcatc

SEQ ID NO: 187551 - DNA, 4939 bp, Cannabis indica
aagtccatgcctaagacttgaaaagtaacaaagccttaaaaataagatactttctaatcctattgatgtctttcttaattttctttcattcccagtttgtgtacagtgctcataatcccggagaagctgcagcagctgcagcaccaattgcggtattcatgggagttacaggaatctcatttgcagcctttccactaagcaagacttttcctgtggctttggctcaggctctagcctgtggaaccgcaggagcagtcttagttgatagaatcatccgaaaacagcttggtcctctcatagaaaaggcgcactcatcagaagaagagtccaaagaggactcttcacaaaacaagtctataggatttctctctgacatagccggtccaaagggtacccaactgaagatagtttacggtgtgtttggatacatgcaaatcctctcagcctgcttcatgtcatttgctcacggcggaaatgatgtctccaatgccataggtcctttagctgctgccctttctatactccacggcggtagcagtggaacagaaattgttattcccatggatgttcttgcatggggaggttttggtatcgttgctgggcttactatgtggggttacagagttatagcaactattggaaagaagattacagagctaacaccaactagagggttcgcagctgagtttgctgcagcctcggtggttctattcgcctcaaaactggggctaccaatctcagccacacatactttggtgggtgcagtcatgggagttgggtttgccagaggacttaacaatgtgagatcagaaactgtgaaagagattgtcctttcttgggcaataactatcccagccggtgcattgttttctgtaatctacacatggatcttgaccaagattttaccttctgttttatgagattatacaagtttgaacattggagtgatggacatcatatgcaacgtggttaattgaaaaatatccaccttttttttccaaccaaattctttttttttctccttttcatttggtaagtatgatttcctctgttggaaatctatgttatcaggaaccaaagtaatttttaacttaattcctgtctagctttttcagcatccttttcctcttatcatttctagtacctaatgaaatttataattatggaaagtgtgtttgagattttctggaagatatgtatgcatgcatgcaaggactgaactcgttgttttgttgtgaaatctgcttaactagatacgtggtaaagaacaaaacagcagaagttcctaatataatagtctttgtgtggtacaataatattcttacaactaatatataccaaatttatataatagaagatttaaagggtggaatatactttttgttaatccttatcaggttgttccaacattctttgttgggatatctgtacgatggcttctaaaattttcttgttgaaacctaaagagacatgaataatttatgttttttgctgaattcttggccagattagaatggaagctacatattttcaaatgaagtacaacagtttctaattaatcattattcagtgagaaaagaaataagaacacatggttactgcaacccaatgattctctataacctcttgtacaaaatgcgctgtctactgagaaaagtctgtgaactcgcgaaacaaaacaaaacaaaacagaaaagaagaaaagattgtagacataatataggataaatttgacagcaggtagttgaaactattagcactgcatagtggaaacagtccattatcattttattgcagtgtgacaaagcaatccaactacttagtacttaccagatagaaccaaaatcatggagaaagctcttgtacagaagttaagcttggttcccacatgggtcctctgtatgctcttgactttggaagtggaggtacaaaaggcttcctttttcttatgcctcttactaataaatttctagacaatttttctttggaagcatataattcttttgcagaggaagcagattcatcaaagttagtttcacctgaatcagttattttgacatctcgcatctcctcatcatcacctcttcctttcaatttctctggatgttttcgcataagtttctgtacagttgaagttgggattatgagatatttctgacccggcaagagcttttcttgtggccataaaagggattcatggggattcttgaaaacttcaggccgggcaacacactttccaggatacttttccaacaattgaaatgctgtaagtgcagacgggtaccactcctctcgcccacctggatgaactatcctcacaaatatatccttaaagctcagggggactggcattgaattttcctcttctttcttttcttcacaatctttaatgagaagaggcagttttctggtttccttttttctgttggatttccagtaaagcccaaataacttagcaagcttgatcagcatagctgcaaataacagtttgtctgaaccaattgtttcatagcagtaaactcacctaatattggtagttttctctattagttaagaggtgaatgtcaaagctaatcaaccttctccactgtttttgtttatatatggccggctgtttaaactttgtttacttgttttgaacaataagggtggagaaaccgaagttcttcatgagacaaaaaatggtctctatcttttggaaagcgaaaagtgaaaaccaaagtcagtcactagaagatatagaagcaccaactcaaagatcaacattttagactaatgccagctttttcggcacatccttgtgcccatatcatactcccataggcctgaaaacacctggcgttctagcttcttctgccttccactgatccaattattatggagaacaaagcatcctattttagcacaggctgctgtcacatttttcatcttccaaaggccttggtatgcaccattcggaaaaaggtttctgtccaagaaatagacagtcagatttgattcaggttccaagcatttgttatctcccaggcgagtggatccattttctccacatagtgtatcataaaagcttggctgctctgacaagcctgaatttgcagcatgcttcactaccttttccatggctgcaatcgttgaaccatcagagaaagcaaagtaaaatccagagttcaatcgccttggtaagttaatcggtcctgcataaacaaaaagttagaacagaaagttctaatataatgtacataatgatggaagacaacttccattcttgcataaaaaggagacactaaagatgtttaagtacctgtttctttgtattcatcagactgagccatcagaacagcaggaccataagaataaagaaatggcaatggattcttaaaccagtatacgtcaacatcactaagaataacattgtaacccaatttaagtatcttaagaaccattctagacttcaccttagtcacactctgaaagcattttgttccgaaatggcaattgttgaagcttatctcattcggagctaacacatccctaaagacaggcaggccctaacaacaaaaataaaatctttaataaattttaaacaatcaagaacattgcatcaaatgagtgaacatgttaagtaaaaaattaaatggttaatgaagcagctagtacttgcaagatagagaactgatatgtttcttcatcaagagcagaaacaatgaaatttggtatctgcaagtggcgtaatctgcaaacccagctcatgagcatgtccttataactatacccggcaactgcaagcacaattgtcttattcctgtctgccatcattggaagaagtgactctaaggagaaatgaaagtccattgattcaggaagcctcatcggattcatcaaagagcaatttaacattttctttagaggtttcagggaatcaagacaatcactttttttcttcttcctcctccaggatcgaaaactccttccttttcctaagatcggtgcactctgatgttgaaatggatgaaaagtgttctttcttgtgtcgaaaaaaaaatattgcccatcacatttcagaagcttaaccagttcagaatacttggcattttggtaaaacaatgatccatataacatccccaatttagaattgccaacatattcccagcttctgttttcataagtaagagcattggaatctccaatagccccataagacttatcttctcgatcatttagataaaagctagagatggtcaagctagcatcaaacacaaacctgaaggctgatgatgaggcctcattaatcacccaattatcatgaactcctctcccatataggaaaggaggaagaactcctgaatgtaatggaagatctccactattccatgccataagctttctctcttcgcagggaatctgctgccaattttgaccgagtatgaactcctgcaactttggaaagagagaacaatttcaatggcttttgttttgaagggaccatcaacttttcattctgaagatgttctttcataatcatacctcctggcttcttatcatttttccattctctcttctccagtgctttccatcctcgtctaagtagaatgggaaatgggatacatttctcaacaatgcaactagtagccaatcattttcaagctcataagcatcattcagagtggaaatgaagtcaggaaagagaagagcttcagaatggaccacaactgaaatgtccgacctgaatgaatatgctcttgacatcatggaatgaaagaatggtgttccaaggaatctggaaacatgaatgaaacagatcatgtagactggaacttactaaccacattgtcatgaatgatgaactataactcaaattgaattgaataacttaattttttgctaaaagcttttttctttctaatgatattccaattacaaattagcaaagtaaagcttc

SEQ ID NO: 187552 - DNA, 1398 bp, Cannabis indica
agatggcatataaacatgaggcaaataaaatagaaaaataaacgtttatgtacattttattttaccacaacattttgctgaggacagaaaataagataccaaaaattttctttcaatgtggttatgaaagatgacctgggaagcatctactaaagggtgaatgcatggagcgcacaactttgctgtgtaaattttatgaaaaatattgcatataaaaaagaagcttgatttcccttttactttgtattgtcaaattcataaatgatccacattattataagaactcacaaaagataacaactcttttagttttagttacacaatgataaataactaaataaataagcctgccagagttctaatcacatgcttgctcttctcagagatttccaggaaagtcctttcagaaaaaaaaggaatgatatgatgtagagttagaaaagtataatcttccggaacactaacgagtaatcactagtgagaagtaagcagggaagatgttaacatatatctttcaactaatcacaatgtaaaaaagcaatctagcagattgatcaccttcataaggagactgagatggaccaagaatcatcacattaaaataccgcatattttcctctgatggggaagcactaattccaggagctgttaacaagagataaagtaacttataaaaattagtcatataaattgcaacttaatttaaaagttataaaatgtataaaataagccatataaattgcaacttaattaaaaagttataaatttatgtatataagtagtgacttctttaataataccaaattcgttaatgtaacaaaaaaaaaacagaaagtatggttcttggttagaatagaattattatttcatcaagagcacaaaaaggttttgaattatctctgggcttcccaagaattaagtttgctaattcttgtaatgagctgctatgataagtgaaaataagaaaagtttttcttattacatttaggaaacaagtttgggcgaaaccctgaaataattaatgaaatgaaattggaaagagataactctccgcgtttatacttctcattcattctctaatcttttcctactacagtacccatttttctgatcaagcagtaaacgagcccgtgataaaaataaaaatactaactccatcagataaatatatatatatatatatatatatatatccatttcgaaattcaatcccacaaaatcttgatgacttgaggttaggctactatattttgttcaaagacagtatagaattaatctttaaagtgtcgaattacgaatttcaagaaatgaatgaaagaagagataaacaaatgactaatccttgatcaagaaaagcttgattaacataataaatcactcgtgatttttctcataata

SEQ ID NO: 187553 - DNA, 1531 bp, Cannabis indica
ggggggtatgtatacaggtcagagaagcagttttggctatagaaatagatctcaattatgaatataaagccttttcaaataactgagtgagggagtgtcaacagttttcctgcgatcaaaattattattttcaaaatttattaatatcttccagctctacctggttgagaagctccataagtatacgctgaacttctctatcagctccagtttgagcatcaaacctagcagtagctatagcatctacttcatcaataaagataattgctggagcattttccttggcaagacggaagacatcacgaaccatacgagggccctaaacaaaaaacaattgtctgtaagtacttgtaatttgagatggacacagcaaacaaaaaattaaccatgtagcagtactttataattcaaagtatcttcaaagaggcaatatatagtaaccatgttcaatattaccacaattactcgtacaattggtataacaatcaagttgtcaataaaaataataataataagatgttttcttgtaattgaactggtacaaaagaaaaggcatctaagaaatgttgaaaaacaagatccaacaccttacctcacccaaatacttctgaacaaactctgaaccgacaactctaatgaaggcagcagttgtgtgattagcaacagccttggcaagcatagttttaccagtgccgggaggaccatagagcaaaacaccacgcggagggtctataccaatttgtttgtatagttcatggtgagtaagcggtagttccacagcttcacggatttcttgcttctgaatgtcacatccaccaatatcctaatgcatcaaaagaaaaaaaaaaaacaatcagtagcattaaaacagtgatgagatcaaatgtcttaaggttaagggaaggtagcagaagataaataaatgatatgtagaaataaatggcactcataaaatgaatgttaaatgcagcgaagatatatctttcatcagtaacaaattccatcagaaataaaatcccccttaatccatgaataatatgtgcatttctataatcatcatcaccagtaagattctttcagagattcattttttttagtaggaactcaacaacacatacatcgtataacaatcagttcactgcatatcccatatgagcagaatatagtaatatatcataccaggtgcacaatcaaacaaaaagaacaccccaagaaatgctctataatgaatttcagtctaatcttatcgtaagttgtaactaatatcagcaaaaagcaaacaatttaagcaaaggaacttcactctccaagcaagagcacgcaagccacaacttgaaaaactctggcaagtctcaagatgcaccaaacattcggtacatagatatcatgattaatttgattcctaaaaaacagagtgagaataaaaatcttcgcactaatttagagattcaaaattcggatcaacactaatttcaacaagcttaaggctcgcgcctaactagaatttttttttgttaaatccaatacacaa

SEQ ID NO: 187554 - DNA, 3575 bp, Cannabis indica
ataaaattaaattcaaagttggaacagtcataaatagcggtcaataactcgggagcgcaaccagagctctagctaagctagactcgtcgtcagacaccccggccactcactcgtcaagtttattcacacgcggagtccacgtgtcatcgtttgaatgaggcggcggtagtcctcactgactagcttcctgtgtcctcggtgtacttaaccagaacctatctgagagatagaaagtcccaaagtttgtaaccaaccgcctcatattttaaaaactttttttttttgggcatcatagcaaaggcagaagaagaagaagagaaatagaagcacctgctgtagtttccccctctcttacttttttctctttcttttgtgttgaccgaaaagaccaccaccaaacgacgtcgtccgacgattcctttctttcttgcccaaactcttttcttctttccttctcaaaattccatttctgtccctaaacggaacatatataactgctcggttctcaatcccgcaaacttcgccttttttcttttgggtttaatttttttaaaaaaatggagtaatggtaaaggattctttctagaaccgccgtcagtatcaccggaatctctattgccggcgaagttagatgtactcgattgggcggtttttgattttatgcctatccatataattctacatgcatcctttttgttgtgtctctaccgtctctgaccactctccgggtaaaccttcgtctcagttcgctgaactctctatgtctccggtgacttcgctcgccgctagatccgattcggccggaagagtggctagccatatcaacaatcatcatcaccaatcgtacagtcacaatcagagtcagaatcacaatcacaatcatagtagtagtaacagccttggtaatagcgactacggccggctgagccaaagaacgaccgcggctgctgcagctgtggcggcggcggaggccctagctcgacctccgtcgatgagggaacaaccagtcgatgtgaagatcaacgatctcgttggaaatggagtttctggtatactgtataagtgggtgaattacggtaaaggttggcgacctcggtggttcgtgttgcaagatggagtcctttcgtattataagattcatggacctgataggatcattgttaccccagagacggagaaaggatccaaggttatcggcgaagaatctttgagaaggatttctcgtcagaggaattccaattctctccagaaccgccggaaaccattcggcgaagtccatctcaaggtatttgttttgattctggttggatgtgtttctcctaagattctcttttgttgttctctttttcatagcacaaatttaagtaaataatttgatttttctgtttccatttcaattttacgtttttgatccctcatatcaatcaactcctggataaacttttgcatcttttagttacctaagtatcccgcttgcttttttttttacctcccttaagatcgattgatgtaattgccttcttccttttcatttgatttagtgtaatcatgtattcatttgtatatatcgttaattgatttctgaagaatgtatctctaggtttcgagcatccgtgaaagtagatctgacgataagagattttcaatctttactggcactaagaggctgcatttgagggcggagacgcgggaagatcgtgtggcttggatggaagcattacaagctgtgaaagacatgtttccgagactgtcgaatagcgagctaatggctcccattgacaatgtggctgtttcaacagagaagttgagacagctgcttacggatgagggcgttagtgaatcaatcattcaggaaagcgagcatataatgaagagtgagtttgctgctctacagaaccagcttcttctgctcaagcagaaacaatggctcctcttcgacactctgagacagctagaggtacggaaacttaatgccattcagaactcttcttcagtttccctttccccttctagtccggagtattcttaatcactctaaccacctaacaaaattttgcttggaggctggggtgttttttttttttgggctagttttgtctcttgcaagaagtgttgtaatgttattcttcttgtatcaaatcttcgcggtggttttcattttcttttctcaaaaaaaaaaaaatcaattttttgtatacaatttttttttgttattatatatatatacacgtatatatagaatactatattaaagaaaaacatgtactttcccgattgaggtaactataactataaataagaataattatatcttaataaaataaatacatataattgataaatatgaataataattttattctaaactgtaatacatgtacaaatattatatacaatttttttttttgatattatatatatttatagtatatataaatagtgcacgacttgtggactattttttgaactaaattagcattttaattgtgtatgcgatagaatctgttgattagtttaggagggtttatactggtctttgctgtatccaaagtctagttaacctgttcctgctaaatctttagatccataaagaaaatcaatatagtttctgcagctgtctttttccatttttattgttgaaatccctggtgtccatgctgagggtaaacatttagaaaatgaatttaagtgctgtacgagtgggagataaactatagtggtggttgaggcaattgctagcctctgcttgatgaagtggtagtacggtaccaaaggatgagaggcatttttaggagcaagtgtttaagctgttagaaaagataatcgctatgtatatctatatttccactaaaaaatggctagttaaaaatcatccatcagttctaacttctttgcacttagcagtcagttatttgtaaaatattggtagatgattggataaactacctatcaaatcatataaatgacaatgattgtttggatacatttaatttatttatgttttatatttgttagagcacaagcttcgctactacaatgccgacttaattcttctctcagaaaaaaatacttccttaaccagttttcatccattagcttcattattatcattaactaagaatatgccttgttagaacatattgataattttgatgttttacttaaggattaaggaattcatgtgactatcttataaggtttgaagctgaggacacaaagaaacagattttgaatagatttgaaataagttatgttaatttggggtgatgatacaaattatcaatagataaacctttttgagttcgcttttattttacaataaaaatgtcccttagttttctgtagtccatcaaaagttagaagaatgtccatggagaattgatctgcataatgatagtgtttgtgcttaagttgaatatcaaaatatgtgcggtgaggtttgtggaaggtttataccatccaatctttggttttttattctgactttagtttttatttattcttttgcaagaaactttaagttatttaatggtcgaaacatatgcaaatcatgtctgtttcttgttgttgttgtt

SEQ ID NO: 187555 - DNA, 4892 bp, Cannabis indica
aagagattttagctgataatgatattatatgaaacttcaccagaaaactttatatctaaatcccttacttctaaggctgaaagcccaaaagagttcaaaattgtaaaacaaggtgattgagaagcagaaagaaaaaataaaacaataaatgaacaaataatttaactgtgagatatactactttcggtaattctgcagatccggtccataactacaggaatatcatcttcagctaaagtagtaaaacaacaacgaaaccagcccggctctatgcagtggcaagctgaaccaggagttacattgatcttagaaacattcaacagcttttcccataactcaagttcccctttctcactgtatgatggaataaacccactcatatctgcccaacagtagaaaccagcactactctttgcgcacttgatacctaattgccccaaacctgctacaaataagttatgcatattacgtatcctttctttgtttatcttcatgtaatcctcaaggaatctcgtatctaaaagcatcgatactagaagacgctgggccggagcagagattgaagaaaatcttgttaacttttttgcagcggccaaaacactctcgttgtaagaataaataacaccaactctaaagcccggaatagataggtctttcgacagtccgtatattatgtgaaccctgctcttttcaaaattctctgtctcaataatttctgccatgctcacaaactcctcatttccatacatggacccagcaaatatttcatcagagataacatggatgttcttctcctgggcaaagtctaaaataccacaaagtgtttcccgagacagtacattgccaacaggattaacaggatttgaaattagaattccacgaacttttactcctcgctttcttgcctgattaaatgcttgatcaagcacagtaatgttcaaagcaaagttatcagcgctacggcaatgaacaggaattagctccaccccagctcgccatctaatgtctctatcgaagctgcagatttgttttgtaattggacaacaaaaagattaatgcaatatataacgatctgaaattggttccgttcttgtttagaaaaataatttcaccattattagaagatggagcattataagatggcaatataatcaccattacccaggataataaggtgtgggaacaagaaatgcgtttccattgtctgctaagcaaaagcttaaaatttcagtagcaggggttgctccagcagttaacaccatttgagacgggtcaaatgtgatagttctttccacgacccgagtcatgaaatcagcaatagcctacaaagtcaattgtaaactatatcacatataatttatattactataaacgaaataacccgtgtgaagagattaaagaagttcaacacaccactttcagttcagtcaatccatcgaacggttggtatgctgcaatgctgctaatattcaaatcgccaccattggttccaattatcgaattagtccaattcccagaaacccatttctcaataagatcaaaactcaactgcaacggttgaaaccaagccaaagtaaacaaaattgacagtcaataatactcaagtagctaatcagatcgaaagagagactcaccttgttctcggccaaaccgagctcaattaccccatttgggttacccaatctgtcataaggatcctccctaaccttatccagcccaatatagtaaggggagtcatttggttttgcaatcaaacttccccgggtggatagtgtgactcggcctatggatccacgactggacaagtttgacctggaagacgacctttggagttcgagaagattggaggaagactgagatggagacggaggattcgaggaggtactcggaggacggtttcgtttgaggtagaactggaggaagtagaagagggcgcaggggataagagagccccaaataaggccgcctctaccttgcaccacaccttggagtggcacaatgaggcgcatggctcttaatttctcagcacaaacttcattttgtgaaaaaaccaccatcaaatactgtacatgtcaatacaccatttcttcgaaaaagaaaggttagcaagaaatttaacaacatacctgctcatttcaacggaaggaatattctaatgcttgttgggtgttcaagagttaagcaaaaaatatccggcactgccagtttcacaaaagctacaagttacaaaagtttaaatgagatatcaaatttaataaattgcaaatatgcaactatgataatatgataatattgcaggtataaaaagattaaaaggaaagtttcctaagcccaaacaatcacaacatcaagaccatgttcccatgcttttccttagcaatcccatattcaacacaacatggaattaattttagcaattatatttgtatcatgcaaccaaacttctactttatgtgcttctcaacctaaaacaatcacttgcccaggagattcattatctgtcgttcatgtgcactgttaaactaagttggagtttaaataagattgaattagttgaggcaagtaccacagcaataatgaggaaatagacaatttttaatcatcatcttagtactaaacattgttaaggtaaatgaaaaataaattccgcatagagagcctaagttgaggtgccttcaaatgttactttttatcaagtgtattctttaaagcagaattggtcactcaatctgtcccccacactttcatacataattatttaaaaccttcctccaaactcctttattgttcttgaatcaatttaatttatatggactaacttcacaatctcaacaggagcatatcaagtaaacgtgttaaacatacattaacacatttagttccactacaatcaaaacatctggcgggaaaagaaaaattgtttataaattagcagagcattaaagcaggcaccataattatttgatacacaaccgtagatgttataataacaagctaactaatttgtagaatacaatagctaaaatagcacttctattatgtctccattttatagattcaacttcatttccaatattacatgaaggcctcccgaaaccaatcaaacaacattagccttagcaaaaaggccatcatcaaaattaaattgatttaacattctcgtaaattggtatactaatcaatagtgaccaagagtgacttcgcacacagtgggtagtgtaataaagatggcaataatacattctctaattttctaaaattttcagtctgtaagattcattgagtgtccatattctgctatgtgcatctataaagagataaacttaaaaaaatcaaagcaaaaaataaagcatagataaataaaaacatgcaaactctacttaccatgtcctccttagttttcttcttgtctctgtcagttaatgataaaacccacagaatacctatatatatcccaatcgtaactcttgaagtttggaacaccatggccattacatgagctcactgcataagtaagacattttcagttagacccaatattaaaactcaacaatgatactagaaaatgaaaaaagtttagaacgaataggtgaagtgagatcctgataagcttctcagacaaacaagtggtgaataagatttgtttaaaagagggcttgagacaaaagatgaggctggaatctggataggccaaggttgtacgcgtggtaaaatagaaaatttggacgtgtcaacaagtgagaagatggctttttgataattaaccaagaaaggtacaaggcggcattttgtggtaatttgtcaaggggggccgaaactttttactgcatttgaaatgaaaatctgagcaaaaaaatatgaaactaaatgaatcttctcacagttttttagatgaaagatttgagcaattgacgccttttgatttttcatttagatatgattccatccgatttcagttctaccacctgctaccaaaaacaacagacaaatgtatcgatatctaccatatatatacaaaattatacaaatacacacaaattaagcagaggtggagattgatacctagtaaataagggtcgtaaattggattggatgagcccgtagcgctaatagctgcggccaacgttcggctctgctcttcaagtaaatgcttcgccggtgctagtgacggtgatggctatggcgacggagaatggatagagaactggaggattgtggccgtagagtaaaaaaaaaagaccaaccggtgagagagagagggcgggagaggagataggttttaggaccaaaaaattaaaaattacattttattccacttttattttattttaattgttactttattttattattatattttttaagaaagcatcggttattataaattaaagagagtcgtttacaataacagaaaaaatagccgaggataattcctcaagccaaatacaattattatcctgcactaaagcatgtttcgctaaaccatgagtagcatgtttagcatatcgtctaacatgacgaacacaagctaaatggagattggataaatgataatgaacatccacaaccaaattatgaaaataagacataatgggtcttgaattgttaatcacatcagcaagaagtagaaaatttgttttaataaaattcaattgtaggttcagactcctagcaaaaagtagaccatgaaacatggccttaccttccatgaggcttatagcaaccgcgcactaattttgactttgcagccttgacacacccagaaaaatctcgaataattaggcctaaaccaattcttttttgggaagaatcaaaagctacatcaatgttcattttgaggcaatgcacaggaggaggttgccacttaattagggttgcaacaccaaccgaat

SEQ ID NO: 187556 - DNA, 3749 bp, Cannabis indica
ttttgttttgttctttttgggttttctttgaaaaggatcttccggtggaagttagggaagctcagcaaaagaagttagaagggctcagaaaacaacaggaaattcattctcgccttgctattgagcgaaaaatattcttgagggacaggaaaataaagttttttggtaataattgatagcttagtttctttactgttaatttatgattgcattttgttgcatatgctatgtaacttattgttttaaggggtagcggggaggtttttcttctacttgatttatagtaaaatgtatctgtattgttcagagagaagaaagatagaaagaagaataaggcgtttagagaaactccaacgtgcttcatctggtcaagcacaagatgcagaaactgctgagcagctttctaaattgaaagaagatcttgaatatgttcgggtaagctatttgcatattttaaactagattgtattttttgtattgaatattgaatgaacaaggtctttttaagaacattgaatgagcttctactggacttgagaatttgaacacttctcgaaaagctgtgagtgcctaatgttattgattatctatccagctaatgattttgttggttgtggcagttctttccaaagactgagaagtatgtcgcactgtttattggaagtgatgacacagaactgattgctaaaagaaataggctgcgtgagctaattaaagccaatttagttgctgctgcagctagtggaaaggatttagaaggtacttacttttactctggttccatcttttgtatgacatgatgaaacaatgttatttttctctagtttttggatgttctgtgtgattcatccaatgtggggggtaaggtcattcatccaatgtggggggtaaggtaattcatccaatgtggggataaggtagtacttgaggtgataactatattgaaaggaatgttatactgatgcattatggatttgttttatttagtgctggatgttctttagggtatcatctaggatcctgcttttagttttcatcttatttgtatcacctgttggtgatttatgtggattgcccatgcgtacccttgtatttttcgattaattaatataaagcagatttgtttaccaaaaaaaaaaatgcatcttggaggtatcactgcctccaattccacttatgtggtcagatgattttttttttttttttttgaggtaggactgcaatactcttcatttctaaatgcttgataaaactttgtttgacgtcaatgttgactgcgaagagtgctacatttctcttgttcactcattttcactttggatgtgttgactgagaagagtgctacatttttcttgttcactcattttcattttggctgtgcattatcagcatttttttagtttacattacaatataatatattttcacatgtgttttttttttcaaatctcaacagaaactgggagcgaggatgatgggctattggatatgagtgaagatgatttcttcctagctggaagctctagtgacgaagcagatgcagatgatgaatggacagataaaagtacaaggtatttatttttatttgcgaatgatgatatttttcagaattttggtttgttaggatttgtagggttgtattcacccatcgacacgagtaccatataaactattttcaagattttttttttggggattataatattattttgtgatatatttaaatcattgcaacttacattaaactgtttagctttttctaaattcttttgccatcctttcgtgttaaattttattacactggaaagtattgttctgaacactgtaatgactcggaatatgtaggtagtggatttatttaaaacaagctcatttgtagtatttaaaatacctgaatctatctaaatgatatagttttaagttataaatggatgccaggaacttgtttataacaaaaagctgcatcttttaaatgtgtttgcagggagcaggcttctagtgcttccggaaaagcagcatctgcatctgcatctggcatgtctagtgatgaaagaaaggcttctagtgcctctggaaaagcagcatctgcgtctggtgtgtctagcgatgaaagaaattatcaggtttctcatttatattgattttgttctgctgtttttgtacctaaatctacgacgagacatggcaattgtgtttaatttttttcaccaatctgtttatgtagagacatatctccgcaagagccttaatgcctcctccacgaccatcgactaagtctttctcaaacgaagttcgtggcaagtcaaaatttgctccttcttctagcagaaatttctctacacatagaggcgaggtttctacatccactgctacttcaaatagcctaagcggttcctccttcaagtctaggggctcctcaaactctggaacaactcaaggaagcaatttaagctccaactcagatgcttacaaacctcgaagaaagaggaggccaaagaagaaaaagcagcaggtttgtgttccattacattctaccagagtataataatgcttactattttcaaaatctaaacttggcagccgcaacttggggtgcctctcttaaatttagaaattcttcattgactacagtattcatagatcttttaacaaaattaaaattaaatagccacaaagcagtggagcaaatctaaaattgagtaatagaggtctcaaagaaaagattatgaacctttacatttctgttgaacttaggagcatagcatatagtctacaatttcactttctattgaaattattacctatgctgtaattggttacatctatcctttaattttagcatagatgactgtactatgtttacattccatttttctcttattccccaagtaatggctttttttttttttgacagggatgatataaccagaatccggatgcccattttgtgaaaccagagatctttatgccccattttacaaatcaattttaacaattcacattgtgttaaattaatttattgggtaacaatcaggaatgtatgcttatattgctcttgtagtgactgaaaaaaatcaatttattttcacacctacaaatagaattgacatctgtaattatgcaaggtatgccaaatcatttaagaatcctacctgggattaaacttggtgctgctagtataatatgatattgtgtaatatacagcatatttcattttttttttcgagaagtgtaatttatattcaaaaatacaaatttattttaatatcatatatactataatggagagaatatgagtcgatcttttttccgaattctccttttattctattttctaaaaaaatatatactaaattattttcaatataaaatttaatttctaactaaaatatgtaacttctccacattgtagccatatcttatataatctataacctttattaagcgtaaatagtttcggcctcccttaattaaattacattaatatttttttttaatgggaatggataattttattaaatcaaatccgcaaccacaatcgatttgagaggggaaatttgaaatttcatgcttaaaataccctataattttttccctaaatgcatagtgattaaaattggtactatatgacaactttcttagttttcctaaactacccctcccatttgaaacccatccctctcatcctctctcttcctctcgctcagccgaaccccacgaaaccctctcacagccaccattttttcaac

SEQ ID NO: 187557 - DNA, 2050 bp, Cannabis indica
ttgtaaaccttgtgttcttactggttttacagctgcattattattttcttgttggtggtttttatcgattaactttctggtttgtgttagttatttttctggtttaatttgatcttgttttatgttcttgaatggtgattgaatcaccgcaataaataatttaacaacaacgacaaataaaagaaataaataagtaaatcaattaactatactataaatatgcattgtgcatgtatattattacttccgtaaaatcataattaatacagctcagatattaaaatattacagtacgtgtaacctgacccggccctgctatacatccttctacgtgtatgtatatatatttatggattaataagagttttattcatttatataagcttctactttccactagaaattcaaactacagttggctatacgtactcgagctaatgaacttccttgcacatacatatataaaggtaacattaattcgtgatctaaaaagacataaattatatatggtatgacttttttttaacggtttatgatatgatttggaaataagtaacttttaaacttccagtacccgaaaataaatttggagagagagactagcaatctatatatatatatatatataatagattatgcatgatggaatctggagagttgtgaatcaattaaggacaagtgatataatattcatcactattagaaacatagaggtgggagtgatgagagtgagagtgagagtgagcaagagggctgagcttgttatggcagggagaaggcccagaaggaggaatgggcccttttggcagcatgctctctataaaattattattcttcttttgctctctcatcatcatcttcttctccttcattattggtctgctacaattcacaattgaactcatcataatcactaatacaacaaccacacttaatttctttgcatgatagtttgcagacatgattattgctgatccaaattaactatattttgatgatatgagagtgttatacatatatttatgtacatatatatatagagagcggcttgaatatatatcaactggcgtatgtatcgggtcatatatatatgtatgtatatatttagttaaagtagcttgaatgcagaaaagctataggaactattactatttacaaaacacgtaaacctattttgcactatagggcaatagggattattattattataatggattttggtttaaaatgttaaaagttggatgagtttcaacggcaagcaacataaggtgttccatagtaagacactttcaaaagtgtgattataatgattttattaataccttttcttctgaatgttagtgagaaaactatgtcgatatgttgaaccttatgcaatatatagcagccaatttggacaaaaatcaattcagtatttataaatgttttcttaacttaagctgtatgttatttttctctaccactaactctcacgtccttatcaataccttccattcttacccttttatttctacaagtaagtacatcccattatatatggattgcatatattattgatagtgatatctatatatgtgtgtacagatacaatttacaaatgggaaatggactacgagcattgaagatcccataaaatatatataatatatacatatataatttaaaaaaaaacaattaaaatacttcaaaggattacgttatgaatgatgatcatagaacctcggtctctatgaatttttttactggtttgaagcagagaccaaaacaaaaaccaatgtgttctcatacgcgcatagcaaatgactggaacaaaaaaatcgtatatgtaataactacaatattatatttaactacgtctacatctacaagaagggatagtcatctccattatgagatgagatctgttgcttctccttaagtagtcttacataacactatatgattttttttgtttaacattgagtataatttttaaggaaagttattgttccctaaaaagaaataataagatatataaataaatacacactactacaatgttggcctttag

SEQ ID NO: 187558 - DNA, 3684 bp, Cannabis indica
taaaatatatatttagtgtatcgtgactttgaaacaattcaaaaactttaacaaaatacttacattggatcttaggcagagactcatgcttaaagcttgggcagagactcatgcttgaagcttgggcagagactcgtgctgataacgtgttataaaataatataaagtagatgagaagaaagaagaagaagatgaagagagaaagacaaaagtgaatgagaatttctgagttgtttattccaatggggtgaacccctatttatacaaatacaagagtgaaatattaagaaactaagaaaaaagagaaactaagaaaaatagtaatgttcattacaattcatggtaataaataaaagatttggacatccacataattattaatatttataacacttttttattttttgcgaattgtttaatcttttttacatgctaattttaccatatttacttttgtttaatattttaatactatatcaatacatgaattaataatatatcaatctaaggtcagatggccttgatttctctgtattgggctttgatgccatttatgcctttcaatgaagatttataatattttaacaaaaagagaaaattcacaaggtattaaactcaaaatttaataatatattattaattcatatactatacatattatttatataatatataaaacattacctgtgttggaccggcggccagagctgtggaagatcggcgaggcggagctgtgttgtgggaagatgggacagatcagaccgatagagggaaaaagagagctaggctggatttgagagagatcgatggacggggctagctagggccggtggctgaggagtcgactttgctgagagaaattaggcgtctgtgttttatgttttagggttagacccgccctttacccggcaaacccgtacccgccttcccattaactgaagagagagaagaagtaacagaaagtaaaatgaaggaaatagctctatagaacccgtttggttgacgttttgcttctacagtacttttctttttttaagatcatcatttatgaagttgtttgatctgaaagctttcctatatgtgtatattatacatatatgtatgcagatgtatcacaacaactccaagggatcatgaagaacatgcttaggtcaagtacaatgtgttgtgtgttcataaaaatgtctgtattttatttgtcagtgttattactttcattcctgtttccgcaagcatttaggccgtagctcttttacacaatttggttgactgctaattgttgtgaaagtgctaattatgagtatgtcatatgataatggagggcatctattctgtattgagaaaaagatgaatatatgatgttgagttgtaaggtggaatgaaaatggaatacaaatttaaaacacaattctctgatagaaaaatactttcaaaaagaaggatccattatgtggaaaaacatttaagaccagatacaagcacttaaattgctttcttcacatatcaattaaattgccaatgtcatgcatcaacggagagttcccacgggcctcttatacgtataccactttgatatcacaagaaaagctcccaaattcaccacactaagtattgctaacgacaagaagaagtaatggaggtgaccacggttcaaattgtctggtatccaacccaatcttccatgctttgtactcactttggtcacaatagtcacaagcagagagctcgcgtagttaccaagagccactgtggtgagtgccagagccgaacacaagctcctcattgcatctggagcttccatatagaagaactccatttgtccaacgaagaagaaaacttcaccacaaccaataaggaaatactgcggtatttgccagaatatggacatgggaatgtggtcatagtcataaaagttatttcttttcacaatgtcaagccttataagctccaaggttcctgcagctaacatggccaagatggagatgacaaggccaactcccattctctgaagctgagttaagccgttcttgtggcctgtgtatcttcgggttgttgggactatgattctgtcgtagattggtatccaaataatgacactgagggtgtcaaagattgagagagaggccgatgggatctcgaagtgagggcccatgctggcatccaatgtttctccttgcaagacgaacaggctgcccatctgactgtagactgcagaaaacgttatgccagtggcccatataggaagcaaacgtattatgccctttagctcctccacttgtgtgactgtgcaaagtctccatgggttcactgctgagtcctttgcctgctgcgtttgtgtcactactgctgctttgtcaaagaacctgaggagaataacattaagaaaattgatagagatagagagtaacattaagaaatatacatctcttaaataagtatttgtggagattttattgagaattaaggttcttactagacatggtacaattaaggctcatacataagggcagctgaaacatgtttaacacaactttgcagtttagaaacttactttaagtcttctgtgtgatcaagctttcggcttcctttgatgttggactcagcatctgcagtctcatacaactgagtcctatcaagaggcactggaacattatattttcggaaggctgacaccatcacctgagcaaggcgggtaagagggctgcctccaggtttttggttcctatacaaacgagtgcccgaaaagaagcttatcacagcgattcccatggccactgctggaatgccaaagcctaatccccaactcacattctcttgcacccaaaccagaacagagctggcaataagagcaccaatgttgatcacaaaataaaaccaattgaaaaaggaagacttgtgtttcttctcaacttcatcatcttcatcaaactgatctgctccaaaggatgaaacgcaaggcttgatcccaccggttcctagcgccactatgtaaagagctaaaaagaaaactgcactttctgcatctgtggcacgacagtcgtcttttgaataacaggttggccttaggcctgggattgaggctgacattgtcaacaatgacatcccctatgtgataaattgaagaaacaaaaagaataagtaaaactattcaaacatgcccttttggagaatttgcagcactggaaacaattatcaagtactgacagaaagtaaccaattattttgatcactcaacattatccaatgcaacacaaatcgataaggaaactatttccaatttaggtacttcattaaggtatcagaactacatgaaaaaagtattaatgaactttcttagtcacttcaacttacaattacgtagatgattgagaaaacggcaatagttctgtatcttcccagatatgaatcggctataaatgctccaatcaagggcgttatgtagcaagttccactccaattcaagttatttctagaggcagtagcactgtgctgatgcagtcgatgcttgaaataaagaaccagattggagctcatcccatagtaggccaatctttcacaacactcatttcctaatgacaaaaacgtaacagaagtaaccatttgatctccaagaagagtataaagtataggaaaatggtgtattgatgcacctttttctatatcggtatctaaaaaattacttag

SEQ ID NO: 187559 - DNA, 4255 bp, Cannabis indica
ctctcttttcctctttctatatccattggctgtccacaaagtcacaaattcatttccctaacataccctttcttactttaatgaactcattttaatccattttaattaaaaaaatcaaacataggttactgaagtgactgttgtcccaacaacaagccataatcggcatgagtaataatatgttataggatttatttattatttatttaaaggcaaagttaaaaataggaattgatgctcagtactgctctcaccgaatttaacagaacatgggaccttgttcttacaagtgttgtgtaatgtgagtaccccaaattaggtacaactttcatagatttatatatatagtttggatttggacagttttttaggctttggtaaatgaaggtcgagttttggatatattgagttggattcagtgacatcacatgcgtgtcttttggaaatctttcgttgtttacacaaaatatctgcacgaatctacagtttatactttatggacaccccaacttcaagtacttgatttcttagttgttattgaagttgttcatatattttcatcttaataataacataacaatttagctaaacccttaattatgagctgaaacccaatatattatacatgtaacatgaataaaaacatgacaagaaattaagagaagtgcttaagctgctaaacagtcccttctttacaagtagaaagttttcttaaagattcatttatttataaaatataaatatacacaagtataaaaacaattacatacaaataattatattacactatgttaatatttttaataaaatttaaataaataaataaaataaacggaatcctatgaaggcctatttagtattatcatttggagttcacactttatttggaaccagccaaaaaaaaaaaatccctacagatgatagcctatatataactcctaatttctagcataaaaaactttttacttaataatttcacatgcttaatgtgcaattttattaacttttaacataaaataaacagctaataaattacatgttataattataataaactcaaccaacaaattaattttatcaatgaaaaataatacttatttattaggtgagctttatctttcctctaccttttcctatcattatcaaggggccatcgacatttttgtaagcaaaagtgatcaaaagtcattgataaagctttcttataacttattcaagcagttaaaacgcaatttaatgtatgattagtgaaatatttcagttcattaaaaggttctttgttaactataatttttagtgcaaatatgattattttaaagacattgaacgagggtaaaatggtaaaaaaagagacaaaaataaaacaattatggaaggaatgaaaatagcccatagaaaacaacgaaaaagatgtttggactggagttattttagtgggacttttcctgggcagagtcccgttgctttaatcgaagccctctttacttttgccgacctcgttaattgcgacacctacccaaaaccccatcacatattacttttatgaccattataccctctgcattttcaagtaccaaaagtacccaacatcgtacggtgagcttgttgcatcgatcactaggtcactcatagaaatgggcaatttcgtaaatgcaaaatcatcatgcattttcagggattcccggctctaaaagaaattcaaaaaggtcatatttccggcgatatgcattttgcccatgcataacctcactccaccatcgccatgggccctctttagtcataatggtcggcttcggcctggaccactcaactattcctttggtattagtaaatctaagcttcttacccaattaattacggaccaaataattcaaaagcttctctcttcaattatgtatattctcttttccataatcagcaacaccattttcaactaaaatttaagttgaataactgaaaatcttaactattcccacttaaatgaacttaacgtggtcacatgtgatggaattgagaattaccttaaccttacctagaaagatccgtacatatctttgatcaataatgtaatcttaaatccctctcaagttctcaatccaaaaagaatcaatttttaacaaccctacacaaacagtaagtagcactaactaaaactctctcccagttcccacttatccccttaaaatcattcagaatcaccacccattgtactcaatatttgcatgcaacatattcaaaagagagaacgaaacattagtttttgtagtcattaattcaaaatgtaaaaaaagaaataaaaaatacccattttttacataagggtaatttacaatggggccaaaaagtaaaactcctccttgttgttgaagatcaagaaagaaagaaaaaacttactaaattataagctcatccgcgcctctcttcattgagttttcatatactaattttccttttcttcatttaattttaggaaaatatatatatgttttattaagtacgtctagccccaaacaccccaaatcctctccccaatgaaattcacaaaccttctcacagaccctttctctgatgccattgactcatcctcatcattttcatcaccttcaacatgactctgactgtgaccgtgatcatcgcgacgactgcacaacccttggaccgattccgagagacacaaatcttcctttgatgacctcgaactcaactcggacccattcaactcagtacccgaaccacgaacactgccccgagtaggcgtagtagtactattattactacctctcttgttccttctctctttcttactagtcttccctcctttgttctgagtcagcaactgatcctcgaacgcgtcaatgatttcgtgaatgagttgccgattcggagacgatccccacctcacccaataactcgtgtagcacctgaaacagtcgcagttgaactgcggcgggtgatctttaccggaggtggagcttgtgaagactgtgttcttgtgctgggaagcggctctactacttctttggctcggagcagacgagaagtttagggcgccgttggagcaggagatgagataggccaagatctctctgtcttcaggagtcaaagccaccgtgagggtgaggatagcagccggtagaaaggacaggtggtcggatatgattggcggtgacggatgaaccgtccccttccggtacagcttcttcatcgctaagttaaatttttgagagaactcagagagagagagagaagagagagagttttaaatttttgatctaacggtgactgagaagtttggaccttaaagagtcactgaaggttatattctgagaagagagagagagagaggaagacattggagttggtgacatgtgtcggggtcttattgagggaataatcatgtgcgacgcgtatagtgtagtctcaaattttactgaataagatttgtttggacatttggtgacttgatcagagaccgttgattcgttatgatcttatggttactactcccagtgtatacgtcaatttatcaagtagggttgttgggattggtcgctgcttggtcggaaatataaaataataaattattataaaaggggttaagtcttgggggcggtatgggccacagataaacatcaaaattattcatcttttatgtttgttttattagaaacaaaccctaacttaatcccaagggagacttcttttatattgtatttatttgtttatttttagaaaaaagaaaattataatttattttttttaacttaggtttacacaatatccttatcagtcacctaacaatatatcgaaaaaaacgaaaatattcactagttacaaattatgtactattctgattaaatgaagtcaaaaacccagcttatcagttgcttgaattttttaatatttttagagaagaatcacttgcttggagttctgatttataaatttataatttaatcacgcgtaatttcatttgactttttaatactttgttgtgcccttaccaaatgggaatctccttttttctttttttttctatttttttaataatgattatgaatattcgtttattgactcaatgaagtccatatcttcttcaacaggacagcaatggtattttaagatggattgtatgtacgtagctactagctagctttccatgacaaatacaaagagtaagttccaaatggtatggtaattatttactgaaaaaaaaatagtagttagtagaataaagataatgtaacaattactc

SEQ ID NO: 187560 - DNA, 2000 bp, Cannabis indica
tacatcattcgttcagtaaaatttgtctgtaaaatgttgtacgtcttctgttatgttagttaatgcacccattagttagttgaattctttctttttcctatttaaaggcctttattatttgggattgtaacacaattcatactgaattgagcgagattgagatcgagttggagagagacatagaaagagagaaaaaaaaaagagtgaagagagttggaaaacttgaccaagattagtgctctttgagttgaaactcaagctgagtttcaagggtattcatatgtaattgttctttaggtgcactcaacaactcaagctaataattcatcattttaatggagaagatcactcggtagaataactggaagtaggccctttggtttggtcgaacttgataaaaatttgatgttctttactttagttttttgcaattttattttatgttttaattttcttattgatttttcattgtttattcggttttgatttgttgaaatgttcttggtttgagttctgtgttgttagaatttacaacaatagtattagagcttagaatttcgagaaagagaattcaatcttggcaagctgtcaagattcaagaaccattggaacatggcttcatcttcaacaagatttgatctggagaggtttgatggatcaagaaacttcagtctatgggaggagaagatgacaacaatattgatataccaaaaacttgattcagtacttgaagaaggtgttaagaaaatagagaaagaagtcgatgcagccaagaagaacgaaagtgatactgtgatgaagcaagtgcaatctataataaccatgaatcttgcaaacaatgagttgctctaggaatttggagcaaacttgatcaagtttaaatggcaaaatccacagcaataaagatcttcttaaaagggaaattttatggttttacgatgaatgctactgtcttattaggatagaatttagatgattcaaatagaattgctcttgctcttactaacatggggggagccattaaagaagaagatcaagttgttattgttcttaatggtttgcctgatcaatttaaagaaatgatagtttttatattgtatattagggacactctcactttggaggatgtaatgagcactatgaaatcaagggatgttgaattaaattagaaaaagacaataaagcaagagtcagggtctgatgaagctttaatggctcgaggtagacatcctagaagaggaaattcaagattaagatggcttaagatccagtgacaattcaagactcaaaaggaaattcaagatccaagtcaagaccaagggaaaccagataatgtcattgttatccgtgtttgcggaacaggggcacgtgacaaaagatagaagatgatgacctgaataatcatcgcttaagtttctttaattgcaaaaggtcgcagaaagactaagataacctggaagagacctaggtttgggagagatttagcaccttgccacaagataaagcaaccctccaggatcgaaagccttcccagccttccaggattcaggaagattaaacctactaagtctacatggagatacctggaagccatttgaagataagacggatgtcttgtatacagggaatattggaagcctactacgaagtggaagctagacgtctccctcgacgtgctacctttttgacataggatttgatcttgtcccctatgtcagactatggtagtgtgcgcacctcttctgaatatcccattttttttacagccccttagagcactttttttgccagacatgactttttcctgacacgtgccctgcatacagtggttctagttgtacaaaaccgtcaccccatgagaaaaaaccttctaaggggtccaatagtcatgtatatactatataatgtattttaccctaattgtgagcagaattttacaaaaccctacacaggtcacgggtatacttgggcctaaaatttagcctatataaaccccttca

SEQ ID NO: 187561 - DNA, 5611 bp, Cannabis indica
aaggaaaggaaataataaacggtaaaaagaaagaaaaaaagttgactattattgacctaatgggaaactagaagaatatcatattatatcttcattaatgactcgtatttaatgccacatattaaattatttatgaaataaaaaattaatatccaatttgacatttgttaaattatgttttttgaattttttttctcgttaaaattttttttcgaattattaaaattgttgaatttaaaaattttaatctaattttactaaagaaagtctaacgtggatgaaaatttaaaagagacacttcggtacatattaaagtaaaaaaaaataactgcggtgaccgggagatacagctactgccgatcaacgttagaggaggggattctaatccatatcctcatgctttctttctatcttatgaattcgttggacaaggacggcgcggggtggactggtgtgggatcggctgtcgaatggctgtttattgacgcatctggtaaaaatttgtgacatttatgtatcattttttaattattatttaattttatttttatttgttaaagatgtggttagtgacatcagttcttaattttttttaggttgaaaatagtatttattctttaaaattatctgttagtgaaaaaaaattacaaaatatgctatttagtcagtttgtataaaatcccttagaaaaacatataataaagaaaaaacgtgggtagttttgatgaaaagcgggtatgttggtatttttgagctggcccaatatgttaagcccaagcccaagcccaagcccaatcataaaccaaaggcacatcttcttctctctctctctctctctctctttctctcttggcctattttggctttcttcggttctgtcactcaatcaacgctaccctagaaatttgatcgaacttagatcggagattggagagtacgaattccgtttcactcattcgtcgctgaattaaacaattgcttcgctcaaaacaggtactttacttagggttttgcctggttattttgatttgtacttgtgctcattctctaaatttgttatgtgattttattgtatgcttttccctccatctggtattattagttactttgttatagttttctgggaccaatggttctagtagttgcctcatttgtcttcatatgttctttttgctatgcacttttcttttaatatataaaaatctctccttgttttttttttttttggattttgtagcatcttgaaacaaaattttcgcttactgaagtatgtgaagtggtccagagaattcaaaatctttatcttcttcatctactgatgaaactgcgtctaacacataagaaatgaatggtcttattgttaaaactgaaaggttctgcagttacaacttgttcttcttattattagtttgatatgattagatattttattttatttaagctttccttaacccaatttttcatgttcaggaggcattgacgctcgttaaccatggtgctcattacatccctaaaccagaaaacattagcattaaacctaaaccctaactccaccactcttcgggacctaaagattgctatcagtgaaatatctggcatacccatttctctacaacgccttttcttctctcaaagccccaaattgttctcaagcaccgattccacactcctctctgagctcggtgttagaccttattcaaccctaactctccatatccctttgtttggcgggatgcaagcccctactatccctaaaccgcgccttgatttcctgaactcaaagccaccgtccaattatgtcgctggtctcggtcgtggagctactgggttcaccactcggtctgatattggtccggcccgagctgctcctgaccttccggacaagtcggctaccacaattggcggtgctggggctcctgctgtcggtcgagggcgcgggaagcctggtgaggaggaggaagaggatgatggcgaggacaaaggttacgatgagaatcagaaatttgatgagtttgaaggtaatgatgtggggctgtttgcctccgcagagtatgatgaagatgataaagaggctgatgctgtttgggaggccattgataagagaatggattcgaggaggaaggatcggagggaagctaggttgaaagaggagattgagaagtaccgagctttgaacccgaagatcacagagcagtttgccgatttgaagaggaaattgtatactatgtcttccaatgattgggatagtatacctgaaattggggattattcgttgaggaataagaagaagaggtttgagagttttgtaccagttccagacactcttcttgagaaagcaagacaagaaaaggaacatgtcactgcattagaccccaagagtagggctgcaggtggcgcggagacgccatggggccaaaccccagttaccgatttgactgctgttggtgaagggagaggtactgtcttgtctttgaaattagataggctttcagattctgtttcagggttaactgttgtggacccgaaggggtatcttactgatcttaagagtatgaagattactagtgatgctgagatttcggatatcaagaaagctagattgttgctaaagagtgttactcaaacaaatccaacacacccaccagggtggattgcggctgcaaggttagaagaagtggcagggaagattcaggcagcaagacagctgattcagaaagggtgtgaggcgtgccctaagaacgaggatgtctggttggaagcatgtaggctttcaagccctgatgaagccaaagctgtgatagcaaagggagtgaaagccataccaaattcggtgaagttgtggatgcaggccaaggatttggagcacgatgatgtaaataagagtagggttttgaggaaaggcttggaaaacattccagattctgttagattgtggaaggcggtggtagagctagctaatgaggaggatgctagacttttgcttcatagggctgtggagtgctgtcctttacatgtggagctgtggcttgcacttgcgaggttggaaacttatgatagcgctaagaaggttcttaataaggcaagagagaagcttccaaaggagcccgctatatggattacagcagcaaagttggaagaagctaatggaaacacttctatggtgggaaaaattattgaaaggggtataagggctttgcaaagagaagggctagagattgatagagaagcctggatgaaggaggctgaggctgctgaacgtgcagggtctgttgccacttgccaagctatcattcacaatacaattggaattggtgtggaggatgaagataggaagcgaacttgggttgctgatgcagaggagtgcaagaaaaggggttccatcgaaactgcgagagctatttatgctcatgcactcactgtcttcttaaccaagaagagcatatggctcaaggcagcacaacttgaaaagagtcatgggactagggaatctcttgatgctttacttcgtaaagctgttacgtaccggccacaggctgaagttttatggcttatgggagccaaggagaagtggcttgctggggatgtgcctgctgctcgggcaatccttcaggaagcttatgctgctattccaaattctgaggaaatttggcttgctgcattcaagcttgaatttgagaaccaagaaattgagagagctagaatgcttcttgctaaagctcgagaaaggggaggcacagagagagtatggatgaaatcagcaatagttgaacgagaattggggaaggtggatgaggagaaaaggttgcttaatgaaggtctgaagcagttcccatcattctataagttgtggcttatgctgggacagctagaggagcggcttggtcgcttggaaaaagccaaggaggtttatgagttgggtttgaagcactgcgcacattgcatacctctttggctttcacttgctaatcttgaagagaaaatgaatggactgagtaaagcccgtgcagttcttaccatggccaggaaaaagaatgctcacaaccctgaactctggcttgctgcagttcgttctgagctcaagcatggcaacaagaaagaagctgacattttgatggcaaaagcactacaggagtgtcctaacagtggtatactatgggcagcctcaattgagatggtacctcgtccccaacgtaaaaccaagagttcggatgccctcaagaaatgtgatcacgatccccatgttattgctgctgtggctaagttgttctggcacgataggaaggtggataaagctaggacttggctcaacagggctgtcactttagctcctgatcttggtgatttttgggctttatattataagtttgagcttcagcatggaagcgatgaaaaccaaaaggatgttttgaaaagatgtgttgctgctgaaccaaagcatggtgagaaatggcaagcaatatcaaaggcagtggagaactcccaccaaccagttgaagcaattttgaagaaagtagtggtcgcccttgggaaggaagagagtgcagcggaaaaacactagcgactagctcttctatgttgtagattttttcgcctctcccttaaagatcatgtggtagaacattgtaaggataccatttttataccgggtaactttttatcctcttgttcttctgaacttgttcattcatttacactattgttaggaactggtctgatacttagcatatttactgtattttttcagtgcacccataatttaccttgacatattggctatattgctttttctaagcgtgttacttgactcttttgttcattacttcagttttttctgctgattcaactgaaatcaggatggtttgtaaactatgtactgtttgatatttagattttatacataaagtaacctagtttagatagttgttcaatggtcatttcccctccctccgagccgaactattctgccttgcaagtgttcctcttagtaacacgatatatttccccgtctcactccctccccagtatcaagaaaataatttgtgttgttatgaatgcactgcagatttccttgataatctgtaaatcttttgatttcgacatattagatgacatgacaaacaggaagtgcatttcttctaattatgatttcttgcccaaataataatcaacctcatcatctccctcccttggattgtttggtaaagctatcctcttggtattgatagagctttagttagagggagggactagttcataatactgtgtttgaagacacatacagacatatatccatagtttagtatctaaacatcatgcattgataagttatcattcataatatcagtggaaaagggagtggtttcaccctctggttcaaaggtctgtttgatattcgaggatttccttctcacgaaatgcttgagtaatcgcgcttgtagggcttatacaaaactttgataacggttgaaaacgaagtggctgcgccctctagttttgaatgatatttgggaattttcttcttggtagatagaatctatacataaaagattgaaaatgttagatcttatttttatttttatgcagttacaatgaaataatcaattcagttttt

SEQ ID NO: 187562 - DNA, 822 bp, Cannabis indica
tttcgactttgactcagtaaaaaactttttatttctcctggcagtacttataactgatcggatcggattagagattatacactatatcaatgaaaggaatatgaatctaaggatttattggtacattgtgtcattgcattggtgagctggttcaacattaagaattggaattcatctttgatgcttctttcatttactttttgaggtacttgtggttggggtttcattttgttgctttaggttaataaaaagattattttgatattttcttgaaaatatctcagaaaaaggaaaaataaaaattaaaagcaccataatcttacttgttgaagacaaatgtttcacctttaaacatctatacatggaaatctggggatcatatttgctaccagtaggcataactgagttatcgaattcacgattgaatatccagtttgcttaaccagttcaatgcttcttttaagtgtgtttaatcacctgtgctgtattcatagaaagattgcttattcagccaaacagttgatatatggggaacgtatattggagatcaaaaggagtgaaattttcttatcctcttaggtcccatccgatgagaggtcctttgtttatctctttatagaaagcaagatacggcttggttgcagactactgtttttaatgtgcaaattctgaaaagtaacagttgtttctttggatgggcagtggactggaaattttctagtttccttcagttactaaccattggtaggaatgttactaagcatgagtgaacctaaggtttgtgtgtcgacaacaaacaggaacttcccaggccgaatagga

SEQ ID NO: 187563 - DNA, 4664 bp, Cannabis indica
tatatcaatatcataagcagtataactagaatagaacctttttatttaccccgggagtagatgatggatcaacatcaaaagtatacagcccgctacattctgtcgtacttccaatcatcttccccaaggacattccttcaaatcacaacataattctgagaaccacgtgttctgtggtgtagtggtagagatgcctttactggcatctttccttgcgtgagtcaagagttcgaaacccaccacaactcctcttgaaaaggattaaaggcttggccttctgaaggctagcttgctgtgggtggtgtcatctatgatgggaaccctctcgaggtgactaccaatgactcaattaaggcatactgaggtataagacccttatagctgacacgtggtccctgggattgtctaaatgacagaagggaaggggtgggaagggatctgcaccacatgatcctctttttttttttagatcaaaaaaagaaaaacataattgtgagaatttcgcaatacaaccttgatcaagggtaagttcactaattgagaggtgattacaagatagatttggcacatggaggacatttttaagagtaaggaaagtagaaaggtacattgaacctttaccaaccacaattgatagagagccatcaacaatttttgttttactagaacttggacaagaactataagtaatgaacagttgagattgaccaatcatgtggtcaaatgcgccaaagtcgattatccatgatggggtttaagcaataaatgcagcataagtgcttggagtggaggaagatcataaagagttcaatctggtgcagaagtcgaatcgagcagcttatgaagttgtgcaatttgtggtgaaagggaatgcctcaagttgggtagcgatcatagcatgcccttcaaaattttaataaatgttatatcatagcatgccaaatttgacactacatttagatcttatattgtagatggacttatagaagagtaaaaccctacctttgactaatttatggaaaaaaaatgtcaataccttctatcttccatatccttctattgagaacaagcatacagagagtaaaagaattttaaaatggatagagcgagttttgccaaatatcaacatttaggacgctctttgaatctttcataaaagatttcaaagtcttttcattttctaagcttgttagagtttggcagtttggtagtagtatgtgctaagcgttattattataagcttataagggtgttttaggctttttcttccccttattttcatgttattttattatctctttccgtttataaaggcttgcttgttattattctggtaataaaaccttttgcaatagactctagcctgcctctacttttctctcttcatattttgcactttgtcttttggttctatggatgagcatgctttgcataattattccagtatccagacaaggtttatggaattgattttgttcagcgtaaccataactttggtacgggtggagcaccatggcagccatgagtatgtgaactttgtgtttaatttggaattttaaggtttcattagattgtgaaatatgcagtctattgtttgagttagcatttgaaggtttattttgtttctgcaatgggtagtaatatagatgatttccttcagtccattagcattaggttagatggaaagaattgttcgtactggaaggcaaaaagatgcacagttatatctctcgaactatggttaaacccacaagtgatattatgcaacttttttacaaaattgagaagtgaataattcgaaaattatcacttgggtaactttgtaaagataggtacgcaactagccaagtatgagacaacgaatgaagtttgggaacatcttgcaagattgtatacacaatctaactttgcaaagcatatcagtaggaatccgatattacagctcttgtatcgaaaaacatgaatattcaagagttttacttaattatgacatatttttggatcaattggctattaccaagtctatagagctacgagctttcgcaccttatattgcttgtagggaaaaacaatgattggtcaatttttaatggcactttgtgatgactctgaagcactctgtgactcttatttttcatcaaattccatttccttcaattgattcaatggtcagtgagttgttagtagatggaattcgtctaaagtctcaagagtagtaggaaaaggcattcttccaagttccaacacctagtccctttgttttggcaattcccctagacttttttcccaccaagagaataaacttaggttgggtcaatgaatgcagtttttgcaaacaaaatggttgctgcaaggcctaatgtacctcagcaataaagttagcagtagtttagacctcctcatcatggaaaccaacaaaagttcaataatccatcgcctgcgccctccacagtttaatgttgttgcaaccatacctccattcaatatctaatatctggtgtgatgatagagtctttcttttcagatactatttatctatcatccttattttctagaaaaaaaactaggtcaagctaaatcttcaaaaaaaaattctagttttttcttctacacattctgaactcctcctttctctcttgtttttgcatcgataccccccaacttatgctactgataaaccaacattaatgaaaattgagtaaaaaaattgtagagacttaaccctaaacttcagttaaaattattcatgaacattattgtagtccactaaattagcttcagcaaaggcacaatacatgatgaaaatgaagttacataccaaataacacaatttctttctcaccacaaatgataaaaaagacacttacaatctttccatccctttttgcttcttccagcttctggtcccaactttcttttgtattgatgatgatcacattgctatcagcgaactcagcattatgatcagagtcatctccatcagttttaggctgcaagaatattgaatagaattaatcaggtaagtgctgcatactcaggggcagtagaaagggaaattcatttaaactacagcagaaaagaataagcttagtgcacactattttttttttttcgtaaaaaagcttagtgcacacatgactgaagttataatcagaaaacacaggtgcagaacagaatgtcagagagactttgtcgaaatacactcataaaattatgtcatgataaagaaaaaaaaaaaaaagaaaggtccttcagaaaagatcctttatgaaaatttgataattccatttaaaagagaaggggcagttaaaaataaaagtacagcactttcttcgtgaaaaaatgaaattaatttctttacccgtcctcaatcaaagtttatatagctcagaataactgactgattcaatttacatgggacactggaagtgggaaagtattgttttgtctccatgcttctattacataaatttatacttgtcttgaaacatattggacgttccagcaacttaacacagtatttaccggcatacagtcattgtttgttcactatccatgtatctcctaaaaaatttatttccaccattagaaggctagttaaaaatcaagtatattttctaaactatctgatcatcatttttcttctttagaaggctacttaaaattcaagtatattttctaaaccatttgatcatcttttttcttctttttctcatgttattaggaaaacatgtccttcaattgcatctgttatctttcattttcccacaaattaataataaaataataacaataataatccataaaaatcatccagatctctcaaaattattgacttcattccaatccaaacatatcattaattttaaaaaaaaataatggtttcttgcttcagttttgcttctttcagtgaaggagttcaataattagtttcatacagattcaaaggctatctgaacaaattcctaaaagaacgaccataaataaacaatatcctaacttgaaatttccagaaaaagaaatgttgccaaaagtaatgaaacaataaacacagaaaaatttcaaaaaataaataaataaagaccagaaagttataacttctaagaatgcaccgaccttggtcacacaaagccccatgctgagatgtttgaagccaaagtagtgaataacagtaccctgaaagttgaaagatcaatagatcaattttgttagcttaactgagggaataatgtcttatattcatcaaagaaaataaaaaaataaacacagaatgattggtgttctagccatgttcaccaatcatttcagccacctacaatccccaccaccccttccaatatatttaatgaaattaattgaaggtacagtatgctttaaaaatacccttacgaaccatgattatggatcttaacatcaaacaaaaaaccctcctcaagtcaaaaaaaaagtaacaaaaaatggatatcccaccctatttgttaataaataacagaataaaacaaactgtgttccctaaagttgaaagcaacgccagcaattcaaaactttgccaatctgacacatgccttaataatgtgatgtaatgtgataactaccctttgaactgaatacattatgagcatcatcacgaaattcaacatgcctctctcaaaaaaaaaaaaaaa

SEQ ID NO: 187564 - DNA, 4153 bp, Cannabis indica
tttaaaaatttacaaataatttttaatagttacaatatacgcaatcataaaataaattatacaaaaaaaatttaaataccgaaacaaataaaaaatctaccaaaatctacaacataaatttcctatactttctcttttattcaatcatgaagaaagaagaagagtttgaaatgacccatgatgagaaatgagaaaggtaaaaaagtagagcacattattacatccacaaacacaacactaagacttttagaagaagaaatgaaattgggcataacaaatagcaaatgctacctccacacacacactttacacaataaatgtaacaccacaaaccaattatttattcttattccaaaacatccaaatacaaaactttattctttatcacttcttttttaattttacattattttttaggggtaatgtatatatataaatataaaagaaagagataagagagaagagaagaacacattgttctctttcgataaaaccaaaacaataccatattatgttaaacgtgttagtaataaggaaatatcataactggtacaaaatagatttttatttatttatattcctaattgtgtaatatgaccattataccctctttctctcaccacataaagaaaaggctaaagctgcaccacagtaatttcatctagggacgctacacagacagagacaacacaatatcatgccaaaaacacaaacttgcaaggaaaaaccttcttcctttattatatctttatggaaatttctcattttggtagaattttaatcactagttttttagtctaatttatctaactattttaagattatttgtaatttttttaaaaattttaaataacttaaataaaatttaaacaattatttatctcgcttatagaaaaacaatggctcaaactttattttcaataaaaacaaatcaactaaaaattctcttaggtatcaaaatatggcctacccaaatactccttagacttagcctatctttcttaaccacttatacatatatataattagttaattattaagcttaaaaagaaaaagttaatatatatatattaattaatagtagtttaattacttaccaatcatggcaagagagcatgaagtgatcagccccaagagttcgattccagaaaggatatttcctagaaataaggtcaacatagtcaacgacagtagttttaatagaagaaaggtcattagtaccatctttgtaaaggtactgaaccattctaaccacactaaaaggcaagaaataaagtaaagctctgtttgggtctctggttctaaacactgttttctctttttctatctcattaataaaccttccttcacttgagtatatgttcttgcatggtccttcatggaaaattggaccttctccttcttcatacacataaatcttcaacaccttttccatctctaggtagctcctgtgaaaccctcttggattcctgtagattgagcctagtttaggattaaagtcccaatctttaatactagtgttactgttcttgttcatgattatatctctggctttgaccaaccttgcttctattttctccaaaaataggttactttttcttcttcttcttctattactaatcctctggtcatggctcccctgtatatacatatagagagaaagtaattatatatacatatatagaccttagttttggctgagcttttaaaagctgttttagctctaattttctcgagaagagctttctcggatactaaaatcaaactcagtcaaacaagtctttatagatacatatagagagaaagtaattatgtagacatatatagaccttagttttagctcagcttttagctctaaaaaaactcttttaatagtaattttctcgaagcagaaacttagccgaataggataaggaaaaactttaatgttattagttattgaagtatcatcataagtggttttagaggttaagaaagtggtaaagagttaataagtaatagagagaagtaagtaccattaattgtggagctggtgcagaagcagaagcaggaggaagagatatggtggtggtgagtactacttgttgtagtggagcttgtgctgctgctgatgatgatgatgatgatatgagtagttgaggttgccatggattatgatgatcattctcatcatatataatagaatcattattatcaataagaatatatgaagatgaagaagaaggagaagatgttaataatgaattgttggtgttggttgtggtgaaaaacagaacaaaaataccaagcaaaggtattatgggcaacactaagtatattagtgtagaagtattactattaggccttgctttattatacatctctagctagatacataaatatatctctttctctgtttttgtgagttgagagaaagagaaagagagggagatgttggtgtattggggtttgtttttatggttgttccttccacataatattatatggagatatatagcacacactacttgatgaataatgatagtcataataagatagggatttgagattagagataatgaatatatattgatgtagaataggtcatgatactcgtgttggatgacttcactgacactctcagacacaagtagagtactggacccttttctttctttgtaggactgtaggaccaccattactaccacatatatatttatacacaaatataatctaatatgctttattcatatcaacaacaacaacaacaacaaaagacttatacacatgatatattatattatatatcacacactctcataattcataatttcatatatatacattgagtcgacatattaatatttgttattatgaagtatgatcaaaggaagttggctccacactctgcacatatatatacagagaatacatagtactgtaactacttattcccctcaataataaataatagagcatattgctattgagtttagtacttactttggtatagaatagataactctttacgattttaaaaatgatttcttttaagtatatgagattcgatatttaattatacaaaggtataatacaactatacaaatacaacacaatatattattaatttcttcttgttcgaaatatacataaaacttataattcttcttttgcttctttttttgactacacataatatgaaaatgaaacacaaataaattatttgtgtttcctctcattaattacaattatatacttatatatatatatgaccattatacagagaatacatagtactgaaactatttatttgtttcaataataaataatagattattgctattgggtattgtggagtgagatctaatagtcccatgattcgtaaggaaaaatatcgggatgtgcaatcacacatcatttagggaaagtcaaatgtaatgattctgagactgggtaggtatgagattatacagttgaagatggcttaaatagattgattggtattacttatatcaacaaggtatatcttgttttctagtagctcatcacgaaagaacttcactgtaagcatgcttgacttgataatttcaggatgggtgattttctgagaagttttttcaagaagcataagtgacatactcgtgtataagagtcatcattctgtggatgtaagggcccaatgaaagtttgaagcgggaacgttacaagtggtgtctagtacttttgtataggtgatacttcatgattagttagtaatattccttaaaacttattttttaaattataaaaatttatacttaattaaattaatattagtatgatacagatgaagttgctaattgtgcaaataaataataatgcaactataaaaatacaacacaatatattattaatttcttcttgttccaaatatacataaacttatgattcttcttttgcttctttttttgtactacacataatataacttacaattacattatacatattgtaacaatatatatgaccattatacccctcatcattagtcattacccttaaaactcgatatatcgttctcaacatgtaaaagctgcatatatataatagagatgcatgaaaagctactttcttcctttagttgtctttcttttcttaattaacgattacatacatatataattaagtagttaat

SEQ ID NO: 187565 - DNA, 3948 bp, Cannabis indica
ggcgcaggctgatgctcagcctcaccaatctccatgaatgttgtatcttggaatgctcagggcttgagcaatccaagagcattccaacaattttgtctgctcattactcaaaataaaccagatgtaatctttatcatggaaactaagcttagtataggctctctttctaaatttcgtactgcatttaatttccctaattgtattgaagttcctagaataggttttagtggtagtttaatgtttctttggaaatctaatgtaaatgtattatcctaaattatagaaaaaaaaattattgactgttacattgctctcaatgatggcccctcttggcacttctcgggcttttatggttctccgattgttattcaaagaaaattcacatggaaacttctaaggaaattgagggattcagcacctttaatgccttggcttattatgggtgatttcaatgaaataatttcacattcagataagctaggaggtcttttagagaatgagtcacagattgatgatttccaaagcacaattgatttttgtggattgcaagaattaatctttgatggtgattgtttcacttggcacaataataatgttaatggaatcaatgttaaggagtgtttggattttagctttataaactcctcttggatgaatgttctcatggttccaaccattttccacttggacttttaccaatcaaatcacagggcaattaaagtctcaatctcttaccttcaaccagaaccagcacctaagttcaaatatcgtttcaaatttgaaaggctttggcttgaagatgatgcatgctctgacattattgcaaaaaattggaacactgttactggtaattcgatttctcaacttctgcaaaattttgcagcgtgctttcaacagttgcaatcctagcatagaaacaaatttggagattttcctaaaaaaaattaaaatctcccaagaaaaggtagcagctctcaataactcattagatgttagccgtatgcactatgaagagcttaaatctagtgaaaacatccttgatgacttgttggctcaagaggaaaagtattggcaacaacgctctcggacttcatggctcaaatcaggtgactccaacacaaaatttttccaccaaagggctaataccagatgtaatagtaacaagatcaactctctcattgacattaacggtataacctgcacataacatgttgatatctgcaacatcattgaggattactttcggaatatatactcatcggctagggttgataatgaagctttaaatcatttcttggctactgtaccgtgcactataactgctgatgtaaatcacattcttgttcaaccatatactgttgaagatattttcaatgccctttcttcaatgaaagatggtggcagcccggggttggacggcatgtcagtcatgtttgacactaattactagcacattgtgggtcacttagtctctacaacagtgttgaaggttcttaatgaaggtgcagacccatcaattttcaactaaactttgataacattgattctgaaggtcaaaaagccaacgtctatgtcccaattgagacctattagcctatgtaacgtgttatacaaattggtttctaaggttattgtgccccgtttgaagcctttcctgtcaatggtaatttcagagtcacaaagcgcttttcttcaatcatgtctcatcactgatagtcttggttgcttttgagcttcttcactctctaaaacatttaaagagaggaagagaaggatatgcaaccattgagcttgatatgagtaaggcatttgatagagtcgaatgacactttattgaaagaatgatgattgctatgggatttgattatgcggtggtaaacctaatcattcgatgtatcagcagtgtatcattttctttcatagtaaatggttctactcatggtcatatcaccccacccggggtattcgtcaaggcgaccccttatccctctatctttttataatttgtgctgagggtctttcaaggttatttcaacatgaggaacatattggaaatctccaaggtattcaaatttctcgtggtgcaccaatagtctcccatttattttttgcagatgacagtcttgtgctttgtcgcgctaatagaagatttgctatggccatcaaacgttcccttaattactactatcatgcctcaggccaatgccttaatgtggataattcaatactttctttctcacccaataccttgcctgctatccaaaataatttccaccagatcttacaaatggccataaagccttatcacgagagatacttgggattaccatcctatttgggcagggacaagaatattttttttggtaaaattaaggagaaattatgggattcactctcatcttgtcaagagacactgttttctattggtggcaaagaagtcttactcaaaacagttgcacgatcgattccgacatatgctatgagttgctttcgactattaaaatctcttatcaaccaaattgagaccatgtgcaataaattttggtggggttccaatttttctttatctggcataaactggaaaacatggaaagctttcactcaatcaaaagtggaaggaggtgtgggattcaagagtttagttcgttttaataagcgctactggaaaagcaagcttggttaattttttcaaatccaaattctcttcttagctgaatccttaaaccgaggtatttcaagaattcttcttttttagatgcgaatttgggttcctacccttcattaacttggagggggatcgtatggggaaaagaattgttattaaaaggccttcgttggaaagttggtaatggcaccaatattcaatgtgctacggacccttggctgtcaggtactacctacttcaaacctatggtttttagaggccaaaatcagacaatgacagtctcagatcttattctggacaataggcaatgggatcatgaattgctactgaccttttttttttttgaatttagatgtcataaaaatccaaggtatacctttaactctctttgaacaacaagacaagttgatatggcatcatgaatcgaatggtctttacccagtcaaatcaagttataatttagcaacaacacttgaagaacatcaacccactgccagtgatctgcaatcacaactgtggtggaaaacattctgggctttgaaaatcccatctaaattttgtattttcttatagcgtgctatccatgattatctccctgttgctaacacactccatacttggcatatattagattcgactaactgttctttatgcagcagaggtatagaaacggttacacatgctttattcttctgcaaaagagctaaaagtgtggttgtccactgatttcgccatccaggagctactcacgcaaaacatgaatctaaaagagttttctacttcatttgtcccctacttggtcatcagttagaattgagcaatttgcaaccattctttagagtatttggatggaatggaacaaagaatgtcatggtaccaatctaaaaccgcatgatgttattctctactatgcactctcgtacttggaggaattcaaagttgctcaaatagttactctagctgttaactctgctcttgatacaatctcaacttctgcaactaatagagacgccccttggttaaaccctccttcggaccatctgaaattgaacactgatgcagccattaatgctactttccagacctctggttttggagctgttctacggaatagtaatggagaaattgtggctaccatggctactccttatcgcggctgtttttcaccacaagtgatggaagctttggctcttatgcataatcttcaatggctaaaagatcttcaactacctatgcacttcattgagacagactctctcctagtggttaaaggattactttct

SEQ ID NO: 187566 - DNA, 672 bp, Cannabis indica
cttactataaaaatgaacgacatctggtaagtgagaaagtttgtttgaacattagtatactagtactactatatctatatctatatctatatcaaaatttaactttgtcttaccagaaatttataatctacctaaagaaaattgttgggtagtgattgtgttttcttatcactatttataggtacttttagtaatttcagtacatagataaaatgtaattatttttaaagtgacggtgtataatatagttacaagggatctttgattttttcttttttcagaaaattcgggatgatttaggatgctgaaattatgattcaaatagctaattgtacacacgtttgttttaatattaattggcgtgggcaattagctatttcaattaagattttgggataatttcataaatacctgaaaataacaaaaaaattataaaaatacggttgtacggaaatttaaatatttttacggtttttaagattttatttataaaaaatgcaagctttttatgtttttatgttttcatgttatatttatgttatactcttgttattgtgttgttttgttgttagttttttgtttttatatattatttttatgttgtttttttgttattttcatgtggttttcttgtttttttataggacgctgtaaaaatgtcaaaaaaattta

SEQ ID NO: 187567 - DNA, 1883 bp, Cannabis indica
aattgaattatattatattaaattttttttttaaaaaaaataggattacctctggtagagtaattatatttctatatataagcataatctttttgaagttaaaacacaaactttacaccaatatatgtgaatgtgaagtgttattagtctcttggaaatatattacaaaatgattttctatgtaaacgtgttaaaaaaaatgtacaaaataactcgctatgttagtatatattttggtcttctgtagttatttgtttctttttccaaacactctaccgttagttttgtcagttttttttttatttttttcaaacactctcttgtgtccaactttctttttatatatataattacttaggcatatatatatattattaattagttctatatttagtgaacaaaaataaataaattagttcttaaattttaaccataaactaatgtataacacataattattaataacttacactgattttgatattatataatgaacttattactatgtagcataaatgttccaataatatgttagtatactttgattaatgattaagttcttaaacaacattgtgatcactgtctttttcaggcttctatatatttgccttcgttattaataagcaaaagcaaattattataagctttccttcaaaaaaaagagaaaaaatttaattattgaattgaaaaggaccagccagttgctaattactaaatttgtcattcaataaaaaaaaaaataagacatgtatatgattacagacagattggataactcaaaacactatctacatatactacaataaatattaaaaaaaaaagagagagaactgaatagataaaaaaaaaatgtgtccaaattaagatttttattgttattttttgaaaataaattaagttactgataatcttttcttcatatgaaattattccaaaaataaaaagaaaatacaaattaattgcaagtccctataataaaaagttgaatgtataagacctattgccaataattagtattcttttaaaatggaatattctcatgaattgatcagtgtgagtattatttatatatagctcacaatattaagagagctatcaaatatcaattagttttaaaataataaactctattttacctttaaaattacttacttataccaaagaaaactaatttatcttaccaaaacctccaatatggatctaataacattactatataacaataacaatttataattagtcataacttttatcatttaacttttagtatattgagatattatgatcaatagatgaagaactaataattctacatgagtaatcaacatttaatggtctccaccaaataagggtcggatccaagaggaagacaaattaattaattaaattcatcctttaaagcaatctaaactcattttttaaattaaatttcatgtaacaatactaccttcaaaaaaaagtattaactgtataagtattcttccaaattaaattggttagattataagttggtcggaaaaatattatttcattgcttagaattaacacaaactttaactatatatatttgctcatagaattggtgaagcaacatgttcattaacacatagtgactaagttattgtggttaactactacaaataatattgtagccattacttaaattatggtaaagaattgtgaaatgtcattgtacgtagttgagttagttgtggtgcactagaaatattaatttgagcacctaaaatagtgactcaggtgacaggtccctctaatcaagtatacttaataatattaagagcattttttattgagtatgagtggtacttaatattttttttttgtagtatgatgccttatatttgattattaatattttttaa

SEQ ID NO: 187568 - DNA, 11164 bp, Cannabis indica
agataagagtgttcttggtgggactaaattgtctatctcttttcatgattccaacttcagtggatttcttggcattgttggtggtataataaagactcttcctttttttttttttttttaactttttgttgggtaatgacattatttaatgtttcttttatttatttattgcagcacttagatatatggggtctgatactgttgctataattggtccacaaaatgctgtaatggcccatgtactttcacatcttgcaaatgagcttcatattccattattgtcttttacagctcttgatcctaacctatcacctatacagtacccttattttgttcaaactgcacctaatgacttatttcagatggctgccattgcagacatggttagttatttcggttggtctgatgtcattgcaattttcactgatgatgatcaaagtagaaatggggtaactgcattgggtgataaacttgctgaaaagctttgtaaaatctcttacaaagcagcacttccacctgatccaaaagcaactagaattgatgttgagaaacagttggtacagattcgtatgatggagagtagagtgattgtcttacacacattttcctattcgggtaagcttgttttcgaagtggcaaaagagcttggaatgatggaatcaggttatgtttggatagcttcaacttggttatctactgttttggattcactttcaccacttccatctaatactgttaaatctattcaaggagctctcacacttcgtccacatacacctgattcagacaagaaaagcgccttcattgctcggtggaaccagttgagtaatggctctattgggttgaacccttatggtttgtatgcctatgatacagtttggattattgctagagctttgaaaaggcttttggatcaagggggtaacatttcattctctagtaacacaaacttaaaaagtcactcaaaagggactttgaatcttggtgcattgagcaattttgatggtggggagaatctactcaacaacatattacaaaccagaatgataggcctaactggatcactaggattcaatctagacagattcccaaggagaccttcttttgacattattaatgtaattggtaatggatacaaacagattggatattggtctaactattctggtctctctgttgattccccagaggtactttataccaaggcaccaaacaagtcatttgcacaccaacatttggacagtgtagaatggccaggaggaacaaggatcacacctcgcggatgggtttttcgggacaatgggaggaaattgagaattggtgttccaaaaagagttagttataagaactttgtatcacaaataaatggtactgatatggttcatggatactgcattgatgtgtttcgcgctgctataaggcaacttccctatccagttccttataagtttattctatttggagatggtcataagaatccaagctattcagagcttgttaacatggtttcatctggtgtaagtgaataaaaaaaaaaagacttgaaattgtatatgatgaactaaagagtgttcctactgatttttaagccttgtaaatctgcaggtttttgatgctgctgtaggtgatattaccattgtcacaaacagaacaaagattgtggatttcactcagccttatatagaatcagggctacttgtggtgacaccagtcaggaagttgaactcaattgcttgggcattcttgagaccatttacaccactcatgtgggctgtcacaacagtttttttcttttttgttggtgcagtggtttgggtacttgaacatagaataaatgatgagtttagaggaccaccaaagaaacagattatcacaatgatatggttagtacttctgtcttttcaatttaagctatcttaaacagaaaactttgaattctcattctcatcttcagttgtgattactttatggcttgcaggtttagtctctctactatgttttttgcacatagtaagtctctctactatgttttgaattcactttccacaatagagtaccaaccaactatgtcatatatcttcacaaaaactttcaggagaaaacacaatgagcactcttggccggtttgtgatgcttatctggcttttcgtcgttctgatcataacctcgagctatactgctaacctgacatcaattctcacagtacaacacttatcatctcccataactggaattgatacattggtaacaagcaatcaaccagtaggatttcaagtaggatcattcgccgaaaactacttgagggaagaactcaacatcccacaatctagactagttgctcttggctcacctcaagaatatgctatggcacttgagaatggaactgtggctgctgtcatcgacgaaagaccatacattgagctcttcctttcagagcattgtatgttcgcaattcgtggccaagaattcaccaaaagtggctggggatttgtgagcatttcaaacacaaaaaatccatttttgttatgtcatgctgcaactgattttaattttttctcactctttttcttgttgtaggcatttccaaaagactcaccattagccattgacatgtcaacagccatgttaactctctcagagaatggagatctccaaaagattcattcaaaatggttagctaaaaaggcttgtaatgcacaaatatcagactttcaatcagaacagcttccattacaaagcttttggggactatttgtgatctctggcattgtgtgttgtgtctctatttcaatctactgttacaaagttatacgccaattcaaactgagtttccctcgtgtgaatgacccttctggacatggaagctctcgttctgaacgtgtcatgcatttcttagcattcattgatgagaaagaggaagaccagtcaagtgtaaagacattgaaaagaaaaagaagtaatgatctttatgaaagtagtaatgggatagaagatgagtcaaggcataatggtagaacttggcctcagtagctaattgctgtgatagtatagaactaattgttttaacaagtttgatctagttttactattaacaaaaaatcatatttggaggaaaagtgttagagactctcacattgataatgttgtgagagattaatactatttataagatgcataaattacttttttttattgttaattaattttgagatgaaatttgtgcattttttgtccttatgttggatttttttgctgtattaagggttggattcagatatacacttaattttaagctaattaggatttttgtcccttaaactttaacatgtatcaaatcatgcctctgaacttttaaggtcgttaaaaatgcccctgaactattgagatggttggatttaagaacttttgtccaattttagtaaaaaaataataacatggattaaaattcagggggcatgatttagtacatgccaaagttcgagaaatatgatttggtaaatatcaaagtctggagaacatgatttagtacataaacaatcacttaaataataaaattgaataaaattagacaaaagtccttacatctaacaatctcaataattcaggggacatttttaacgaccttaaaagttgagagcataatttggtgcatgtcaaagttcggggtataatttagtttatgttaaaatttgagagagattatttagtagatattaaagttcgagaagtataatttagtataagaacaatcacgtaattaataaaactgaataaaattaatcaaaattttaaatttaaaaaaaattaagagttcgagaagttcagaacataattttgttaaaattgccaagcaaaatacggagtgcatatcgagtcagatttaagcacattgtaataactgtcactgttctgtaaccatctaaaaccctaaaggtccattctttacaatctttaacctctacaatggcgttctccttacaagctccagtcaaacccgtaacctttcctctatccaaacctctatccaagaggaaaccccttttcgtttgcaacctatccttacctttaagatacccactcaccagcatcgaacccgaacccgtttacgcttccgtcaaggcctttgcacccgccacagtagccaatcttggtcctgggtttgactttctaggctgcgccgttgatggagtcggtgattatgtctccctcagcattgacccacaagttcaccctggcgaaatcgccatctccgaaatcaatggcgataacgccaataagctcagcaaaaacccactttggaactgtgcaggcatagccgccattgaagtgatgaagatgctcggtgttcgatctgttggtctatcgctttcgcttgacaagggtttgcccttaggaagtggtcttggatcgagtgctgctagcgcggcagctgcggcggtagcggtgaacgagattttcggagggaaattgggggttgaggaattggtactggctgggcttaaatcggaggagaaggtatctggataccatgcggacaatgtggcaccggcgattatgggaggtttcatattgattcgaaactatgaacctttggagttgattcggttaagttttccagaagataaagaactgttttttgtactggtgagtccagactttgaagctccgactaagaaaatgcgggcagctttgccagcagagattggaatgcctcaccatgtctggaattgtagccaagctggagcattggtggcatctgtgttgcaaggggatttagtggggttggggaaggcattgtcttctgacaagatcgtggagccgaggcgggctcctctgattccgggcatggaagctgtaaagaaggccgccattgaggccggtgcatatgggtgcaccatcagcggagctgggccaaccgcggttgcagtgactgataatgaggagaaagggaaagtgattggtgagcaaatgatcagtgctttcttgaaagaaggcaaattgaaagctgtggccaatgttcagaggcttgaccgggttggtgccaggctcattggtagtattcccagataattgatgaagggtttttgttgaatcattataatcttccatggtgtttcggtttccagttgaatttgacaacaactcataacttgatagatatggtggtgtggccgaaattgatcactaaattcaagaatttgacttgggcttgttttcaaatgttgttattaggtgcagtgttgttctactttcttcaattggttatgaagaaatgtctattttaaacatgtagctttcttttgctcatctcggaaataaaatggtgtattaagcacctaaattcacagccccaaaatgggtggttgcatctctctgtactctgaatcttttcatgcttttgtttctatgcagtaaacatttgctgtcggtgttatatttctaatgatgataaatttgactaggacacttgaggttaacagtctgaagaactgtgttgctgtggccaagaaccctttttgtcctcacctactggttgagaaattaatggtgtgataggaaatttattttgccctcaagcaagacacgtccttttaggactgagtctaactgtgactaaacatatatttgtaaatatgtaatccattattttatagctgttgaagacgattgagtgagtgacactcaaaatattgacttcaattgggaaaagagtgctttttttccttttcttcatcttttgatagcttgttgattggagtcatcatccccttgattgtggatctcgttcaaatcgtctaactgaagctaattttccacttttatggctcttccatggtttttctttgggaaatcattcttctctgttatcttcttgactatatccttatccatcttaagctgtgttatcatcatagtcgttgcctcatggagaattgctttgattctttggtgtcatcactctgtagaaacagctagacgatcgacacaatctgctttggtggaccgaggttttgacagaaagatgctgcgctcgctccctaaaattgcatacaacgcagaagtttacgggaagaagctgaccgagtgtgcaatctgcttgatggagtttgtggatggggatgtgatgagggtgttgacgcactgtggccatggcttccatgtgaattgtatcgataagtggctcgagagccattcctcctgcccatcttgccgtgatgttctggttcttgaagattgtcttaattgtaatggggttttgagaaaccatgtataggagtatctatctacacatgccacaaatttagtgtaagagttcatcatattgagaagatgttctggttgttgaggacaatattaccaacaaagtaaatgttaattttgtctatgctcttattaagcttaatggaaatgagtatggagattatagtgtccattctggttatgatccaacttggattccatcctatgaataaaattatgaacatactgattttattattgataattatgcttaatttattatcagcaaatttgatgtttcttttttcttctagtaccaaatttaaggtatcaaaatacaaactttgcagctttctgacattcccatgtgacccaactcccaagacacttttccattttgccttttagcaatagaaagatatttgaaacaaaatgccaaactgtcaaactcagaactgtgtttaataatcgattattgttttcttaaatgtaatgcaaattcatattgagaattggttttcatttatttgtttggtgaaatgaaacttaacaagcatttgataagaattttatgccaacatccattggtatatacaaaggtaatttcacatacaatatcccctttttttaccgtttcttcacagccctgaggaaaatacattccatcaaaactaagctagcaaaagccaaattttcacaaaagcactccttgtcttcatctagatgcaaccaggaatgaggaatctgcatgatttaccttccataatctcaacccaactcaactccaaaaataggatgatacaccagaaatgacctcaaagagttgaactttttgttcataccaaatataagaaatgagctaagcaaagaaaataatcctttctacacaaatcaaacataccatttcaaagacccccatggaatgaaacaagaaaatatcaaaacagaaccaagaaaataaacaggaattgtcaaaacttttttctttcagaaaaaatctgtcaacggcgaagaaaatcattcgtgcttggcagctgcaacctgcttggcaccaacggagaagaactctgtgatgacttcaaggggcattcccttggtttctggaactttcaagtaaacaaacacccatgaaatgacgcaaacaattgcatacatgccgaaaacaccaccaagaccaacggatttgagcataacgggaagtgagtaggtgacgatgatgtctccaatccagaatgtgagagcacagatggcaatgcagagtccacgaactcgggtagggaaaatctctgcacataagatgttaggaatcggcccgaaccccataacaaagcaacagaagtaaaccacaacactgactgttgagattgatgcatgaagaacattccccaaatttattatacttgaaaggactaggaccacaagagtcactatcaagattgggattgtgtacagtagtaaactcctgttttgtcaaaaataaatagtaagaacaacaacaaaaaaacaaaataaataaataaataaataaagcaatttaaaatctttgattaccttctgccagagatatccataagcctcatggccactgctatacaaggaagcatgagtagagttgttactgcactaataagcaaagatgcagaagatgaactgattcccaagtttgaaagaaggactccaacacctgcctgctcaaggatttgaggtgtgtagtagagaaccccatttatgccagagaactacacaaagcaacaaaagaacttaagaggcaagcaatagtgcatagtttatataacagcaaacaaatgacaaaaaacaatgagcatagggggcaccatggtacctagtacctcttataattagttaagcggttttctataatctttattaaattaaaataagtggaatccgatattacacctcacagaagtgacttttagcatttctcagacagaacattgctatgggacaccaaggtgcctgacacctctacaaagtaacgtcttataaatggttctctataaccctttagcattcctcaaaaagaatattgctatgagacatcaaagtgcctagcatctctatgaggtaacgtcttataattagttagcggttctttataatctttattaaattaaaataagtgggacccgaactccaaaatagcagttctctataaggcaatgcatagtaggttctatgttttacctgctgaaggatttgtaatcccactccaacaactaaagcatgtttgactccaggttcaaaaagatctctccagcttggccctttagcagcagatgggtgaaccatagctggtccaactggattctgattcacaaggtcctgtgaataaagagcaggttggctaaccagggctgcagcctgaacaaactcaccatctgcctgaacatcaccaccagcaagagaaactatagaccctctgcgagatcccgggataccctcttgatgcagataaattctcttaaatcctccttcctttttaccatcagcgccttctctttcggtccatttccatgccaattgccatcctccaccaattccagtactgcctcctggttcaccagcagtaccatgaactagactgctttgtcttatgcttgagagactaccatgagcaggtgcaaccatgtctttctccatactcgttgtctggcgagatatcaatggactatgcaaattgtcatcagaatcagcaccagctgcatctgaattgtacccttccccttctctagcaaggctctcctcatcccaatcttcatttctaggctggtttcctccaacactgaacatactaccaaaatgtgggaagagcatgcttctcatacttccactttcagggagcttttcatgaacactgccaaagagagtgacaagaggatcaacaaaaccgctctgattcgccatgcttccatgcctagaaacaagcccaagtgcactttgtccagtgacaggtttggcaatccatgaaagaccttgatcaggtccatataacttgatttgatccttctcatcagatggatcaacctcgtcagtaagctcattggctggaccaattatgtattcctctatagatgtgtcacctccaactccaagaccctcaaccaacaaagccatctcacctattatacatatgaatatgagattcaaaacttgcaaaatcatatatataaaactaaaaagaaacagatcagaatcttaacctgcaacatcttctcttcctctcaacctctgaagaactttcttagcctcaatcatccgacctttactcacaagccaacgaggagactcaggcaagaaaaataaggtcaaaaagaaataaataacagatggaattgaaagaactccaagcatcaatctccagtttggttttggcataagggacatggcaaaaaccatacaataagagagaaacattccaccagaaccagtgaactgtggaagggtattcaatgaccctctaatctcaggtggggctgtctcagatatataaactgggaccaaagtaacagctataccaataccaaaaccatccaaaagccttgccaacaacaaaatatagacattaggtgaccataacattacaagaccactaacaaagtaaagcatagatgagataatcaacaagggacgacgaccaagagaatcagctatggctcctgaacatgttgtgattaaagtggctccaattagtgatgtagcaacaatcagtccttccaaagtgggttggctatccaagttgaaatctttctttatatacaaaacagcacctgaatcaaaaacaaaaactcataattcaaatctaaacatgaattggaaccataaacaatcgaaaaagaatcgatcttttagattactcttacctgctatggtagcattatcccatccttgtaatagattaccaacagcagctgcaatagccacaagaacagctccactcatttttactttcttctcagtccaaatctattatcactttcagattatataacgacttattcaccgatcgaggatggaatcctgtaaggacaaacaatatacgtcattaaacgattattgggttatcatctaagaaaaacccaattgcccaaacacagtaaagaaacaaactttaccctcagatggtttaaagcaaatttgggatttccaagaagacacaccccaaagctttggaaccagaaaaaaagggaaaaataggaaagggtcacacccacacccacattcgtaggaaaaaaagaaggagagagagagagtgaagtagagagagatgcacatataaaggaaacagaatggaagtgcctaactaggggacacctgccctttaacagactctgcctgggctgcacgtcagctctaatggcagctgtatatcacagtcacttgtttgtcatcttttagatttgaaacgatctaatttctctttcaaaaataataaataaaaatctcttttttactctgaaacatatatagactatagaaaatacatgtaacacactaattatagtgtatataataaaatagaaaaaaaaaaatgcccagttgagtgattaggttccactactactactaccaccacaaactaaagctacttcaaattatatgattaaaattatgtgccaatttggtttgcagagatactctgtttttgtttatagtatagtattcatgagaagtgttaaaggagatcatgctcttagtatatatttatgagatctaatatcgttattagtgtaataaatttttaactaattatggagcgatactttaccgttgtagcaacgctcgtttaatagacattagatagaattatacagaggagagaaatatataatttggtaatgtaaattgtatctactgattttttggttgagaatattgagatttattattattatttattttt

SEQ ID NO: 187569 - DNA, 1574 bp, Cannabis indica
attgtcacaccaaataattggaggtcttgtcaatcgaacataaagttctgaaaacaaagaatgaagccatgtgatttcagaaacagcttgagctacgctgcgatactgagcttcagtacttgatcgggtttttgcattgccaagcaattaaatttgaaccaaaaaatatggaatagcctaaagtggaacgtctgtcatcaagatcactcgcccaacctgcatcacaaattgcagtaacttctatgtttgcaataggtttgaataaaatgccataagaaacagtcccacttagataccttaagcttcttttgacagcattccactgtgtagtcaaggggtttgccataaggccttgtaattgtgagctattgaagggctattgctattgatctgtacatttgtggattgtcaacaggatttctattgtaagcaaatagttttaaaccacttgtcatgggagttgaggcaggtttggcactgcatctgagctttgattagcaaatatctgatatattttccttgagacatatgtaaccctgctgcagtgtgttgatatatgagcggtcaccaacagctaggacaaccggctgcgagaggaagataaactggatttatcttccatggcttatgaactacagtctatagaaacatacttcccaaacactcctttttggctggttaatgtcctagttttctcatttccatctttaatgctttcaaagtcaatacaatatcttcaagtcgaggatgtgaattgtgactagtgtaaaatgtctctatagtcccatgtaactcaataaagctccaaccaggcagttttttcaaaccaagagacctcatttgggcccatgtctcaccaacaccttcccatctgttcattgatgcaaagctgtgtgctaattgcacatagttaccagaatccataggtttcaacatgagaagatgtcttgcaataatttcaccaagttctacattacccctgttccgacaagcatcgagaagtatgcctaaaacatctatacaaggttctgcaaactcttgcttgtagaatttatatgcctcctctactcttccagctcgactgagaagatcaacaatgcaagcacggtgttcaagatttggtgcaataccaaattcttcagtcatggactggtatatgctcaaaccttggtcaacaagcccattatgactgcaagctgagagaactgacagaaaaatcacattattcggttgaatcccagtgtgcaaaaactctgaatacagcttcaaagcagtcttcccttttccatggaagccatatccggatataattgtgccccatgagaccaaatcctgttctgacatttcattgaaacactttttagcattcttcaagtcaccacactttgaatacatatcaaccagagctgtgtctaccagtatacacggtctaatacagcttctgataacaaaattgtggatccacttcccctgatggagtgccccaatcgacgcacaagcttggaggagagagacaactgtaatgaatctggtttttgaagtgtttttctcatctcagagaagagaaacagacc

SEQ ID NO: 187570 - DNA, 5706 bp, Cannabis indica
atttttttttttttttcagatatgggttcacttaaattttatttttattttttggagtgattttcggaaaacagaaaaattcagctaaaatatgtttcggtttgaaaatataatgttgatgattctccatcaaagcaaataatagttttttaagatctgaaattaaagataattgatttgaatagaatgtatttaagctgagaatctgaaaggtgcgattgaaaatatatatttgaaaactgaaaaatgatactgctttgttgagttggtttttaagctatattttctctccttggttgactggaattggaaaatcaattcatttgaatatggaaaatccttttattcaataaaatattaggggtaaggaagggcaaagatgaaatgatatttaagatattgtggccaaattagaattttagaaatttgtttttaacccttggaagttataaaaatcacaaaaacacccactcctcccgtttattcgatctttccctttttctcgctcacggccaacaacattctccactcgccggccgccgtgagcaaccgataggcggcccaaatactgaaactccggctctcgaatctccctaattcagtcattgccgtgggagcttgtactgaaaatcgttgctttccctctctagtcgctgttcataaatggagctactccagtgcgggtgagagcaatggatagattttgaattggagaaaggaattatggaggagagagtcgaaaagataataacggttagagaacgtgaaatttacgttttcaaattttaaagttgttttagagtgagattttcagatatttggttcaaaaaatggccactaaacactttctttatagcctgtattgttatgttgtgtttcaaatcatgaaattggattaaaatcgaataccggacatgaacttaccttctgtttaagctttttatttttgggttctaacacacgagcttcagtgagtttagttgggctattttgaatcatgtttggagatttgtatatcattcttacaaaccccagtaaatgcaggcagttgcagggtcatggaatcttaagaatcacgtactgctcaaattccaagctgattgatagttactgacccctataaatggctcacaatcacatgaatgaagccttgactgtgacaagaggtttaggaattcctgatcaagaggtcatacctgtatataaaaatctgttgaaagtgtatggggataatttggaatttattgcagaggagaactaccgtgctctagtggatgcatattttgagcagaaggatgacagtaaggttattactctacttttcatatttggccattgtgtatgatgagttataaggaactggtttgtatagttcaataaaagcattgatgattttgtagctgcatactagtttgttgccaaagttttactccaacttatttagctccatactcgggcaagttaacttttttgatataaggaatgaagaaatgaaaacagagggggcaggcttttgaaatgaatttatctcagcttaatgacttagtgtacttcattgagtttaaatggatctctgtacagttagttatatgtagaaaccctttttaacaatcatcctagattatatagatgttaacttcacttgaagctcctacaggttcctcgatagaaaggctcaaatggtgcagccacattgccttattaactagtgctagtatagaattagtatgactctgactatttttgctcgttacttaactttttctgttattttattttggtgggtggttttctgttcagcaggaaggagaggttaagggtatgaaatctggtaaagaacctgaaaggtttctgtcagttggaaaagaagagcgtgtttttcctaaattggatcacacaagcaaaaagccaatatcaaaagagagtaaaacacctttaacatcttctggatcacaactaagtaaaccttctaaaccaagtgaatccaaatatcgactagttcatccaccaccaagaagcaatgtagaaaactcaaattttattgaacaagttaaaaataaaatttctttgaatacaccacctacagcaaaaccatttgataggccattgggtgaaccgagttcctcgcatgtttctagagaaaagaagttgttgctaaagccaagaaaggagaaacactactcgccactttctcctaggcctatttcgacaattcacccaggtatattatctttttctttattattattgttattattattattactatcaatgtttcagttatcaattattcaagagtaataccatattggaataatatgagaaacacaatattctcctcaataagaaaaaagaaaagaaatacaatatcctgatgggttaccccacttagcttcaattgtattgaagatggaactccaatccttttctaagaaggcctatccttttccaatttgtaatatatcaagagttatcttatgcatttcttcacccttgacctctatttggacatgtaggcagatgtttgtccatatgtcatattggagtctttgatgtttgtccttggatgatatgagtgccaacaaattttacattctacccttatgacatttgaatatataccacaaatcttttaatgtgggcttgtgggattctctcaagtattacatttggtttgctgtatttagaaattcgacccagatatgaagacgtgtactacaaacattctcacattggaacaatttgagaaacaccatattgagatatggtgttactcctctttgcacttattgcttctaagttggaacaaggcctagtcctaatttggaataaactagaagttgatgtcttgtatttcttcctccataagtgtatctgtgtatatgaacatttgatttatgattgtttatatatttattcatttattttggccgtagatatcttacacgtttgtatgtgtgtcctgactttgactgtctcctttctgtttattgttcaaatgtatttactgaatttttttattgcttttaatttctttgtcatgttgcagaactgcggaagccacccgttaaagttggtgtgaaaatggataatccacctcttgaagttggtgtgaaaatggataatccacctcttaaaaaagcgaatacatgtgaaaatggagatacgcaccctttttttaaggtacaaaagaaaccttataactttcttgaggacatttcaaaagggacagaaaaagtgggaatttcactattggatgaaattggcaatgagcgtattccaaaatttaattacattcctcaaagcattatctatcaaaatgccaatataaatatatcactggctcgaattgtggacgaggattgctgttcaagttgttctggagattgcctttcttcatcattaccgtgtgcctgtgcttgtgaaactggtggagagtttgcatacacaccacaaggacttttaaaagaaaagtttttaaaagcttgtattgatatgaaagagcagccagaggaccaccactttgtttattgcacagattgccctattgagaggtctaggaatgatgacaaatttgagaaatgtaagggacacctggtaagaaagtttattaaagaatgctggagaaaatgtggctgtgacatgaaatgtggaaacagagtagtccaacgaggtatttcaagaagattacaggttagtttaaggctgaacccttatgaatacatgttggtaacagttcgcactttgctgctatccgctacgatttcttttattgtttttgtaagatattttcatgtatgtactgtactgagtagctggtacaacgattcaggttttctttaccagtgaaggaaaaggatggggtgttcgaccacttgatccattgcctgagggagcattcgtttgtgaatacattggagaagtgttaaccaatatggagttgtacaataggaataaaaaaagcagcaaagataggcatacatatcctgtaacactggatgcagattggggctccgaggggtttctaaaagatgaagaggcactttgtttggatggaacatatcatggaaacgtttccagatttatcaatcataggtatagttgttgcttttgcatcttgtcaatttttattgtctccatttggagaatcttagtgctattgttaaggagaagatgtatttcaatgtcatgtttggaaaagaagacgtagaagaaaaacatagaagatgaatgagctgactattttgtcaataataaacgaaaacaaaaatggatgtgaagttaacttttttttcttcttactattgacatacatgaagatagagttttgaattttataaaattattcgaagttttttctttttctttgaatgagattacatgatcccatgctaggtttgattaatttgaattaacagttttttgagaaattactttgttatttatctttatgatcttttttctcctcttaatcactataggtgctctgatccaaacttggttgatattcctgtggaagtggagacacctgaccgccatttttatcatgtatggaacatatgttttactttatttattttggttgcacaaaagaaggatttactttgtaagttgaacaaattgaatgccgacttttattatttttaaataacaaaatcattatatgtgggtttgcttctcttatgcagcttgcattcttcaccactaggaaagttgctgctttagaagagcttacttgggtaggtacaactacattaagtagtgttgttaattttgtagatggttgccgtgtctttatttaagttggatttctttgtttggcattaatatcactttcaggattatgggattgacttcaatgataagtatcatccaattaaggcatttcgttgctcttgtggaagtccaaattgcagggacaaaacaaggaagaggttagtctattacttcctttcacccgtcactaatttttatggccattgccaaaccacagaaaacactatgacgaaactggcatatgaatatgtcatagttgttaactcaaattaatatggaaaataactatttgaaatatttttcatagtaatatagcatttgatatgttttaattcattattaaacgatcaaaatattttttaattcaatattaaaagattaatgatcgaaacactcattttacacactgatgtagcaatattgttaaccattaatgataagtcacattgtccaattctagtaaattcacatcattgcgtatatgtaaaaagagcgtgtctaaataatttcatctccatattattatttaggctaattaagattttttttcctccgaactttgacatgtaccaaatcatgtcccttgaacttttttggccgttaaaaattttccttgaattattgagattgttagatttatttattaaaaatttggtacatgtcaaagttcggggaaaaaaaaatcttaattagcctattatttatttacacatgcaatattgtgaagtttattacacgttaaaacatcaccaaattgtgcatttgtgctatatttgacataaaaaaaaataaagtttgtaatatattttacatttaatatttagtattatatttcaatacaaaattataaaagtttgatgtaaaatttaatatttaaattaatatttttcatcaaaaatataaaaactaataactttattattaatttta

SEQ ID NO: 187571 - DNA, 5196 bp, Cannabis indica
tattaatatcagtcttatttttttatatatactcttttaagttttgtaattaagtggctgagctgtctttttgtgataggatcctagttggcattagttgatagtaacctaagcctatatatatagaggaggggtctctaagggaggggtagagaaaaattgtataggaaagttgtggagagattcaccctctcgaaaggtgaaaataaggagagaagagcctctcgaacaactctgaatttttgtatgaattgttggctgagattaaataaaaaaaaggatactttgagagactcaattttggtgtagcattttgattgaacttttctaactaaggaatttctatcaattggtgcggtgagcgtggagccatggcacccaagaaaactatggagaaacaagatactgccattgaggaagaaatggacactttaaagatagaaatggcatctgtcaaggagtctattcaagaattggagcgccaacttcagctacagtttcaagaacagcagaaacaacaacaacagcagctccgaatgatattagaagcccaagaccatccaagaatccatcaagaaccaagagaatcagcccatacaacgactgccaacatcggcgaagcgagggagccgagttcagggggattttgcaaatccgccgagggacggaaccagccagaagtgcctccagcagcgacgcacataactcattcaggggacttccgaggtactcggtactcgggtggaagggaagatcgcggcagtcactcctcttttaattaccgtcgtgagaaacgcttgaaaaaattacaaatgccaggatttgatggagagataatgcaagctgagagatattttgcttgttacgattatgatgaaatagacaaaatagaagcagctttcatttcattcacaggggacgcactgctgtggtatcaatatgagcataaaaagaggccgatcatgagttgggaagaattgaagaggctaattctgaaacattttcgcgacacccaatcaggctccctatatgatcagtttgtgtctatacggcaagaaggttctatggctgagtacaagaagagttttatacgtttattggctcccttagacaatgtctccccagaaatacagttgagcactttcctaaatggtttgacaccctctctgcgggctgaagtacgagtgcatcgaccaagaagcatagatgaagctatggagttggcccaaaatgttgaggagaaattgcgaactgctgcctcttcgcgggctaagttttacagcagtggacgcacgactttctcaagttttgggcagccagcaactaagaattttccaccccgtcagcaaggagaagtaagaagacttaccgagacccaagtgcagcaaaaaagggagaaggggctgtgttttcgatgtgatgacaaatgggctccgggatatcgctgcaaacagaaggaaattaacgttctaatcatgtctgctgatgaagacaacaaccaagttgaccctgacaattctaacgacactaatgactatacaaatcccgaattagattccactaaagtcagcaataaagtggaggtatccctacagtcagtggctggtttttctttcaataataccatgaaattaagaggcaacatcgacaataaagatgtggtcattttaattgacccaggagccacccataactttatttccctagatttggtctcgcttttaaaactacccaccacagccactgatacatatggagtcactatgggaaatggcgagtctacaaagaatgaaggcatatgcaaatgggttcatgttcagttacaaggggtggacgttgatgacgatttcttgccacttaagctaggaagtgcagatgtaatactcggtctccaatggctagctacactcggaatgacacaccgattggaagctccaatctatgtccttccatctaggcaaccaacaagtcactatacgaggggatccatcccttggccgaagcctagtttccttaaaaactatgtacaagacaatattagctgaaaaaaaatgggttccttgttgaactgaatgaggtcaccacggagtcagcccctactgaagagttaccccattatttacatgacattatccagaacatgattccattttttgccatgccaaaggggttaccaccatcacggcagcgtgagcacaaaatcactctccaggccaacgcacccccagttaatgttcgtccttataggtatcctcaccaccaaaagaccgaaattgagaggctcattaaagaaatgttggaaaacggcatcatacaaccgagtaacagtcccttttcgagccccgtactcctggtccgaaagaaggatgggtcatggcgtttttgcatcgattatagagccctaaaccgagccacaattccagataagcatcccatccctattatcgatgaattattagatgagttacatggagctgtcattttttctaaactagatcttaaatctggctatcatcagatccttgtccataaagacgatgtccacaagacggcattccgaactcatgatggtcactatgagtttttagtgatgcccttcggtctcactaatgcccctgccacttttcaatcattaatgaatgatgtgttccggccttatctcagaaagtttgttcttgtcttcttcgatgacatcctcatctatagcaaaaccgaggaagaacatgtactacatttagacactatctttgaggtattatcaactcacaaactatttgttaacaaaaaaaagtgtgcttttggacaaaggaagatagcatacttgggacacattatctctcaacaaggagttgaagcagacccagataaaataagggccatgacggagtggccaacaccgcacaacatcaaacagttacgaggattcttgggtcttacagggtattaccgaaaatttgtagcccaatatgctaggatagcacagccgttgacaatgcagctccgaaaagaccaattcgggtggaattcagcagctgaagatgcctttgctgcccttaaaaaagctatgatttcagtccccatacttactttaccagattttaacaagccatttattatagagactgacgcatccgggtatgggttgggggctgttttgctgcaagataacagacccatagctgatttcagccacactttgggtccacaagctcaacgaaagtcaatatatgagaaggatttaatggccatcgtctatgcagtggctaagtggaggtcgtatctcttgggaagaaaatttacagtaagaacagaacaacaaagtttaaagttcctccttgaacaacgagtcattggttccgagtatcaaaaatgggtgtctaaattaatggggtttcattttgacatcgaatacaaaagtggagctagtaatcgagtggccgacgctctttcccgacaagctgaaagtatcctacaacaattactagtaacagctgaatggaatttgtggcctgaattagccaaggaagtggctgccgacccattcttggccaaaattacagcagatttggaacaagggactgcctatcacggtttcactctagagagaggggtactgcactataaaaataggctggttattccaaaaaaatccgctttcttgcaaaaaattatggctgaattctatactactcccattggtggccattctggagaattgaagacatttaaaaggatacaggcagagctattttgggagggtatgcgaaaagatattgctcaatttgtgcaacaatgcactacatgtcagcagaataaatacttgacaaccacacctgctggtcttttgcaaccaattccattatcggctcaagtttgggatgaaatcaccatggatttcattgagggcctaccgaatttttgcgggttgggacactattatggttgtaattgaccgtctttccaaatatgctcattttttgaagcttcgtcatccttttacagccagcacagtggctgaccaatttatgcaagaaatagtgcaattacatgggctgccactctccatcataacagaccgagaccgtatcttccacagtaatttctggcgtcatttgtttacattacaaggcacccacctcaaacgaagcactgcttaccatccccaaacggacgggcaatctgaggtattgaataggtgtttggagacctatttgcgttgtttcacctatgagaacccaaaaaaatggtctaaatggttagcatggtcagaatattggtataatacgtcataccattcagctatccaaacttccccctttaaagctttatatggtcgcgaaccaccacctttacttccctacaaaaaaaaggacagcagtggtctctgccgtggattccttacttgagactcgggatgcgattcttgatgacctacgaatgcacttattgcgagcccaacaacaaatgcagcattacacagcttcgcaacgacatcacctcgagtttcaagtaggagatttggtgtacctcaagctccgtccataccgccaaaaatccttggcccgccgaacgcatgagaagctctctgcacggtattatggcccttatcctatattagagcgagtaggcaaggttgcttataagctgcagcttcccgatcaagccaccatacaccccatctttcatgtttcccagctacggcgagccattggaaccaaccagccaactccgaccataccccctcaacttaacaccgagctggaactttgcgttgtgccagaagcagtcctccaacagcgtccaaaagcctctgaccccactgccacagaagtcctcattcaatggcactccctccctaactttgaagcgacttgggaaaactatgacacaatttgtgagcaatttccttccttccaccttgaggacaaggtgaaggttcttcgggggtaatgatagacctgagtttatttataagaggaggggccgaatatgataaattagtctattaatatcagtcttattttttatatatactcttttaagttttgtaattaagtggctgagctggctttttgtgataggatcctagttggcattagttgatagtaacctaggcctatatatatagaggaggggtctctaagggaggggtagagaaaaattgtataggaaagttgtggagagattcaccctctc

SEQ ID NO: 187572 - DNA, 2218 bp, Cannabis indica
tttttttttttttttgcctttggggagtttatttcaatttttgccaaaagggtttggggaatgaggaaaggtgattcactcttctctttctttctctctgtcaagtgtgaatttgcgatgtgagaattctgtgccacaattttctttcctttgcagtattaggatacactaaccatgtgggtccaagcataaagacatagagttatgtctttgtactgaaaaagtttagttttaaaatattataattgagatggacagctgttggacttcatctattggccattgtttgctacgttttaacaaatgtggaaatgggtcccgcaagaatgttgataatgagaaagaaagattggatattcatagtcaaaatgtggggcagaatcaacggagactttcattccccaatatattccttcagcaaactctgcacttgaaaacaaatccatcacataaagaaactaaaacagcattgtatgatttggttttggacctcagtctatcatatatatacatgacctattaattaaaaaaaaacaataaatatagtatagttgtaatcatgtgtgaacacaaaccgagaatttagcttctcagctaatcttcattcccaatcaaaatttccataaaaatgtaaggtttgttttatcccttgatcaattatttccgttttattaataatattttttaattcaattatattattttgtatatatacattataaaccacacactttattcgttctaagcactactacttttcgtcattacatgtttgtgttcaaacatgttcatttcttctctcactctcataagatcatataatccaaacagtttttaattcttaaatgtatttattttgactctcactaccatcattgcttcaataatttggcctagattagtatggtactgcaacctgcaaagttcaaatggaaacacgtggcaaacgtatggttggttgacttctctattacatactcactgtcagcttatttagtgtgcttcgtataaagtaaagtgactttaatctgactaatgtgagaggagtaaattatcaacgtgttatttcgcctttgcttcattttcctccatcaatattatatatatatatatatatatatatatatgtctgtgtgtgtgtgcaaacgaaattttgtgaccaaagagacaaataaactaactgcattaaacccttttcttttgactagaggtaactgtgctatactcactgtagtgaagttaatttaattacatatgatagtttcttacgtcttcagacttaggcttttaacacgaaaatagtaatgactacattaagtacaagttcaaatactcttcctctgttgtatattcaaagaataagaatgaaataggatttgaatgtctggaacctagaaaaacaaaattgaacaacaagatctcatgattaatttgtctccataaggatcatcgaaatatatatatgtatgacaatccaaaacaatggttttatatattagaataaaaaacaaaactagactgaatttatcatgtatatatatctttattatatatatatgattgtaatattgagggcataatgtagcaattatgaatgtgattataattgaaggcgaaaatgtcggcatgcagttgtgtatcatgagggatgccaatatgtaaatatatattatatgaaattgaagttattaatttgtagccataaaacaatggaaaagaataattataaggttgttgaatgattggattagacgtttaaaataaagtgatggagcccagctgtggttgcatgacccattctttgacaggatgatattatcatttcagatctgttactcttttgtacatatacatacgtaataaatactattattattctttgaaaaaccaaatactattcttatttattttttttttgaaaagaattaatagtattatgggtgacagggtgagtcagaatatggatattgtcatatttctcagttctcatttaaacattcattccctattgaccatgcaataatgcttttatttataatggaaaattttataattcatgcttaatttgtatcaaaaatattagtattttccatactacccaaaatacaattgttattcaatctccctcgcgctctgtttgtcttggaaaaccccaaccactgccgaaaactcaaacgaccattttcaatctattttcacttattctctctctctctct

SEQ ID NO: 187573 - DNA, 1310 bp, Cannabis indica
attttttgcccataaatttttgttttcgtgtgaaaattccatcagaactataaaaattgttagtaaatattttccttaagttaccggaatgtactaagagtaaaaccccattcttgctagtatcaattccaccagcatatgttcatacaatggtctccacacctactactccagtcattggccaaactgtgacggctgctctacaacctactgatcttcctactattatcaatggatcaaatggcccaccaatttatgttgcaatagttaattccatcctggcattatcaaagctcaagaaaataaattatctttagttttttctaagtgtcaattggtctcatcaaatggtaatgctcgccaaatgttgaaacgatgtcgtacccgtggctccccactggctgattccaccaacactcatgtgtaacctacagttgactccatttctgaattgtctaaaggttcaatagtggaggatcatagttttgctcttttggcgaaggatgttcaccaatcatcatgaatatcatcagctggaacgcttggggtttgggcagtccccaagcatctcgacaactctaacttttcgtttctgaaaataattcgaatgttatttttattatggaaactaagttaaaagtaggttctttttctaaattttgtaatgtaataaattttcttaatggaattgaagttcctaggatatagtttaggtgatggtatgatgttgttatagaaatctggtattaatgtaactattataaattatgcaataaattttattgaccattatatggcgtttgatgatgaagagcctttcacatggcataacaacacatattctagtgccaataaagcaattagaatatactttctcaaatgtgccatagtctgatagtttttctctgcctactctcaaacatctcgacttttataagtcgaatcacagagctctgcaacttctcatcacccttaatggtcagattcaagctccacgctacaagcctcgtttttactttgaaaagatctggcttcataaatctgcttatgaggatatcattgcccaaatttagcatgatactgattccccttccataaaccatttgatgcataactttgctcatgcatcctctcaacttcaagtttggcatcgttcaaaatttggagtccttccaaaatagattcgtttatctcaagaaaaagttgatggtttgagaaattcttatgatacttctccttcccatttcaatgagctttataattcagagaatatcttgaataacctaatggcacaagaggaggaatactag

SEQ ID NO: 187574 - DNA, 2008 bp, Cannabis indica
tttttattatttgtatattatttatatatgtttatttatgttgtttttcaattattttcatatagttatgttatttttttagtattatttttttttgtaaaataccgtaaaaataataataaaaaaattaatgtaaaagtataaaaattttagcaagaataataatttatgtaaattttactctttttatattattattattgttttgttcaagtaatagaatatgctttttccaaaataaagaaataaacaaacaaagtatacgtcaaaaaaataaagtataacatgcacatcttctctttttattttattttttcatgtggagcaaattccttctccaccctttcgatagcttagacaatcttaaaaaccgtgtgctaattataagagacttataccttattctttttttaattaggtcattaatatgtagctcgagggttctcatttcattaaagatagtaccgccacagcaaattagtcttccaaacatgaacgaagccaaattattctaggtggggcgattgtctcacctcaaattctacaaaaaaaaaattgtgtgtatatatgcatatatataatatattaatacacataacaatatcatattatataaaataatttttttatattttttactaactaaaattaatatatgcgtgtatacattcccacttaatttaaagaataaatagatttttttccgaactttaacacttataattttgcccttgaatcattttttttttattttctcccctagtccatagggagctcgtggcatacaaccgaaacgactcccactagatagccgctcctttctctacgaaaggagcctttctctatgaaaggagggactgaaacttcaactgatacctacgctaaacaagataacttagttggcttagaattcgtaatgatctgaaatatcggttccagtcttctttcccgaaccgattcctttgaactttggaaataattacaaaatttcacatttaattgcatttcactcatttttttttagacaatttattaatgtgctacaagccactcatataattacaatctaagtgtctatttaaataacttaagctagctagaactaagtctaatgacattaaacattcaaatataaactctaaaattaggtatacaatcctacattttaacgctagagtactatttatataattattttttacatggacactcgaattacagtaaattagtcatagatcaatattacacgaggaaattgtctcaaaaaatttagtgaaattcaatgaaaggaaaaaaattacaattattttcaaagtttgatgagaactttttacaaaaataaataaataaataattcaagaaggtaaattatataagcgtcaaagttggaagaacaaagatcttatttattcttatataaaattagttgattgataatgttgaaatttgaggtaatactatatcaaatgttttattattttaacaagtaataataaataacatataaaattaagtactttttatttcttcttattccttttggcacccatttttgaataaatattgttaaaattatgtcaattgcacacaaacttaaaaatatttttgtaattctattcaaaaaaaataattataaaaattattattttctagataaaaaattgctttaaagagccatctaaaattatcctctaattttgtcgtccctgcttctaaagagctgagtataaattttctaatcaagagttgtggtgagattcgaatccttgactcaaataaagaaggatgtcaacaaaagcatctttagttgtaattatgcatgtccttctcattagcatgactttggaccaaattaattggatgagaattaatatattataagtggatagagaataatataatattattgttagatactagttgtaattttttcttaattataccttgagaacgctttataaaataattaacaatttttttttataataattattaaattaaaatatat

SEQ ID NO: 187575 - DNA, 4874 bp, Cannabis indica
tcacactcacaggctgctgagctctcctgctattgccttcttgggtattgcttttttcactttgcccattcgaattctaaaaaagctcacttctctctaatctcttctataaaaaggaaaataaagcgaaaacccagtcggcggtttttgttatcgtattttgattctcactccatttgttaagctctttcccctttttgggttattttcagtattgatcagtattgacagcaatggtttagttttttgagcagtgaaagaaaggtcccgtctttgcgtttattttctgcttctacattgatctgcattgaaccctttattgctctcttctgtctctccggattccatgctttgagatttgatcaaaggtgggattttgttattctcaaggtaacgtctttttcttttttattttaataataaataaaatttcctctaatactatattcattgtataatttcacacttggtgtggatttgattgagtttcaagacaataattgattccactagataaatttccagcgaaccaaacgattgtaatgtgaaactttttttgcttttgtttttcttttggactgaaggtactttgtaaccttcattcattctaatctcatcattttagtatctacaatggttcttccaaaggacattctgggttgttccgatctttaaccccattgtttggtccaagtttgattcaataatgtagcctagtgatttagtgttccctcagaaaaatttcatgtacgaaacttgagaggaacaagctacacttctagatatctttgtaaaactttcttgatgggatattccaagggaagacttaagagctaatgtcagtggattagtcgtttggttttttattttggttcttttgattggagaactttacttggtttgtttatcctttataatgtatgctcatgtatcttctgttaaattatactattctgttctgtgacacaaaaactccaaatttgtgttgagccataaatgtgactgggggaagaaaaactctttcccctcttagagttttggaaaaaatccatgtttgagttgaggttttacagttaaatgttttataattttagttgtttcctcctttcactgcaatgtatgctattgtttattctcttgctcttttttattggtttttttcaagtgaagaaacaagagattgagatgcctttatagttttttgctgtgaattgagtacttatatattttgtcaggctcgtgcttttcttgttaattggttttgacaacatcatagataatctctagtaaggatgagcaaagttgatgactggggggacgaatgctctgtcattggagataaaggagaagttggtttcattgactatgaagatgacaggtctgtttgtagttacaacccagaggaagaaggtccaattattgtttctgttcctttcccatttgtgaatggaaagcctcgatcaatttttgctggagaaacaacttcagatttaattacaataaggaacacaactcccgaacctgttgatctctggggtgtaaagatttatgcttcaaccccagaagatactttcacaatttccctgatggagcctccgcgggcagattctgatgtgaaagccatacaagcattccttgagtctcattccttggaagacagggtgcttcagcctggtgagactttgactttgtggctctcttgcaaacccaaggaagtgtgtatgcacacaggaatagttcattttgatatcgataatgaaactatagaaagagttgtttttctcttggcggatgataagatttctcatactcttgcatccaggaatccttattcaaaaaacataagaaagaaaaaacagtttactgtggattcatatgttacagctccacgtccttcaagaggaactcgcgactttgtcagaaataggcttccacgatatgatattccaagtgatattaaagaacttctacaagaaaatcaggtccctgattgtattttagaggggcttactagtagaagaaactattctactttctttaaaacattaattattatggaagagctacaattggaggtagcttctttatttcataagatatgtaacaaaaaatctttctttttctttttgggtgctaaaaattggccatttgttaaatcaggaagacatgaggagctatgacatggagaatgtttatttcaggaggaagggaagccaatttttgtcccttgaagttctcgggcttgctgagaggagaccatcactagtccacggggatataattttcactaagcttgtcttcgaagatgcagggagtccctcatatcaggtttgatagaactataactttatgagctcgttaagttgatgtaacatggactattggccattgggtccatggaagtaatttcttttgatttgtagtcatagcaaggaaatacatttgaacttcactgctcttcattaggtgaatggcttttttttttttcccttaatctaataaaaatgataataggaacaaaaggctaaataatagaatttagctaggttgatattattctcaaaaaccaaatgacacactctcaatgtatattaataattaaaaaaagaaaccttaaagatagccaaaagagaaacacaaactagagtgaagtcccattaaagtcttccaagttcaaaactactaggaaaaactcaagggaaggaaaaacagcacaaatttttaacaactcatcttaaatggtgaagttatgaaccataaaattcctagaaataaaagatgagacaatttggacaagaagactaccaagaaaaaagttatcaacttttcaaagcgagacaacttcctgctgcttgatttttttcttgaaaaatgaggtactattaatgtgtctctttgaaaataatttcatatttctggaattctgccaatatatattgtttatagcttgtgatataattgaaaaattcccacaaatatttcagacatcactgtttttttatttttttttttcctaaatccaaacttagggttgtatccaccgagttgaggctgatgaagtgcatctgaagtttgccccagaatttcatttacggcatagagatgataatcgctataatgtacagtttacatataaccgaattaacatgagaaggttatatcaagctgttgatgcttcaacagaagttgagaagagctttttgttcccatctgaagcctgtgaaaggaggcagattataaggaagccacttgtccccatatcttgtgctcttaatgaggaacaaacccgttccattgagatgatacttggctgcgaaggagcaccaccttatgtgattcatggtcctccaggcacaggcaagacaatgacagttgtggaagcaatccttcagctctacaaaactcaaagacatgctcggattcttgtgtgtgcaccttctaatagtgcggcagaccacgtactggataaactcatttatgaaaagggtgtaaaacttaaacatagtgaaatattcaggctcaatgcatctgctcgtccttatgaagagatgaatccggattatattcagttttgctactttgctgaaaatgtctttaaatgtcctcctttagatgcccttcgatactataggatcattgtatccacatacatgagtgcctctcttttgtttagtgaaggtataaagaggggtcacttctctcacattttcttagatgaagctgggcaagcttcagaacctgaaacaatgatttcactagcaaatctctccagcaaaaatactgttgtagttcttgccggtgacccctcgcaattaggtccagttatatactccaaagatgcagaaaggtatggtttaggaaagtcttacttggagaggatatttgaatctgagctttacaacgaaatggatgaaaattatataacaaagctagtcagaaattacagatgtcatccagaaattttacatctaccctcattactgttttacaatgaagaattgattccatgtagagatagaagaagttctttcatggaaaaggtggactttcttccggacagagaattccctgttcttttcattggcatccaaggcttagatgagagggaaggaagtaatccatcctggtttaatcggtttgaggcaagcaaagtggttgaaattataagaaaattgacagcacatggggatttggaagatgaagacattggggtaataacaccatatagacagcaagtgctcaaactaaagaaagcttttgaaggtttggagatgactaatataaaagtgggaagtgtcgagcaattccaagggcaagaaaaggaagttatcatagtatctactgtccgatcaacaattaaacacaacgaatttgacaaaaaccactgcctgggatttttgagcaatccaagaaggtttaatgtggctattactcgtgctatatctttgctaattataattggaaatccacatatcatctgtaaggtaaggttttccttttattgccatctagttattttgcctacttttttcttaatcacccacaatcaacaaaatttggaatatggaaatctgttttgcacaaaggattttggtgcaatgcatccctttacatttagcccgattcaataaccatctgtgtttgttttccagaaaaattagtttttttttccccttataacttgataatttagcatcaaagtttttggtgatatttacatcttcatctttctactttcgataaagtatgaaaacgccttttcatttgttctattactctaatattggcttataccattagttggatttttcctcttcacgtatttgctatcattctaatgtcagttatttgcatctggcaggatacatactgga

SEQ ID NO: 187576 - DNA, 1225 bp, Cannabis indica
actatatcacatgattcgagaattgatggctcatctatttggtctagtctcctagtggacttttactggttttctcagatatttttcttacttgtatttttcgctcttgtagcttctttgagggttagtgtttattttctcgttgtggtgtctctctgttctccttgatggtcatggctattgtgaaggaagtagatagtgttgaggtgaccgtggatgtggactcatgatgtcgggaaggttttggaacgcgacagtaatatagagatggaaatgatggaactgtttgaggacctctctcttgaggatattgtggtgaataggacttgtgttggaaaagttatcgggtgtaagagcatggccatcaatggtgaagaaaatacttcttggcatctagaatctggagcaaggctggaagatgaagaagtttgacgagggggtcttaggtttcttcttcgattcagaagaggattgtgctttagtcatgaacaaaagatcgtggctggttaatggtgtgctgctgaatctcaaacatccttggctgattgaaggggaggtgcgtatgtcagattttaaagtggctcatttctgggttgagtttcacggtctgcctactcggtgtctctctgaaacaaatgcccctattctcaccaagaaggttggtcagcttgtcaaaactaacgggaagaggaaggaggagattgtgagggttgattatctcagatgttggattgatgtgtggattagtcatcctatccctactgggtttttcctcaaagcaaaccctgaatcctggattcagtttaagtatgaaaaactgcctttcttatgttttaattgtggtaaattagtccatgcaaacaaagaatgcactgaacccacggtatgggttaaccctgcgtggttggacctactgtgagaatgtatgggtcgtggattaaggtagatggagctcgtgggaattgtttcatggcctttggctctcgctatgagttggtggtctgtgatgaaggtataaatttacaggggaatgcccagcgtgccaaaggtgtttggaagagacagtataatatccgttcagagcagaatgccagctccactatgaatggcgtgaagatgaaagcgcaggtggcagcaaggggaaggcctgacaaggaagtacaggatggtacgttgcatggtgcctccactaccatgcagcgtagtgggaatgttgtaagcgtga

SEQ ID NO: 187577 - DNA, 4971 bp, Cannabis indica
aaatataaacaaatattatttaaacagattctagaagattcgtcttgtctgaagcctaatttagaaattaaaattgactgttaaaccatcggccatactttcatatgctgtttacttgagaaaaataaaaaaatcaaatgcaataaaaaatgcacatttttccttcgttaataccaacctcgagatcaggaagggcacgatctgcttgaaattgataaaaagaatttcgaagcaaattctctgggtcaccatcttcacagcgcaattgattcaaaagcatgttgtagcttaaatggaaggcactggaatgagatggagaaagaagtaaataacaggcaattccaaataatgaaaaataggaataataagaaaatacagatcacacacgggcacattatagaaactaaaaaagagggtaggtactgcttacaaactgaatttctaaggtatttagtgccctgacttattctgtcataatcccttaaaatcattttgggacaaagaaaaaggtcacggtatagctacttagaaagcaacatagaaggtcataaaatttgtctactgcaagtgcaacttcatttaagaaaagtgtggatctctgcgatgtataaaacttgcctaataacgaaattgcagctataaatttccaagcaaacacaaactacacgcctaaggaggggtggaagaaccaattctatttaaatatttgtaaagagtaaaaatttattttattattaaaatgtatcaaatttattactgacaaagttcaccacaatacaactacaagtacctatttaagcaatcagcacttcctttcagcatcatcttagcagtagatggctcaagcttctcatccaccataagaatgcatatcccacgcttatcaatgccacgacgaccagcacgaccactcatttgtatatattctccactggataaccatctgaatttatctccatcaaatttacggacattggtaaacacaacagtcttagcgggcatgttcaaaccaatgctaaatgtctctgtggcaaacaaacactgaatatacacatacataaaacttaaatgtgaacaagaagaggtttcatcaaattcaaatgaaaatggatgaattttatcacattattaaattaacaatataaataaatgtctggtttattctgttaaaaaaatggtaagaagagacaatctgatggttgtagtggcaaattaaaatcaggtatttttgctcaaatcttcccatgcacaagtcccaattttctattctgctttcatccaactactgattcagtatataaattgaaaagtagattgctaaataatagcattaaacaatttaaccagcctgataatgataatctgatctgatttgtaaaacattggaaatcaacatttagaggggaagcacgcactagacataacccaaaaaaactaaactatagaaacaaaaacaatactgccagaaatatcaaatctagaaccaaccttaatcaatccttcttgaaatagtatctcaataacttcttttaaaataggaagcaagccagaatgatgcactcctattccacgtttcaagagaggtaacatatgtgaaacctgtatggaaacaatatattgacaggcaagaaaatgaataacataaaccaacaagaatcaatatattcagcataaataaaaactaaactaaaatcagtatttttttgttcctctatttcatggaaaaaaataagggaatatactatttcagtacctcaatgtttgtcttggaactaacttagtgccctattgttatattaaataccatttataatagatgagttcaaaattgtacccttgatcaattttgctatacacttatatatatacatagtatataatatatgaagcttgttaggtgggggcatcatttttgctcctactatgggggcgttcctatttttcgtactttaagaaattatatcccattttttttatatgagattgtatatttagttataataggcatcctgtctattttagttttactttggagtttagctggaagcacagtttgcagggcattgctgtttttcttttttggttattgtttataaaatgggatatgattacggatactttaaaattccttcaccattaaaatccaaagtaaaactaacaatcgtattttctcccacaaaaattatatatcctactccttatctacaaataataatatttacttccagcaatatagcccaaaaatcaacaaacaccacagttccacattacaccctcctttgctcaagcaaaaaggcttcaaacactacagcactcatcaaaatcaagtaaaccgaacactccaacagtgtgaatgctaaatgatcaaatgtcattgagccaaagttccattacacccttgcatcaaattgatttcagaaggtgcacctcttatgatttttgattcataaagttatcaaactatctaccaaaatatctaagactgcaaaagctaaattgtcacagtttcatgttgttgttgtcttcaataaagcagaaaaatatatttggcaattctgagcaaattccagaaaagaaaagaagcttgcctgaggtaacttcttatcatcgtcagacagcatatccatggcactccaaaatatggtttctatgttcactttctcatcatccccgtttagatccatttttgccatctataacaaaccaaagtaaaatcacaataaggacaaacatattcatattttcaaatgagaaatccagcaatgatatttattatagaagaggtagagtattatatcgtacttggttttttttttttcttttttgggaaatagagacaaaggtcaattgcctcactacataattataacacactgataaacaagcagccatttttgaaaggataaatacacaggtcttaatcctacttccttttaatgtagaactaagtggctcaacctatgaaatatcctggacatgaaaatagcatggcccagaagactacatcggaataaattttcaccagtaatatatataaaaataaataaaactagacccaaatatttataatttttatactcaattttcctatgttattaccagccacaggggcatattaacacacatttttctgtcaaatatacattgtgcacacacacaaaaatatacatatgtttgtataaatgcatgtatgtcatcagaatgtaaaattaagcaggagacctacagtttatcatgaaataaatatcctacctgcattgcaagagtttcacattcctttttgctaaaactaaaaagtatgacaggatcatattgacgctggatgatcattttcaccatcttaaagatgtcagtttcttcaccaatcttgcccataaccaaacctttcttccattttccattctccttttttttgtcaccctcactaacaggaacaagcgcatttaatgacttctgaaagctatcttcacggaattttcccttttcatccactaccaagtatagaccatcgcctccagaagggaaaacataatgctgaagaggtgttggcctataatcagtataaacaatgtgacatggttgtttgtgaatctgcagtccaccacatatgggaaaccaagtcatatacagaaagcaaagcttcaaattataatcggttccttatatgcttgaagaaactccatggtataaaaatgaaatagaagcattaattttcatgtaaatacgatgacagagtgctatactacagaattacagtattagtccctcttgcagatgctacatctatcattcatttgcaaacactcgcagatacaatgtcatgtacaaaatggttattaagttaagcttagaaagatgaattaccttagcaacccaatcagcaaattcctttgcgttaggcactgttgcagagaggaatacaaatcgagaattcttcggggccataacaatgctctcttcccatacaacacccctttctctatcacgcatataatgtacctcatcaaagatgacccaagccacctcacgtgttatttctgatcctttgtattgcatactacgccaaatttctgttgtcataacctaaattaaatgcacactaatgatccatgagataaactatagtgcatattgagaaaaacatactacatttgggcataaaaaacctaccaaacatgaagcatttggatcaatcgttacatccccagtcatcaatccaacatctgagaactcctccttgaactccctatacttttgattgctcaaggccttgattggtgaggtatatatgaccctttgtttatttttcaaagacatagcaatagcatatagagcaacaacagtttttccagcagatgtatgggcagacacctaggaagtcaaaacaaacactcagtgactatagaaataaaaggaaaaggacaacactagatatgttcacagattcgtcctttattattactatgagacgacacattaacaaagactataagtaccccaggcaattcttaaacattttttcccaaccacttgagttagccttaaaagaccaatatcttctacacttgcgatttattcaactcattcataaagctcagcaagccattccttctcacagtcacactaacttgttcattgtcatagtgatactactttctcagttacatatcaaacttaaaaccacatatttttcaactaaacctcgactccagttaatactgctggtaacaatggctgtgactggacgttgagcagccagatattatacatcgaccatttgctttcgtttgtaaatagatagtgttactcaactcacattagaaagtggaagtgtaaacctaaataattacaaaaccattccacgaccactcacagtcactcgcattccaacaactcaaagtatagcctcaagtagaaaaatatcaactttattaattactccaaatatatatatatatacatatatatata

SEQ ID NO: 187578 - DNA, 1130 bp, Cannabis indica
gtgtgcatgccatgtgatgaacatgagtggtggggtagaggaagaaaagattctttaaatcccataaatgtaatcatgaccttaaaacacataattcttttagttataagttacaaagatgtctctatgcactaaaacagtatccacaatgaagatgattaggcacaataaaattaaaataaaaaataaataaaagtttgcagccattggtttgtaatggtttcactttattgtggagcatattatatatatctctcttccccataagtgcatgtggaatttgaatgccaaaccccaacagtagtgaggtgatgcacattttttcccaattcatccttttctttatattgggcaaataaaaaggtgttgaccctctctatctctcttataactcacacataaatattatatatatatatatgtattacatcaaacactccacaatttcccattatttcaacttgaactcaggatttccacaatcataataatgatggcatgtcaataagaaaccaaatgtacttgtgtagattcgatttgcatagaattaccctgtatgtgcatgatcagagccatatatataaatgatgagagaaaattacaagtactttgtgtagtgatatgtattcatctatataaacataaccaatcaagaacatatgattaaatgcatgcagccctttgtaatgatatcataatatatgtaaatatatatttaatatatatggaaaagaggaagcaggctaggacagaataagattctcatagttatattttatgaatattgtgtgttttgcttagctatttttataaacaacaaactgcaggttgcatttaaataaaaccaaatgttccaattgctgaatgttgtgtcttttccttgaataaacaaatataaataagtttgttggtcaataccagccatatcttggagttttttagttcctccaaatatgtcagcacttctttttttatttatttgtttatttttttctttgagtcctcttgtgttctggttcaattgtcattgtgactaaattagagatttgagacaattataaatagtggtgtgtgtttcttaaaaattatagatctacaatcatatatgctcatcagtacaaaattttgac

SEQ ID NO: 187579 - DNA, 5948 bp, Cannabis indica
aaaagagagaaaagtgaaaacagattaattaattgagatctgaattgtaaaagagaaagagaaaaagataagaacaaaaagttcagtaagacagagaaagagaagagagagaaagaagatacctctgattatgaaagtgaaagcttgtgttgttgttttaacttttggagcttactcatggaaccacaaccagccactatctgataccaactgaaaccctttctctctctctctctctctctcttgtctctctcttcttcttcttcttccttcttctgcatgaaaaaaacctctcttgattaacccttcaacccacaaacacaattgatcatcatcatcatctttttcgggtacggttcagttcatccgtttgatttttcctacttgggtttttttggttattgggattctctccatttctggggtttttcttcgaatctggtttttgggttttaagtttttgaatctgggtctgaatcaggaagacaaagaaagggtttttcttctttttattttttaatgtaaaggaaagatttttcttttcggattctgaaaagtaagcaacttttattttatttgttttcttcattttttttaagaaaaaattgtgtgagaaatttaagaattaatgcttttaattgtgtgtggtgattaaagttttgatctttttcttgtttatgttttgttgagcattaaattgagttgagttttgagtatcaatcaaaacctttgattttgatcaataatggaaaccttacttctcttgttcctatttattattacagcttgaaaacatcctcagtaacgccgttatttccgccattattattgatagtaataatagtaaaaaagccccaaatgaaagaccttgagaaaagcttggatcctcagctatggcaggcctgtgccggtggaatggtcaatataccaccagtgaactctaaagtcttctactttccacaaggccacgccgaacactcccagacccatgtcgatttctccgctgtttcgatcagaatccctccattcgttctctgcagagtttcagctctgaaattcatggcagacccagaaagtgatgaggtttttgctaagatgagattagtgcctttaggaattaacgattttagagaagaagaagatgatgaagtagttgttgttgcttcgggttctgatgataatggttctgaaaatcatcatgaaaagcccacttcttttgctaagacattaactcaatctgatgccaataatggtggtgggttttctgttcctaggtattgtgctgagacaatttttcctggtttagattacactgctgatccacctgttcagactgttatagctaaggatgttcatggtgagatgtggaaatttaggcatatctttagaggtactcctcgtagacatttgttaacaacaggttggagtaattttgtgaaccagaagaagttagttgctggcgattcgattgtgtttctcaggactaaaactggtgacatttgtgttgggattaggagagctaagagaggcattggtggtggtaatggatcagacaccacttctggatggaacaatggttcatcttatgctggtggtttttcggttttcatgagggaagatgagaacaaaatggggcgaaactcgggttgtggtggcaattctggtcctactgctggtgggaatttcagagggactagaagagtaaggcctgaagctgttgttgaagctgctgctcgtgctgccaatggcgagccattcgagattatttattaccctcgtgttagcactcctgagttctgtgttaaggcctcttcggttaaagccgctatgaggattcaatggagctcaggaatgaggtttaagatggcgtttgaaaccgaggattcgtctcgaattagctggtttatgggaactatagcttctgttaaagttgctgaccctatccgctggcctaattccccttggcggcttcttcaggtactattttttatgtccttaacactaagatttcagtcaaatttatgttttgtatgacatgttattaggcataggattagcttaaacatgttggagtgattgagattattggtaccatttgagtggaaatttgctaaactaagaacatggaattgtaaaatttgcaaatgaaattttgccccgtttcggttttgtatgtgttttgaattagtaattgcattgcaggtgacatgggatgaaccagatttgcttcagaatgtgaaatgtgttagtccatggttgattgaatcggtagctaacatgccaatcatccacatgtcatccttttcaccaccgagaaagaagttgcgattccctacaacgcaacaccccgactttacttttgatggacatttcccagtgtcttcatttttaggtaaccccttagggcccagcagccccatgtgttttcttcccgataacacacctgcaggcatacagggagccaggcatgctctatttggactatctttatcggatctccaacttaacagcaataacaacaagctgcaaccccaacccgggctgttgtcttccagtttccaccagcagttgaatcaacactctggaatttcgagcgctggactcaaaagagtccgctctgacaccactcccaccaccaacaacaacaacaacaacaacgaaagcttatcttgcttgctcacaatgggaaattctagtccaaatgctgagaaatctgatagtgtaaagagacatcagtttgttctctttggtcaacgaatactcaccgaacagcaaatttcagccgattcccattcagacaaagcaaagtttctctccaatagttcatcagaaaaatcatctaacaatgtcgggttttcatggcatcaaggtcaccaagctaccgaatttggtatggataccggtcattgtaaggtgtttatggagtctgaagatgttggacggactctagacctttctgctctcggttcctacgaggagctgtacagaaagctggctaacatgttcgaaattgaaagatctgagatgctcacccgagttttttaccatgatgctaccggtactcttaaacaaactggagaagaaccttttaggtgagagcaaaactacaaaatgataccttgtttgcattcggggggcttcatttttttcgtaaagtgtaacgattttgtgttttcttgcagtgattttatgaagacagcgaaaaggctgacgattatagcagcagaagattcgagcaacaaaaatgtgggaaggtaaggcctaaatgaacaaaatatttgatgcattccttttgtcaattgggtaaaaactgatttcgggttcgtgtttttcgtcacaggacatggattacaggaatgcgaaatgcggaaaatggactcgggtcatcaaacaagacaggtcctttgagcatatttgcttgatttccattcatgtactgatctttgtttaatgattacttactaagactgaacaagtgtttttggatgtctatttttagttatttattattttgtaaggagagaataggatattgaactccattttctattcatgatgatgactcaatctacttgattttctatcatggcttttatgtacatgtttgaaatggattattagtacttactatgttctatttaatttttatatttgctcttaggatttttgaactacataccactatttatgggtgtttttcattcctttatgaaaaatacacttatgcacctttttcgtgtttcgagataattatttaagatatctttgagaatttaagatatctttgagaattaaaataatttacggcttaaatatttaagggttgcaaataagtactaaaattatatttttagagtttatgttgatacttgatgttaagtgaaattattatttacttgttattttcttataaataaaaatttattgacttgaatcaaaaagagtgttatgtggccattgttttaatatttaatagttaagtatttacgaaagttttaaaaatgtgatttaaatattattactgttaaattaagtatttatttatataattgagatttagccataactatttatgcggtaaattactcaataatttacaatataaataataatattcaaattatatattttacataagtatcacataaaaatgatatccgaattgtaaaagattattgaattatgttttcagcgagtttaatttatttaaatttttaaaaaaatttataaaatattttaagtaattacaatgttaactatcatatctaaatttgaaattttgcattatttttcttctcctgaaattgaaagctagctgagtgtttttttgggattagagaataagaaaacaagctttttattttgcaaattttgggaaaagtaaaggtaaaaagacacattaatgagtttgagctcaatttttgaaaaagaaaaagtaaaacaacaaattaatatttgaattctttttaaatttgtaattgaaagaatctctagaagggtctaattactgtttttgtttgttattgttggccacaccttgttaactttggtctttatttatttttttggtggttgaaattgaaagggtagtaattattttgactagttgagtgttaggttaggtcttcttatttgggttctttttgttctttctattgtcttccttaatatacataaattctctttgttcccatcatctaattgggaatgtcttcgagatactttaatattttctttttatgatattgtttagtataatcatagcatttatatattttttaaatttttagtccaaatcaaagtgtaaacaactatttttttatgtgcatgtgcatggagaagaataagaataaaaaaaaatcaaatataatattggctcgtttagtacattgtataaatgtagaattgtattatataataaataacattacatttagatcaagcaatatattgtataaattattacgaccaaaatttttaatacaatataagttatatattatataatatataacaaatgatctgtattagcttgtactataatatttacataagatttagggtcaatctcattctctgactcggatctagagacttgaattcggatggacacgacacgcactggaccgaaccaaacctaaaacccactcaaactcggaattcgatccagtacctggacccgaacccgacccagaactcgagacttggatccaaacctaagactcaaaccttgatccgtacccgaacccaaacctcgattatgaactatcataaacaaaattatgaatatatatataacctcaattagaaggtcccttaaatacttatatatatatatattaattactccattttggctgattttcttttatttatttttaattggggttgggacaaaaagaatttaataatttttgtgtttttatatttgggaggtaagaaaatatgagtgaaaaagttagaaaagccctttggcatttactagttgactttattcagtttagattaaagagtattggtgcaatatacccaaatgtcaactaacccagatccttgcctttctgctttgctttgcttttcttttcatttcttctctttccaagtgtcttttaattaaagctttttgcctttaaaggccaagcataacaaaaatacagtcaaactaaacaataaaaacaaagaacaaaagaaaaagtcatacccctttacagcttttcctccacaacataaatttgtcactatctttatcagaagaatttattattatggacctctcaaaagttgtacataaaccccaaaatcaaaaacaaaaacttttgacttgtgttcttttgctttcaattcaaaacataacaaaaattctacaaatagggtccaacaatgtatattcaaaacattttataaaattaagtggttcataaaaatttaaggaacttttttatttttac

SEQ ID NO: 187580 - DNA, 2135 bp, Cannabis indica
aaaaggacatatatatactttgtcctaattctttacttcactttctacttagctgcttgttccagaacagggacagctttccatgcatcctcctccaacccactaacttgcagaggcggcaacgagaaaacgctcacggtcgagcttccactcctaatttccttcaaaacctttaaagcagatacagtactcttcatgtataagctctccatatactcgatctctgccagttccttgggaaatctaagggattcttcatcctttgcagtggcagaagttgtaggatcacacatttcatcgtctgcagcagcagtggtagaggcattggcagaagcagaagtagatgcctcagcagagggtggctgtccaattgttgggaatagcccatccagcatcgtctcgcactccttcaccagcttgtagagcaagtctgtggtgaagaaaggctgatgtaggaccttttgaataaagggcaaacgcattagagcgccagttctcttgtcatactttttgaggatcttcaccagtcctgttaaggaataaaaaagaggtaagctcatagaaaagttgttaaacaatctaattggacgctttcaaaactcctattgattgcacacattcataaccattgctataaaaacaattagcattattatagatcataatggtcagagattgtgagcggggagaacttcaactcagactcgggaaacacacaagaaaaatttctcatttagtatccatatgctccattgtcatttaatgctcattacaatacaatgatcatattcatatataaaaacgctagataacaatacccttttacttgatcttacacttttgagttaaacatgcatcaaatagtaccaaaactattataacaacttcataaaatcctatattatgtaatgattattttcttaaaaactgttcagtaaacaaaagaaaatgaccaaagtgacatctaaatgccatatttagagagcaaaaagtaaaacaaatggaagaagctcataccagtatagttaagagcactgtaattctccaacaaaaccatctctccatggaagtccacaatctccttgcgtatcttcagcatctcatcactgtgaggcttagcttttgccatcatgtcttgcagctcctgaattccaaaaccaaaccatagaattgtcaagctccaaaccagtaataaatataagagacaactaacacaagtacaaaatgaaacaaaaatacatcttagattttctaagcacccaaaaaggaaaacaagtgggaacaaaaatgcaagagtcagaaaaagaaaaagaatgaaacaaaaatacctttttgagttttactttctacgtcactcattcaatttcccattcgatcatcattttaattaacagaccaagctatgttaaaaggatcgtacgaaaaaagaaaatctaaaacatgggtatgcaaataaactctgatgttaaaaaggcacagcctgcccgctttatcatattgcaaaaagagataagagaattaaaaataagactatgacagtatgacacactatcactaatcacaaactaatattataatcaactataatagtcaaatataattccagcaaaaaaaaatagtcaattttaaaattcataaagtaaaaccacaactgacaccttaataatactaaattgacaaagaaaaaaacaacaagagcacaaatttttgggcaaaagagagaagaaaaatgccgagttaagaaactgagttgactcgtcttacagttacatgcagcgaatcgtttcttaacgttatgaaacggaatattctctaggagatagaacagtacactactgtgcggagcagtggcattttcgaaaatacaaatgcgaacataacacagtacgtggttgacaaacgtgagtgacagtcacgcgcctgaacttttagaaagacagtttaactggcccatcactagacagtagagacacaaaaatgaaaagattccattgtgcgcactacgcactgcccttactcagtcaagcgcattctagaataagtttcagagaagtaagaagcggcgcacgttattactctaccaataaaaagtaactcacaacctaaatagagtaatgtttcaaaaaaaaaaaaaa

SEQ ID NO: 187581 - DNA, 3111 bp, Cannabis indica
attttgcatcttggcccttaattgttcacaacattagcaataagcttattattagaagatattttccttctatgtaagcaactaaaatgagcttttatgcttgtttaattatatcaccagaatactaaatgatgaacaaactagaatcaaaaagacaaaggtttttattaactcggataaacttaaccacaacaatcaacactagacattgtaaatcagaacccaacttcccaatccaaaccctccaatctgaatacacaataggccaagttgtaaaatccaatcatccaaggaacttgcgcaacaacacaacatagaaggagcaaagaaaaaaatggtcatggctctcaacaaagtcttacaaattggacgttatgaagaagaaatagacagttgtaacctttgaagttggtctctggtcatcaactaagaattcaccgttttccaaagaatgaacctatgattgggaatcgggagtctactccacaccacacgagcatactctactttatcaaaatcaaggaaagagttgtaaaatttgctaactttaaatattccatttgcactagtagcatgtatcatgaaatgagagattggtcaatctaagcttgaggagtttcttccaatacaaactggggccccctctagtcgtgtgattccaaaagttttccctttcaagtacccatttaacccaaagggcatcaggtttagaagcaatatcctacatgtatttattgaccattgctttattccattttgatccctctctaaagccaatcccacacatagtgttttgggagacaaaatttatccgaagaagaaaagtaaagcttgcatctgttgtccttggtaccccataagaaatttttatgaagtttgccaacactttgaggaagaagaaaaattatcatccaataggttcatataccaagcaaaacataatgaataagttgacccctgctagcaaaagagatatttcaagtagcccaagtatctaagtgatgttagaccttagagataataggcccacagttagatactctccatcttgtgggtgttaaacggaaccccaagtatttcaaaggaaaagaaccccctcataacccataatgtccagaatgatcgacttagcttcttggacagtaaaccaaaaataaatttgagacttctgtttgttggaaattagtcctgaagcgtttaaaaactctaaaaaatcatgttgcagaagttgagaactcgggggatgatccttaaacaaaatgacaagatcattaacaaagcacaattaattaagccccagtgcttgcaaaaatggtggaaatgaaaatccttggactttgaggcttgagtacacaaacgagtaagatattctttgattaggacaaaaagcaaggaggatatcgggtcacctttcctaaggcttttctcttgtttaaattgaccatgaacacaaccattcatcacgaggaggtaagaagtaccccacaactagataatcacccacttgataaaatcggccaaaaaaatgctcttcagaaggctctctaaaaagttctaatctactatatcttaagcattactaaggtccaccttcatcaaacactgggcagaaacatgtgtgttgttgtagctcttcagtagatctaggaaaataagaatgttgtgtgctatagatatacctttgatcaaatgttattaattattattcactaaaaaaagaagcaccaatgcgaatctagtccacaacatcttggaaatacatttgtacaagatgttacaacaagtaataggccgataatcaactattttaagggggtcatccactttgggaattaatgagatggttgtcatctttaacacacttggaatagaatttatttcaaagaaatttatcataacatcaacaacctcattccaaaaatcttcccataaatatttgaaaaaacccaagctatacccgtcaggaccaggactcttaatacaattaatagtaaataacttttccataacattagttctagtaaaaggttttatcaacaacaattgcttctcaagatctagaacgttacaatgagaaaataccatggtattgagatagatagtagccgagttgggactccccgttaaacttttgaaataggcaacaaaatgattcaccataaaattgtagtcatccaccataaaaccctaattagaagtaaatgaaacaatctcgttcatagccttcctctattttaaagatgtgtggaagcaagcagagttctcatctcccaattagagccaagtgatcttacttttgtgactcaagaactcctcacacatattagaatgaaaattgaaatgctcatgggatttttgttcttcccatttaaaagagttatttgacggatctgaatcgagagtcatttgaccatgctgtaatcttattttggcagctgaatatcgccaatagtatttttattaaaaaaatgcagcacatgtttcaacattttaatagcttttttaaccacaccatgtaagctcatctcttgaattggtgaagaccaacaattcatcacaaaagtctataaattagaatgagaaacccaacaattaaagaaatgaaaaaggtcacttgcctatgcttctcaccttgacacttttcactaggcagtagaaatgatcagagatggtatcccattgaagacaagcctgagtgtttactactacataaaaggacattcctgttggtcaaaaaatcgattttttaagaaccgacgctattaaaattaagcgttagtgtaaaacagacaccacccattactatcggtttataatatacgctaagaattggcgtcagttataaaccgacgctaagccgacaaaaaaattcccaataacataagcccacatatcaaataaaatcctacatatatataaatacacatttttaacttacatgcaccccttcatgttcagacctctctctctctctctctctatgtgcaagagagagagagagagacgtttcagcccaagcctacggtgccaccttagcctaccatagccacctgagccttcgtagatggacatccccggttccatcgacaggttagacacatctctctctct

SEQ ID NO: 187582 - DNA, 5180 bp, Cannabis indica
aatccctcaataaattaaaaataaatattacttaatgtatttacacatttagtccatactttaatacccattaagtcacaattactaaaataataaccactgtgacaatagtactagaaacaactggttgtccttttgcgtttctctttatcgagttaggagttgcaaccgctcattcatcctcatatctctgttagattaattgttgaattgacgagatgttagttaatcattgaaaacttagaacacattagatgcatttcctattttacaaaaatgagacaaaagccattgccttcatatagagcactatacaatgcagaaatctggacaagaatgctaagctatccacccagtcttcactccatcattggctcgggtttccccacaaatcttctagcttcctcatcagtaaattcactgcttggcagaaacaaactttagcacagataaatcagggaaaaaaggaaaatgcaaacaaattgaaaagcaatgatcaattatgaagttttaacctgtccgccgcttctgtcttcgatatcaaggtgatctgtgtggatgctacaaattcacaaaagcaggtgaggaatttctcctggcagaatttgaagatatgatgcaggaaatcattgaattgttttggttcctgcatatatagtatttggcttacattaacaaatgttgttgccaaccttagtcaaaatacattgagaaaacaaaacccgaaaaaacatacttgctcaaggatacaacccttgcgaagggcagctaaacattccactgctttaggatagttatccccattgtaagagtcttctattaaattgaatatcctttttttcatttccgcaatagctttgttaacccattttggactatccctgcgggaaatcatggcttcaaaatcttctataggtgtcacattcccgatttcctccaccttaacggaagatttattttcatttgtatcaggattggcagagggagcaggtaagagggcataaccctttctgtcatttgatccagatggtttatcttgcaatgatcggctagttgatttcttcagctgcaaaaaaggttaaagtgagaatctaacgcctctaatttgaatgttggcatagcaaagaagtttaagcatgcatcactaaagtacctttggattttctttgaggttgaaggccatccgaaattcatcaagaacagacttattttgtgaaattagttctggatcaggttcagtgatctttgaaagagtttcatcaagtggaggtacagcttcatctgggtgctttgatttcaactcgagataacggtagaaacgctgaacagattaacaccaatcttatttgaaaacccaaacagcaataaaactgggagaagtcctcaaacacagttttcatgaccatctctcaaaatattgttcttgaaaaattttaaaccatcaataaaataattcataattgaaaatgggtgtccacctctacaatattgtcgcatcatggtgaaaagaaacttttctgtaatctttccatagctggctatgttataaatcagcaacatatgaaagaaaacaaatcaggggaaaaaaattacctccagcgcgggatttggtgtaaactcaggcagaagagcttcctctttatcaggaggtgcaaggtcaaacatttgtacaaacctatctgctgcctcttgctgttggtctgttggttgcatagaagctgggagattgctaaaagaggggaactgaaattctcgaacatcttcagcaaaaggaagtacattgaagtaaaatgaatcaggctgcacattaccaataaacagaaaccccaaatgatcaacaggtaaaataaaataattgaaaaaaaagagaagaaacacaagaatctgtgtaataagacttgcaaacttacaatgttatccctgtcagatatatttggtgtcaacacccccacaacaacattcccctgtccttgtctccaaacacaacgcaaaattgctaccttgttagcttctttcatagctcttgctagggcagaaacagcaagaatggcctttgtttttccaggttcaggaatgaaaacataggcatctttcatgtaatagtggctttgatgaagttgcatgtaaattaagacagtaagagaaaaattatcatttgaacaaacaaattcagatcaagatgcatctaaaagtaaagcagatatgttattaccgcataatgtttccagcatccgtaaaacctagaactttcacactcttttctggcttaaacttgacagcataccattcagcagatgatataggaaccacttggggtccataacgataacctttaatcctttgttctggtggaacaactgtactaggatcttcaacccttttgtactcaaaatctaccttcacttcatgtgtggctaatttatcagttgctggagctttatcagaatatttttttaaagtgggaaacttctcctctgctgttttcttgtaaacccatatctaatcatgttcaagttgtaatcaaatgagaagaaaaacaactttatatgttgcaaccagtaataaaaaaaaaagttcaaattgcaatgaagaggactcaatggacaagtgaatcgtagctcaatgcattcaatcctcgcttgatagagggtgctctagcgcagaacagtatacaagtacaaatgcctcaagagagaacccattgacttgacacagatagataagtaccaaaatagtgattaattcttgtgttttagcctagattacataagttttaatggttttaaatcaagtgcttagagccagccaaaaggcaaggaattaaacatatgcttttaacttcagcacagtagcatacatgaaacattgtcaaacagatcaacagttgaacagttgaacacttcataattaaattactaagccgattccaaagagctcaccttaatcttcagtttggggctaacttcaagatcacccctgaatgccgtaactggacttatattccgagttctcaatgcaccaagcaatgagattagactttcaacatgcaccagctttgcacgtgttctctttgaaaatatatttaacaggcgatcattctcatccattattttcttatctgcttctgcaataagctttcccctgacaactatactctccattttcatgccgtgcgcattcattttgtcagcaattatggtgacctgatcatcttcggttccttcatttgaaggtttaattggacatattgcatttgtaatgaggcaaagacgtttctttcccttgtttgtcactccatatttcttaatcaacatatccattccgacaattatagcatcaagaacttatcacagtcaaggttttatacaaataaattgaaaacgcaagcaattgtaagtcgaccaactgtaagtaagaatttcccgctgctaatgatattcacatacaaatttatacaagcaggtttcagtgcatggcttcagaaataaattcctagtattttgttaagcaactccccacaaaagataaaaagaaaaaaaaaagaagtagtagttcagaggatacaatctccagagtgagttcctctagggagtggctgtaaagtttcaagaagatccacatccaccactccaatttttcttaaaacgaccacatgttcatatccacccacttcatttgtcaattcattatttgtatctgagagtaccaacatccgtaatcagtgaattcttttatttaaaaaagtaccgacaaaaagcatataatcattctaatacacaacaataaatatcacagactaatttgttatttgattgaaaaaaggtttgggatgattcaaaccttgggttccgaacaagataactccaacttcatcatacttggtgaaaatgagctgcaaaaacaaactaaaaaaatgttatataaccatagcacttgttcaaccccacccaaaaaaaaaaagttaccttcttttgaatcaaggaaaagcaaactttttcaatctcaggcaaagcattgtgcattgatgggccaacatcgatcaacaaaagcagtgtttcctaataaacacaaaatacaaaatgaaatttacagaaaaccctagcaaagcaaagcagagtaagtagtagttgactcgagcgagaatgatatgaaaaattattaacaagctagtctcgattgctgtctacctagcttacacagatattaacgaaaatgataccagaaatttacttgaagaaaaaaaaaattaaacaaaaaaaaaaaaaaagcgacgaaagaagaaagaaacagtattaatctgagaagatgaatttgtatcgattaccttgttgcgagccatgactctagagagagagagagagagagtataaagattgttggagaagctgagcagggaagcaaagcttgagccttttatatatttaatttctctttgcttttcccgcctcggcttgagttgagttgagttgtatgactctctcggtccttctatcagaagaacaggcccaagtggtgtaggaagtaggcccaagtggtgtaggaagtaggccccaaggcccaatcgtatagtgtccaattttcgcccttccacatttgaatctcaattacattacattacattaccaggaagtgtccaattaatgccactaagttatgccaacgattacctcattggaatattgctaaaattagactgatgatgagttaatcaaaatagagtaaagtacgaagctacatgaatacctccatgaccattaattaatacacttcaccccaaaatgtcataataaagatggcatatttataactcttctaatttgtattacatgtgcaaaatttctaagtcaaaagatttttctttttattttgtttcatgcacaacacacactactcatattgctggatgaaattattttgaagtgggagaatgtccaaactttttaaagtgaattattaaagaagaaatactttaagttttgtggatgagggtgtggagataagtccatgttagtctagccaagtcgagctgtcggtgtgttttgtccgagattcaaaccaaattctttttaatagtgcagcaacttatactgacaaaacaagtctcagatcagaagaaacataatcgtttgatataatgttttctcaaaatcatagctcctgttgctcactcctacttatcc

SEQ ID NO: 187583 - DNA, 2514 bp, Cannabis indica
agacagcaagccaagtgaggctaaagagctgggctaacatgtggtccaaggtagcaggcattcacagcaagagaaatcacacgattgggcttggcgagcatgagaaaattgatttgatagtgacagaatcagtcattcgttggtcctcttgcacacacttgcccacttctcttagatcttcacttgtctgttgaaactagaccacgagaattgtgggattaatctgatgtgttgttgggttggttgtacaaaattagaggacacccacgagatctttttcttttcactgatgtttctctactgatttttgggtcgtgtatgtatcatatagtgcctttttcatgtcaagttcaacctaggtgttatggctgcgatggggtggtgtttttgtttttcttgatttgttgacaagagtaacaagaagctgcggctagtgtgtggggattttccttgtaaaattagtgtgatcttggcagtaaaattagttcctaaagaaatagcatcaaccttttattttatatatataaaaaaaatagaatattgtattatattacatctcaacaccacttaaaaagagtatggaattgtgtgaataagctgtagccaaatttagttttatcatcttattgtgggatcgggcaagttgttggaaatggctttagaaatatgttgctatttttgtttgttcgagtactattctaaattgtgttactacaaagtacaacgcacctaaaaaattcaatggtcaagaagatttattagaccaacccaagtgagaaccggtgtattcatattcagaatctttgacaacattaatatgtatagcatcatcaatcaaacctttcatgacttgtttaaattaatatttgacaacagttattttagggaactatacaataacaaaaacagaagaaaaaacgcattttataacactttattcaactatacaacttcaaagatgtggaccaagtgaaaacccatcttctgatgagtttacctctatcttaagcctaaactatacttacgtcaatactgacatcactatggtatctgaattctcactcacatgtgtgctggctaatattcttgtctcgataaactttgtgatagaattattgttatggctattgtgccacccaaaaacatgagaagctttaccaaaaagaaagaaagttggaacgtgtataataattgtacatacaagattaaggctgtgttcctatagaaagaaaacatggaaaattatggcaactcaacaagtctttgcacgagggagaattagtacttctatttgtccaatatcggaaccaaattattacatgtcttgtgttggttataattataaatgataaaattcaatagccttaggcaaagaaacactaggggtatatgtttgttcttgtattccccctttatgagacagcttttttccatttattggttatcctctaaaaaatatatatgaatttgttcattgctaagtgtttacatttgagtttttttgataaagtttgggaagaggacaagtggatatttgttatagttgagacattaacttttggaagtgcaatacttttgtgtacagcactataatggatgcattcttttatattgtgattctgtgaaccacacatactttgtcaacgtggtaacggaagttattagtaactcctagtttgtgtattgcgattcaagcaacataacatcacaatcattataattgttcaacacaataaataagaattctttttttttttcatgatactatagtctttacaataaaacattttttttggaaaaaattatcccaaattattaaaataattacaaatattttttgcagcaagaaatctgacaagtatctgaaacaaaaattatttaactctatacattaataatttatttatcacaaacacatacatacaaataacttaaatcttttaactcaaccttaaaaataaacgatatacaaaaaaataagttgattatcacagttagaaacaagaaaataacaattaaaaactttgtacaaaatggagagcaaacgaaaaaaattaaacaatacaaactcctcaacgattttatgaggaaaacaaagtggcttgaattaaaggccttagtaataccttctaattgttttccagtgtcaatatactccaattataaagacagcttatcaacaagtttcctaataaaatgatgtcttatatcaatattgttaactcagaatttagttaaatataaatgaggctttagataattaatgaatctgtaataaatatagtgaagatattgattatagatgaaagacaaaaaaaaaattacatggctttgtagttaaaatctacatactccacgagttttatttttatttatgggttttctgtgtacaaacgtattttggcaaaatttctctatgtctggaaatcaatcatgccttttacatctgtgttactgctatttatagggattaaatagcagctatttgatattatctatgtaactgtttatgaa

SEQ ID NO: 187584 - DNA, 2104 bp, Cannabis indica
aaaaaaaagaagaaaaagaaattgagaaatatgtgtatttttcagtttactagggaaaagggttatcctcttaaataaataaaagaaagaaaaaggggtcacctgaattggtccgtgtaaggaagattggaattgatggatttgggaggtatatatgtgtagagtgatttccatggctggtctggtagctccagtcttctttttttaaaagcaaccacaatgacctgtgttaggcttgttattggacttccactagcttttactttgacataatatttgtaacccacaaggaagaatagagtggatatgagcataagaattggtggtatacttaaacccaaagcccagcttatatttgactgaacatacacaatgaatgtcaaggataccatctttgcaaaagtgaaggtgaagaaataccagttgaagaagctgttaatgcccttctttccagattctgtttttgggttgaattggtctgctccaaaggccaagttacatggtctgatgctgccagctcctactactactagcccaaaaccagccaataaaaaggccatttgttcagatgttggccctttgcataagtcactctttcctgttattgctccacaatgagtaggatgtagcttcttaatggctgctgttaagtctattaaaagcaatcccttaatagaagaaagaaaaaaaaagtatcactatccatgaactaagatgcaagatgaactataccaaaatctaaacataattgtcttatggctttggtttgggttgaactaatatagttttttataccataacagaagctatggtgccaaagcacaatgtattgaagcgaccgaaataggtgtcagagaggaaagctcctgccatggtggccaagttggtggtgccattgtagatggtaatggtgttagcagcggtaattctcttcatattgaatacagtagtgagatagaccaaaaggttggaagtggtaccaacagctcctagcttctcaaaagtttcattccctgaaatattattatgcagatgggtttctcaaaatccattacaaaaattaagtaataatatgtaatacatcattacatttacctatcacaagaggcatgattttccatcctctgtagttaattttgcagtcttcttcacttgtatcagatttctcattcttctccatcacttctcccatattcagtattcttttttatttttatgaagcttgtttttagaattaaagcctttggtgccaagatttattgctcttcttcttgcacccttgacttttcacacccttcatttgggatcctttgattggaatacctaggatcatttttatttcaggcacgtgaattgtaaaactccactaagttattgattagatatatttcctcccaagtccactgacagagaaaatgagcccaagagttgataaaacattaaaagaaagaccaaactcaaataataattaaaagagatttctcgtgacttaatgttgggtacttagtgccttcatcagaatttttcacatcactatcacttaaaataaaaaggcatcagctctccacattatggaggcaatgattcttatttcttaataaaatattattaaaaggcactacctctacatattatggagacaacttcatttaatgctcactaaaaagggttgataacgttccctataaaaactatttctgctttatttgactaatgtcatatgcttgtgcttgctgctgcatttactctttcaaatattaattaattggcaaaatagtttaactttataagttactaggaataacaatgagaattgtatatatttaaattattctacattaattttaaagtaaatttcatatattttgttggattttttttatttatatacttgaggctacaataattattattattatttaaagtaattactattacaatttaatttatagttaattttatgattataatacaacataaattatcattaaaaataaatatgtattttttttcttgaactattaagaataaatcgtacctttaaattattacctatattaaatattttctcaaactattattgagtgttttttttttctttttt

SEQ ID NO: 187585 - DNA, 3089 bp, Cannabis indica
agcaccataaccaaaagcccccttaatagcaaataacgcactgttattttaataaaaccagctgctggcttagaccagatcacaccaccattggctgcaccagagggaacccaaagatgatcaaagcatcaatctcaggcatgtttccattggtacagtaatggcttagcaacatagacggtggcagcagcagagttgaaattggattgtcataacaactcatttctcccattccaaactacccaagcagtaactacatcttccacaacagccatgggttgagtgtccaacaaaccagcaaatcaacttgagaactcagctatacagaagttatgagaagccagtgaagtttcaacaagacattgcaaaagggcaattaaccaacacatgggagatagattcctcaggaacaccacaaaatacacaattaatttccattggcacgtgtttttatttaagctgagtgtgtgtggaatggtagctagttaacaacttccacaagaagtgatggttttgggtggaatactcaacttccaaagcttgctctagcaaactaaatttggtgtaaaaatatagtctatttttgtgtttccaaaggtgatacgcgctcttaatagagtataaacccttgctctccaaagaccaaccagcggtccattgcaaccgaatcattaagaggaatccgaagaatcaacccttgatctctctctataaacaagtcttaaacaacctccacatcccattctctcctaccaatttgcataagactatcaacaataaaactatcaagcccaggtacaactttcatgacaaacggatgagtgtcatctgaaagccaaggaccacccacaatacaaactgaagtgccagcccctatactaagacgcgcctcgatagtaataaaatccttagtctcatgaatgctacgccaaatgaagcttagattattaccaagattagcacacaatagagaaagtacctagctttatacacccgactaacaagggaattatcgtttgtcaacagcctccaaccttgtttaccaagaagagcaagattataatcatctaggttacgaaaaccaagactgccattattattgctaccacataggcgcttccaactcatccaactaacccctcgagaattcttcgaattagaatgccaccaatacttagccatcaattatctaactcaccacaggtttcaaggggtaaaggaagacagacatgtcataactaggaagagcttgtgctgccgttttaaggagcacctccttacacgcttgtgataaaaatctaccctcccaactattgatctttttctgcattttctccttaaggaaattcaaaattgttgtcttcttctaacctataatacatggcagaccaagatagaaactgtttttatctgcctcagtcataccaagcaaaccacaaacacattgccttattctcaaagaagtattggagctaaaaaatacggaagatttcccatagtaactttttgtccaaaagcttcctcaaaccgtccaagtaagcgaatcacattcaaagcttcacgctcgttagccctataatagatttaactatcattgacaaaaagcatgtgagaaattataggggctccgttagcctctactttccaacctttaatatcaccattcagcttaaaatgttttattaaagaagagaaactttcagcacagagcaagaataataaatacgaggataatgggtcaccttgtttaatgcccgtatgagggataattggtcccaactctcgaccatcataagtcaccttgtaatagacagagcaaaccgtagcaaaaattatatcaaccaaatgattatcaaaacccatctttaacatcatagcacgaaagaaaccccattcaatacgatcataggccttgctaagatcaaatttgatgaccatgaaaccctcttttccttgcttcttcctcttaagataatgcataacctcgaaagataccataatgttatcagaaattaatcttcctggtataaaagcactttgagtgtcggagataaccagagggagaacaaccttaagtctgttagcgaggacttttgaaaaaactttatacaaaacatcacatagtgaaattggtgttagatcccccatattaatagggcatgtcttcttcgagatcagcactatgtttctattatttagtccatcaagaagcgtaacagacaagaagaaattttttactagctaatcacatcattgccaacaatattccaacacttttgatagaattatggggtcataccatccgttccaagggatttatcagggtacatttaaaaaagagccttcttaacttcctcatccgagacacggatcaataaatcgatattatgcaattgagagatcttgggatgggtacaatctacaacgggctgccaatgagaagaacttgaggaaaataaatcattaaaatagtcatacacaagctctgccagacccaaatcccagtcaacccaaacacccgaggaattctgaagctaatcaattgtagtattattcttcttgcgagaagtagctttggcatggaaaaacttactattctaatcgccttcacagagccataattgcttagagcgctagcgccaaaaacttctttttgaatgtaaatttcagccaaattcttctttgcttcagcatattgtatagtagattcggagtcaaaaagcagcttaagtctgttgatttcttccttgcatctcctaatctgctccttaaaatttccggtgtaatcacgacctcaactaaaaaggttatcgccataagtttttattttcaccataatgtcacaattagcacacatttcccacatgtgttgaacaacttggacgcaaagaggctcctagagccaagcattttcaaaacaaaattgcttaaccttggagacaaattttatggctgaaagatttaggaggattgggaaatgttcaaaaactgacacctccaaattaaatagttgagcaaagttaaaatagccaaccaactatcactataaccaaagctcgatccaaagaacctcagtccaatttgcactg

SEQ ID NO: 187586 - DNA, 9265 bp, Cannabis indica
tctttaatgcaggagaggtaagtcttctacactgatttgtacttaaggaaatcattcatgtaaattgatctcattattttggtgataactttttatgtgcctattgttttgtatttagtaaaaaagcagcattggattatgtcaaaatctactcagtataaataaaagagtttttattgcagtaatttaaggctactaataatcttcaatagtaaaaaagaatttctttgatcttgaagggctgtgttgtgttgttaatagtttttttttcccttaatactggatctgtaaacatcattggatgatgctatgggtgacgagcgcatttgtagaatggcggctatacatcacttcatgttgttcttgttgaaactagttgagtaaatcaaacattgtaggatcatgcagcgagcgtagttttttacgaaactatgcttggctttagtcaaatcgcttgaatgtatttcactgcattttttttgtggagtagatactattctcgcatttgttttctgcagtcgcttcatctaattatttttctttaacttttaatataaagttttgatttttatttggctcttaacgtataattcttgttgcagggtttacaacgtttttgcacagagcaaaagatcaagttgtctaaggtgtgagttaattaaaagagtattcccaattttcagttgcaaaattatgtcccgaaattaatcttcatcaagaggttcctttatattgttggtaagctcattggaattcttaatgttattttcagatagatcacatatttctctctcgtgtatgctccgagactgcaggtggccttccaggtttgtttctcgatttccagctattatggagctattatttactttacatggttgtttgaaggatgatttttgcaggtttgcttttgacattggctggggttggagaaggattgtctgtgagtactgcattggcttgatgtttttctcttagaaatttaattgaagaagatattctctactttttcgttcaatattttaatttgttttttcacatacaaggtttgtgtatggggtccatcagatctgaagtacttagttgacgcgatgaggtctttcatcccgaatgctgctatggttaacacaaagagctttggacccgcacttggctctaatgtaaccgctatgcccgagcagcaaaactcaacaaaacccattgttcttattgatgacgaggttgtgaaaatatcagctatcgttttgcaaccgacagtttcagaaggaaagcctggtgatatgtctgtagtatatgtatgtgagttgcctgaaatcaaggggagatttgacaaagagaaagcgctagctttgggtgttcgacctgggcgaaagtatagtcaacttgttgaagggcaatcagtaaagtcggatcaccaagatatcatggtaggttatagaaacataatgaaacttaatgtatctgttgtgcatttgatgtttcgaaagtaagtttgatttccccgatttctgtttaggttcatccgagtgatgttatggacccatctcttcccggtcccattgtagtactcgtagattgccccaaggaatcttatttgcaacagttgttgtccacagagcatctcaataactattttgcggacttctcaggttcgcccgagagttctaaggtggtgagttgtatcatccatttgagtcccgcatctgtagttaacagtccaaaataccagaattggatgaagagattcggttcagcacaacatataatggctggacacgaaaggtttgctagtttcgctcgtgtcttcttcttcgtcttaaattatgccaatgccatttaagtgctcatctgactatctgtgctgttcgcaggaagaacatgaaaattccaatactcaaatcaagtgcaagaattacggcgaggctaaattatttatgtccccagttttttccagctccagatttttgttctcttcagcaaaatggttcctcagaatcaagctccattgtttcaagtgaggtttgttaaaatgtttcgatttttctatttaagaaaaaacttacattaggagatgtagttattttgcaagttttgagccaattcattgtaatacaatttattctaccaggattctgatggaacactttgcgaaagtattggcgcggaaaatcttcagaaggtatgaaaatggcttctttgatctgtctagtaatttcttcagcatttgttttgtttgaagagttttcatttgatggaatatgagcattactataatatctcatcaaccattcactctatggattgatgaaatattgatcttaaaacttgtaaggatgtatgtttatttatttagtttagttcttctgtttcgtgttgaacagtttgttttgcgacctcatagtaagcacggattggataaatcttgcgtaccaagtttgttggtacccacagaaatcatcgacgaattacattctgagattccagatattgtagttgctgcccaaaatgttagtcagttgtggaatacatccaccggattgacaggagaaataagctgcgttcaagatgttaagtttatggttgaagagccgtggttggacgagaatactcttcccagttgtctcgaaaatatatcaagagaagacatggagattgtctttctcgggactggatcatctcagccatcgaaatatcggaatgtcagctctatccatatcaatcttttctcgaaagggggtttgcttttagattgcggtgaaggaaccttaggacagcttaaacgaaggtaaaacccgaggttttacccaaatacgtaatggtataatagtgtgtttatcgaatgtactaaccctatgacggttatggtttcacagatatggtgtagatggcgctgatgatgcggtgagaggtctgaggtgtatttggatttcccacattcatgccgatcaccacacaggcttggcgagaatactagccctcagacacgaattgttgaaggaagagcctcacgagccaatactcgttgtaggaccgagacagcttaagagatatttagatgcataccaaagacttgaagatttgaacatgatgtttctcgactgtcagcacaccactaaagaatcactcgatgcgtttaagagcattatcgagtctagtaacgacctaatttctataggagatccgaaaagttccaaagatatttggaagaaaccaactgacgggcaaatggctcagaaaatcgattctactttgtttgctagaggatcccgaatgcagagctactggcagaaaccgggtagtccagttgacaatatcacagaaataaagagcttgaagaaaattctcgacgatgctggtttggaagccttgattagttttccggttgttcattgcccacaggcgttcggtgttgtgttgaaggcagccgagagaactaatagcgtcggaaaatctattccaggatggaaggttgtgtattctggcgacactagaccctgtgaagcttcgatagaagcatctcgtgatgcaactattctcatacacgaggcaagtactcgtataccttttcccgaaaagtgtgtaacgatgattgtaagctctaacatctctgattttcgcaggcaacgttcgaggagggaatggtcgaggaggcagtggcaaaaaaccacagcacgacagaggaagccatagaagtggggaacgctgccggtgcatatagaattattctcacacatttcagccaaagatatccgaaaatcccagtattcgatgagacacacatgcacaacacgtgcattgcgttcgacatgatgagcgtcaacgtagcagatttgcctgtgctcccgagagtacttccatatctgaagatgctgtttcgaaacgagatggcgttggaggagtcggatgatgttcaagaatccatgttggtgtagtgctattgtactcaagtttcttcttcatgtcattgtattattaatttacaatatttttttagtcactctttttgtaatttgaagtgttttattaatattctttatggggattcactcactgcatgtatagtcagtcccctaagtaattgaaattaatggaaattatacttatgtttttttttcttcttaaataggaggacaaaagtatcttttagtgaaacatgtaattattatagtgaattaatctatacaaaaaaaaattgagttaataagcatagttcttattgtttcttcaatatatttgtgtgattcaattgaattcatataatatttagataaaatttaattaatttttttttttaccaacaataattgagagtttcatttttatttggccacccataattaccggttatattacaatcaactgtctttgtgtagtggtatattttgttaattttaagaatttatcaactacaagtggatacttaaagataaattttccattctatgtaattttattttttttgataaaacttttagtttaatcaatttgagtattaggtataatgtttgcttatttataggatgtcatcttatttatgtagatgttgtggcatatgtgggagtttcacattttttttttaaatcaagagcctcacatttgctctcttaaatttggtcaaagcatttttcttttcttaatgaattaagatctttattaaaagtgttagttcacttttttttttatttttgtaagatgtttctaatttatgtttgtacttataatttaagcattattattaagtataatggtgcctagtatttttcaaacgtgacattagttaataatatttttttaaaagttattatattaacttataggataaatatttttttggaacttgtgttttgcaaaaattatcattggattctttactttgttaaatgataaaattaactctatattttttaaaaatggtaaaaataaaacattgaatttaatttttgacaatttttttaatataacgaacttgaagataattcttagcacgaacagatacagaaaatataaccaattttgttataacacgtctaaattagagtattattaagttttattttaacaaaaaatgatttcaaggttcattttgtcatttaataaaatagagagtccaatagttaacttttacaaaacacagaatataaaataacatttatcttaaattatataaaatttaatacttaattacattaataacgatatgataaattaatgcgtttttattcaaaattttttttcttttatcttatttttattgtaaaatactgtatttctcggtatacttttttaatttctagaatttcaacaaattagaattcttaattttatcacctagggtggatatgataaattgattgaatggatttttgtttttattgatatacattaaaattaaattctgagtgttattaatgaaaagtttattttaaaaaaccaaaaataagaaagaaatagaattagaaaaaaaagggactcaacacttgttgaatattattttcatattgtattttcttattctaataagttttttttttttaaattttttttgggttctttaaatacaaattgaaaaaagaaaatattatttttgttgtaaaataaaataggtaattatataatatattttaaagaaatatttccaacaaaactcttttcaaatttataattattacatatatgattttaataaaaaaacgtggcagcaaaagtacctatcttacagttttgttgcagttgtattattttttagctattaagtgctaattaagtccgttaaatgacaactcagaatacgtggcaacatatttctttagtttatttaatacatagtctaataatatgtcgccacatgtttttaatgtgacacttaatgacccaaaaaaagtacgaccgcaacaaaattataagataaccgaccgatcggttacggtttttattttacaaaaaccctaactgactatttagaaattataaccgtataaaaccgattgtatgatttttagtagtttttcggtttgacggttttggacgatttttggtagtttttggtggttttggacggtttatggcagttttttagcagttttagcagttttttggtttaactaattttttatttcgaaaacctaaaccgactgccatatcaaaaaaattgtaaccgaaactgactgccaaatttggtgatgacgtggaactgaaaattcggttatggtttggtcggtttgattgtcggtttcgattttttaatgtttacgaatacccctaagataagatatttttataattactctccaattctcatggcccccatgagaattgaattaattacactgtgtaattactaaaaactttttatattaaatattagctactaaaaaaatattatttttttatgtaattactaactattttgctaaacaagatattaagaattcatatgtaattagcacctcatatccaaacacactttgtattttaaaatatagtgtaattactaaactctgtaattaccatcctagtaattaatctacctagtaattacacagttacttccaaacatagtttcggggcaaatatttttattttaattaaatatgcctactactccctccttcttaactgctttccgtttttttctcttgttccctccaaaattcattaccactttcacagagaccaaaatccaggaaacaggaccgccgatggaggagaggaagaagagaagctctgatggacgtgataacgtccacaataggcctaacaagactcctcactcggaaacaacacccgacctcattccttcaaacaccacttgttatttccaggtataactttcgagtttgacgtaagacattttctgtatttctgtttgaaattgatacgttggtttatcatgctatgcatttttgcgaattcgagctgttcagtgttcttactaaagacactgatttattgatgaatcgaattctgtttaatctgttgtttgtaaagtttgttgacattgttagatggaaaaggatgtaactttgttgttatttagttaggatttttccacaaaattttcagaatcgtgtttctgaacttttaggcagttaaaaattctccctgaattagtctttttgttggattcacacactttcgtccaattttgtcaattttactaacgaacacctaaggtgagtgattgtacatgtaccaaattgtgccctgaactactgttcagacgtatagtagtaaaattgaatggaattagactaaagtatttaaatccaataatctcaatagttcgagagaatttttaagagtctgtatgtttggtacatgtcaatgtcaaagttcgggaaaaataattgttaattagtttgtttgtttgatatgtcctcgagtataggacacttatttatacgattggattttaatgctgtataagtatttacttgttgtctgcagatactggggactggaatggacacccatgatacattaccttcggtgttgcttttctttgacaatttaagatttatctttaatgcaggagaggtaagtgttcttgacagattttatttatgtaaattgatctcattactttgtagataacttttgtaagtggattatgttgtttttagtcaaaaagttgcattggattatgtctaatatctacttaatgtgaatgaaagagtttctacttcagttatttaaggctgctaattgtctcaattataaaaaaattgtatttaatcttgattcttgatttgtaaacttcattggaaaattcaagcccatttgtatttaaaccaagtggacaaaataataccaaatgcttgagatagcttttatgaaattatgcttggcttttgtcatgtgattttttcatctaattattttttctctatttttcttttatacaaagtttttagttgtctcttaatatatgattattgttgtagggtttacaacggttttgcacagagcaaaagatctcattgtctcaggtgtgagttaattgaaggactatacttgtcaaatcaaaggtttgcttatattgttgggaagctcatcggtaaccataatgtgtttttctttttccagatacattacatatttctctctcgtgtatgctctgagactacaggtggtcttccaggtttgtttcttgattttccagatatttggaagctcttactattaaataagactaattatgatatttgccccataaactttgacatgtaccaaatgatacccatgaactattgagattgttggatttaaggacttttgtctaatttcattcaattttactatttcagtaattgtttatatattaaaccatgctctctagactttgatatataccaaatcatgcttctcgaactttgaaatgtactaaattatgccccttgaattttcatccatattagacttttttactaaaattggacaaaagtccttaaatctaacaatctcaatagttcagggggtatttttaactaccttaaaagtttaggggcgtcaaaatttaggggacaaaattcctaattagccattaaataattagttaaagagtgattattgctgtcccctatactggtatctatgcattgcaggagtgcttttgactttggatggtgttagatgttttgtgagtatcggattaacttgttgtttttctcttagttcctttatctattttaaatttgattcaagatggataactgtattctctatttttttttttaaattgtattttctcatatttttaaggtaagtgtacggggtccatcaaatctgaagtatttagtcgacacaatgaggtctttcatctcaaatggtgctttggtagatatagagagcttcgaatcctcacttagctccattgatcttaaacatgtgaaagatgtgaaaatatcatctattgttttacaaccaactcctgttgatatgtctgtagtatatgtctgtgagttgcctgaaatcaaggggagattcaacaaagcaaaagccctggctttgggtgttcgacctgggccaaagtatagtcaacttgttcaaggacaatcagtaaagtcagatcaccaagatatcatggtgagttatagaaacataataaaactacttatttgtttatgtcatttgtatgttttgaaagtaagttctattctccgatttctgtttaggttcatccaagtgatgtaatggactcttctcttcccggtcccattgtactccttgtagattgccccaatgagtctcatttgcaacagttgtt

SEQ ID NO: 187587 - DNA, 2276 bp, Cannabis indica
gttatttcagcttggagcaaatgccatactggctgtatcccttgctgtgtgtaaagctggtgcctcagcgaagaagattcctctgtatagggtaggttgtgtggtataagagcaaatattacactgttaactagtggatccaatgactattgtttatattcatttaatcttgttacttgcagcacattgccaaccttgctggaaataagaccttggtgcttcctgtgccagctttcaatgtcattaatggaggttctcatgctggtaataagctggcaatgcaggtaactttcacatccttttatcgtaggtggtgtggtccgggtaaccttctcaattggcatacttattatttgattcatgtacaggaattcatgattctcccagttggggcatcttctttcaaagaagctatgaagatgggtgtagaagtctatcaccacctgaaggtaggtgtcttctttctctcctcttaaacacactttattgatatgtgcaataaataacttattcaaaataaccataatgtgatacaacctaaaaaagaatattaattcatgaacaacattagaataacgatattcttaaaaatttggtcgacaaacttattataaccttttaacaaagaccataatcatttaaaaaatgtagccatcatagaaaaagaaagacattgataggaacttatatgaaaatggttatttcagccgtctatgtctatattgatattcaggctcagaaaatacaagaaaatataagatagaagaggaaattcgaggatccctaaagcctccctaagaatttaatgaattcctattgttacacaataattccacaccctctctattcaatcccatctcctatatacactggtagggacgacatcttcccttggcttactataaacagcttattatgacattatatcccaacaatatgtttttcatatgcaataaccaataacaggatttaacaactgatagcaagtcccaataaccagaataataacaaattgcacaaacacacaaatcctacaatatacttgtgatatgggataacatgttgtgactatgattttggcttattctagagtgtgattaagaagaagtacggacaagatgccacaaatgttggcgatgaaggtggctttgctccaaatattcaggtatgtgtccacttgcctagaaataattaaattttagcattgttcctaaagagtaaacaatttttttatgtgaaatgtgtatagaaatagattcttatgttgtgacatttcacatacaggaaaacaaagaggggcttgaattgttgaaaacagccatagctaaagctggatacactggaaaggctagttttagcatctctggaatctatgcttctacatacaatctacaactgtaagcttcattagttaattgcttttttttttcctaataggttgtaattgggatggacgttgctgcttcagaattctatgatagcaaggataagacatatgacttgaattttaaggaagaggtaattaaattgatgcaaatccatttttcttttccttgtgtacaattaaaagtacaagctaaattaattaatgtttttggtgtagaataatgatggatcccagaaaatatcaggagacagtttgaagaatgtctacaagtcctttgtaactgattatcctattgtgtccattgaagatccctttgatcaagatgattgggagcattatgcaaagatgactactgaagttggtgaccaagtgcagattgttggtgatgacctccttgtcactaatccaaaggcaagtcttttatgacactagggttaatttaacataaaagtaagttaattaatagataaattaactcatttatgagaataatctgcaatcttgacattgacagcgtgtggagaaagccataaaggagaagacttgcaatgcccttttactaaaggtagcactctccactatccatgttccaaccttaaataaggatcgtatactcattgcttcataaatacttaggtgaatcaaattggttcagttactgaaagcattgaggctgtgaaaatgtctaaatgtgctgggtggggtgttatggcaagtcaccgaaggtaaaatgactcattctttttctccaaccaaactaagttttttgctgatttgtactaatcttttccttttcaattccagtggtgaaaccgaggatactttcattgcagatctttctgttggattggctactgtaagtgactaattaatctctctctctctctct

SEQ ID NO: 187588 - DNA, 2547 bp, Cannabis indica
ataccttgaaaacaaggtttgctggtattctcatggtggctaagattctgaatcagttgactataatatttaggaaggcattagatcaagctcgttttgatgcgatcaagaacttcaccaatgcacggatgaaacctaatcagcatgcccatgatcccctactcaaggtagatggtcatttctaagaagataaaatccatggaactattatcgatcaggaaacacaagtcagtttgatccttaatagtttatctccagtcttcatgccctttacttcaaactacatcatgaacaagttgatgtttgactttcagaaattgataaacaaccttcagacatttgagagtttgattggaggcccacagaaaagaggtaacaaagctcctactactactcttgctaccaatggcgcagccaaggctgaggcaaacattgcctctacttttaaggccaataagaaaaagaagtagaacaataccaagagcaagacacttaaatcttttaacacatctaataagggtaagagggtcattgtaagcaaggcaaagggaaatggaaaattctccttttgtggtgaaaatgggcactggaaactccagtgttctatgtttttggcaaagaatcaaggtatttctaactcttttgtcaagaactcatgtgttctagagaataattaatccctttttggttattgattctagatctactaaccatgtatttattcttctttttcagctccacctgcttgaaatttgaatttatatcctagcgagtagttaagacagatagttcaatggtgaggtggagaatgtccaagctagaagacaaagctcaaaattttaaattttaaataaattgttttaactttcaaaataatttattccaatttatatttttgaactcttatttcaatttccaattatgaattgcaacaatcattatgatatttttagtattaatttaatttcagtttcctcttaaaggatttcattatgtgttgcttttatgaaattgagctttatattctgtaacatatccattgatgcctagaaccatttattttatattgcttattatctatttatcaattgtgtgtgatttatattaattatagatataataatctattgtatagatcttgatgatggtagtttttacaagatcaatctttcaaagaagaatatatacaacataaatacttggactaaataaattgttaaatctagaaattcttatggataatttgtcaagtccttagaaaattattgtgatataattctttaaatgatcatttgatttgataagggtagaaaaatatttaatatatgcagttcaataatcttttaactctagattgtattcaaacttactatctcaaaatttcaataccacaaatagataaaaataattagacgtatgcttagcttttaaaacctacccaaatccataagggtggatcttttcatggttatccaaatatttatacaaatatttcaacaccaaagtagcaaactagtagaaagtgtttatttgattttgatcctgcaaatgttccattgtctcgtacaatcgtaatagataatcccacaacctccattgtattgactcatgtcgtgacaactgaaaatatctataccactgtagtccctagcaacaatcacaatacctagtcttagtggatgggttcttaagagcctaccataatatgacaaggattacatttgtgataatgactcattgtcaatataaacaagtaatgaaaagtccatgaaataaactctaaaataaagctaccaaaacttgttctaaccatgcacatggatagtccaaaatttttagaatacaaggataaaatagaaaaccttgctttgtctattcaaaagacttaagcctcattcatatttttagcatcatacatgttttttgttgagatcaacaaccaatagcttatggtatccttagcaagtgtcttacattaatagaatactaggacattatcttaataacttattctaaagaaaatcattagacttcaagaattagacataatttatttaaagaaatagtttctaccgtttcaaaaataaataaatatcgtagaagaaaatccttaagtatcaataatgggatgtcttatgcctgcttctgtacgcattagactagacatctattgttgagtgagagctataaatacgtataattaaaatccagtaagagaggtgtaatattctgataaatatgataaataattaggatttatatatattatgagctaatcaagtaataagtggataaataagcgtaatttattaattacaaagatttatatagcatgcatgaatatactatgagctatttgtggaaaaaaaacatattttctaactggcgaccttggagactcaatcagggaccaaaaatatcataacatatttaattaataaatttgatgagaatattattataagttgataatgtaactattatagtaattaaaagtgttaacgcggtttttcaccaacggacttaagaagatcgtaaaatgagcaa

SEQ ID NO: 187589 - DNA, 3585 bp, Cannabis indica
tactactctctctctctctctctctctctctctctctctctctctctctctctctctctctctctctctctctctctctcttaaacttgggtgggaattgagaattcgcctcaattacacgaaccctcattttcaagtctttacctttaaaaaccatttttcattttttttgtcatattctcattttcatgcctcacttttcccagaaaaatttgatattttctcgggaaaattttctttctttctctctctcagctgatcagttatggcagctacttctaactttgttttaggtaaagctctagtatattttttaacgttatttttagtagtattgtgtaggggttctgtgagctgttatggtttcgggactttcggtttcgatatccaccataaattttcggatcccgtaaggggaattctcgggttcgatgaggtgccacagaaggggactgtggattattataaggttttggtccatggagaccatctaatcaagggtcgacacctcgcctctgatgatcagaccacacccctcgccttctaccctggcaacgacacagtacagcttggtggcccgtttggatagtatgttctctcacgattttcaagttcttgttttttgagctgggttttgtttggttggtgagaaagtggaggaaaacaaaaacaaaacaaaagggcctattttatattcatttatcattattattttttttttcaagcttttaatcttctttttctttttataatgttttgtattacagtttgcattatgccaatatatcagtggggacgcccagttcatcataccttgtggccttagacactggaagcgatttattctggttaccatgtgattgtaccagttgtgtgcgtggaataaggtctggagatgaggtaagcgatttgatctactgctaaaaaaaaatcagagctgatgatgaatttcattaatttaacttcaggatctagtattcgtatgctaccttgtttgactatctgaatttgattagtttttcgtggatttagccgaatattacctagattagattactagaaatgcagtcaaaattttcaatgaggaaatgtagttgtgaaaattggttaagctcatataattgcgtgaaaaaatcccaattttggttttcctagactgtaatttttagtcataaccgttgacttagtagtcattgatctgctgcttagtatagtaaaaaatagctctattcagagaggcagagagctttcaatggtgtttaatatggatattattgtgaaagaatctccaatttgtttcatctggactgtaattttagtcataattgttgaatttgttctaaaatggctctcttgacttagtagtcattggtcttctgcttagtacagtacaaaaatagctctgtttagagagttttcaatggtgtttaatatggatattatcgtgtgaaaaaatctccaatttgtttcctctaactgtaaatttagtcatagtcgttaactttgtactaaaatagctcttttcagaagctaattataacatatgttatgatcagtcaactgaatttagtaacatacttaataactgcttcttaataggcttctaagatttgtattcaatcagcatagttttcggagagatttgcttattgtttgatcaatctgcaaaatagcttcatttgtttcttaaaattctttgtcctctcaaacagataacagagtttaacatcttcagccccaatgcatcatcgacaagtaagaaagtatcttgcaacagcagcttgtgtgatctacaacgacgatgcccttcccaaactagcacttgtccttatcaagttgtgtatctttctaatggcacatcatctactgggtacttggtagaggatgtattacacttgactactgatgattctaaattgaaaggtgttaaggctcccattacttttgggtaagtagtttttgaagtgattttgtatcaataactaactacagggtagttaattaactgaaattactcgagctgatctcatgtgcttgcttgtggagctttgtaatgttctcatcattatcattcattctctgttagcaaccacgccgtaatgtgctatttgattgcagttgtggtacagttcagactggttcatttttagaaggtgctgctcccaacggtttaattgggcttggtatagaggctatatctgtccccagtctcttagcaaaagaagggtacacttcaaattctttctccatgtgttttggacgcgagggcttaggcagaatcagatttggagacaatggaagcgtggaccaaggagaaacaccatttagtcttagagaaacacagtaagtggtctcctcttagtaagcttaattcaagtgtatttctaagataagttgtgtaatatctgtactaatttttctttgggaatcattaacagtccaacttacaatgtcactgtcactcaaataaatgtgggaggtaccgatgctaaccttgaattcagtgcaatattcgactctggtacctcatttacatatctaaatgatccggcttatacacagatctctgagagtgtaagtggtttaattagttgctttggcctatcattcaaagctttagtagtctcatttgtagtttttggctatcttgcagtttaataaaatggcaaacgaagatcggcattcaagtaattctagtatcccctttgagtattgttatgtcttgaggtcagctattattattatttcttttcatggttaatgagttggtgcacacccttccaatgactgacttggtttctacccacaggccaaaccaaacttcctttgaatatcccgccctgaatttcacgatgaaaggcggtcatgtttaccctgtgaaggagtcaattgttgtggcttctgataatgtggggactcatatttagaattctgatatccctatactgcattgtgtaatctaaactgaattcttgtgatctccagggtacacttatctactgtctgggtgttgtcaaaagcgaaaatgttaatatcattggacgtgagtatctgtttgacttatccttttcttttttcctcgtagcatctgtgcatctgtgccattatttacaataagactttattgacattcatgcagaaaacttcatgactggttatcgtgtaacttttgatcgtgagaaattgatcttgggctggaaggattctaactgtgagtaaaatgtaccatttctggattcatgttcagaaagatttctaatttattatattatgtgacaatggcaatctatatctctaccaacaggtttcgatgaagaagaaacctcaacgcttccgatcaagccatctagttctcctgctatgtcccctgctggcaccctaagcccagaagctacatcaggcagtgtcaacaatactatcaaaccagaagctgcgccgcccagaaatcattcgtcaaaacttaactctttctcatttatgttcattctactgattatttgtcaattctttgtcattgtttgatcattctttttatttaggcaggttttctcagcccctgtataatatatgcatatgtattagttt

SEQ ID NO: 187590 - DNA, 1956 bp, Cannabis indica
cgacctttccacaacatttaaacgagcaagaatccaatgtgattagactccatatggataataaacaaaacatgatcgcacaaataccaaggagcgtcacacaaaatctttttacctctaatataattagcaatgatatgctgaatacttatcaaagaaggatcatttttctttgccaaaattttttcatacgatgcattaatgattttgttgaataagcaatcaatggttgtgaacttaaccttcggttcttttgtaagaagatagtaaaaaatgatatccaaatgttaaagaataggcaaagaacattataaaaaaaaaaaagtaaatcagaataataaaaacaacttaaaaacaactaaaaaataaaatattaaaaccaatacaatgcaattaaaaaaaaggcagcaaaaacattaaatatatatataaaaaaaatgaattgaaacatgataacaaaattaatagcataaaaaataaaaataaaaaatataaccaaaaacataaacgttggcaaaaactaaacactataattaaagatgatggtggtatggggttatgttaactttttcttttcaaccaatctatgttggcaaagcaagttccttgtctatattcagcctgagactctttgttgcataattcatgaaggctacttaatttcctaattcttcttttcttactgcgactaacactaggaagtcctcatatctttggggttcgtttggtatgccatattacatcgtattttattatatagtattatattgaattgtattttatgcaatatttttatgtaaaactacatgtgttattaacttatatgggcacttaaatatataatcttttcgtacaaattaaaatttaagataatatcatataaaaatatgatatgtaatttaattcaatataatataatacaatacgaactaatacgacgttccaaacgagcccttggaaatctattttgtggggtcgagatttgttccatgaccgtgctagatgacatattaatgatggtacacaagtttctatcaaccatgatatttggattcctaaccttgatcggaataaattgtcctcttttcactccattcctttggatactactcttaattttttgattcattttaatgggaggtgagtctattcttagtatccctcagacttatcttcctctttcggatagacttgagtacgctggtcgttatacggtgtggagtaggtattggcttgggatctaattgaatggtattggttaggcttcaggatctattgggggacctttgtcatggtctaaattgtagaacatgaacttgcctattaaagtaaagcattttaggtggaaatcttggcacagttttcctaacttgacgcataagggaattcactaagtatttctttcccgttttgctttaagggccctaagactgttcaccatgttctttgggcttgtgactacctacgacatatttgggactttttagctagttttgtgtgcatccctttttccctaagagtggatttttaggacttcttcctatctcattgggataactttccttcttttaactcatgagaaattttttgtttgcctctagagagtctgctgtgagtgcaatattcttgttaataaaaagaaagtgattcatgataagcttgtttagtagagttttgagtacattgaatggtaccataaacccaatggattgtattctcatagaaccactgatgatattaggacggttattgctcataggtgggcgagccttaggctagacgtactaaaatgaattgcgacgctaacttggatatcctatttgtttagtggtctcttcataggttggctcttattgattaatgttattgtctttgaacttttttctctcatgacatttcttttactaagtttgctcataaagttttaattaggctaattttttttttttcaaaaaa

SEQ ID NO: 187591 - DNA, 1232 bp, Cannabis indica
aaaaaaaaaaaaagagtgtttgagatactatacaagtaactctcattttgataacgtcctcattataaaataagactgttaacagcattagctcaaaagaaaaggtaaaactaaccgagtcatacaactggaaagccctgccacctccttcaatggcgacagccacaggctggtttgcaaccgccttctgcaatgccttctcgtcgttcacagggacatcttcataagaatcaattgtgaccacccttgcatttttctgcagaatacacacgatcaaaactatatgagcacatacataattctttttcaatctccgtttaaattaaatgcataccctgtattgatcgcattttccatcagtagctttgtacggataatcttcttcactatcgataccaccattgttaattatgaactcataagcatagtccatcaaacctccattacatccctcgttgtaagaagtatcacagtcaacaagctcctgttcggatagtgagatgaggtcaccggtcaaaatctgatttattccttcaacagcagaaatcgttgagaaagcccagcaactccctacacgattatattcaatgttaaaaaacaatatataatacaaggaatggaaaacaaatcatttttgtattacgtaactgcaacaaaaacatcttggatttcagaaaggaaaattataaaataaattctatcattaaatcttaagaaaacatttttcttctctattaaatagtattatagtatatttaaaaatatctaacactttgcaccaataaactgataaaagtatttatatttcaattgtcaaattctactcacatgacggaatttaatttaatttagtctaatagctggacatggagctgccactgccaattagttttttatttttaaaactagaaacatgaaaatattttttaaaatcataatctataaaaatgttagttttataaatttttagttaagaattaaaactttaaaagttttaaaaacaaacaaaaaattacttttaaacagttttttttctttctaaatcaatactgtacacttcgatcccaatttaaactatgtaatccaaaccccgatcccaaccccgaactgaatcccaaacccaaacctggaccccgactcaggcccaaggccccgaccccgtaccctggacctcgactcggcattggacccgaacccgttgctagtcccagacccaatttaaataaaatcaa

SEQ ID NO: 187592 - DNA, 5758 bp, Cannabis indica
aagcgtgttcgtaacattattgccattaaggcggaatctcttctaactaaccttgagctgccttattccaatacctagtatcgctattattacaaaaactaatcaagtctcctatttctaagtttttatgatcaacaaaatccttccaagtagggccacatatctgatcatacaaagtacttttcttattcctatcgttaaattctcccatttctccatcaatttcgaaattttcagcaatattttcctctaaataagtatttcgaaccactttaacatgtaattgaatttatcttctgtccaatttaaacagtctaaaacttttaagagaggtccatgattgaatttattaacatgtaattcttttgtttgttgtgtttggtgattgatgatgtttttctctttataaataataaaaaaaaatgattgggaaaagaaatttaattgttggtctatgcaccctcgatacaaaatgtgcattccaaaattgacaaatctcaaaactttcagtttgagataaatatactaagtcgtacaacaactgaaacaactacttagcactcgatcttttcgactttcctcttttcgcaaatttgccaccttttttaccccggctgttattcttgcccttcagataagaaatttgcgttgccttcttatgtctctcctttctaacttggtcaagatctttgatttcggaacgtacatgagcattaggcacgttgttctggtttcgcttacccttaaattttctgttatcaccttgtgatcggcctgcaaaagatcgtcctgcatagccatgtccacaatcattgagtaaataatttcttcaatcaaattttaaacagtaacaattttgaaccgacttccacaaaaaatgtaatgaatcgaaacaagcatccactcgagaattttaccagggcgttcatcagcattctcttcaccacctctaaaagatattttattgtgtgaatgttctttccatttcttgtatatcccagttttgttagcttttactcttgcaccactttctgtctttacctacacagacataaagagaagagttaagttaagcattccctagaactacaagggcttttattgtattaattgatctattttataaggccaaacaaccagccaaaatccatagcagtaaaaatccttatgtaaatcttttttggcaaaaatccccatataataatttagcagcaaaaatctctctttgtggtcattttgttacaatgttagtccctttgtggttacaatttcagggactaatcctgcatgaaatttaacgatttaagtgaactatacaagtgcaacaaaatgaactacatagggatttttaccatcaaaaaatttacgtaaggatttgggtgcaacaaagtgaaccatgtagggatttttgccacaaatttcccttcttgcatgagaaaaagttcaactacgagcagataacaaactacggacggaatgatggtacaaacaacaaataacagtgttcggagagatgtttctccttatatgtatttaccaaaattaaaaaaggagttcaaaaattaccttcccactagctgtaacacggtcaccactatttaatttgatgtactttttactcctctgccaccaaaaagataatgaggttaggggaaattgttcggataattatatgatcataatgaaacatttttaaatgccgaattaatgaaaccataagtaatctatataccctgtcccagtgatacacagatttttgtctctgcattcctgcagtatcatcggcaactaaatctaaaaccgccgcttcaaacctaaaagataaaaatggtttagttcagtcccagccactacagcatatagcaaccagcaagacagagaaataggcaaaaagataatacaatcagtgagaaatctgcaattgcactctcctgaaaatgagcataagatttacctatttgaaccaaattcctgcttagctccaacagagagtcctgactctgaaatctgaaataataaagaacatataaatcagatgcttattcagatagaaaagaaaaaaaaaatccgggacggggtggagattctacttcttgacataacaatacatttgcatattgaaatgaaatttaatgggaagtttgtacccgtattacttacatgatttgtcggtatagaacttataaagaactcttcatccttgaagtttctttctttccttttagaaccagcttctaacaatcagggacaaaaaacattcaaacgtttagattgctttgaaacaaacctcacttttgaaggacatgtagagagaaaaaaaataccaaataatagagttttactaaaaccagataaaatgcatgcggttaaacttaaagaaaaaagttagatgacaaaagtcaaacctttattatcctttcccatcacagaagctctgtcatcttctatttcctgcgaccaagatatttaaggtaatttcttaagagcaacactattaactgaaatcaaaactctaactggtgtttggtatgtgggtttgggttcttgggaatgggaatgggaatgagaatgttaaaccaaacctacatttggtataattttagtggagggcttatgattaagttggctccctttttaagtttatttttggggtaatcttaaactctttaaatacttgagtgtgagattcccttaatctcagcccctctcaactaaacccaccaagtaaaactcttacaccaaacaccccataaatgagattagctaatataattgttctaatcaattgtggtgattaatttaataaagtcaaaagaaagcttttacagcacaatattgtgagattaccttctccgcaatagtattagaacgctgctgttgaaccaagttaattatctgctcatgaatagctctttttttcttcatcacatcagtccattgactagaagaaccctgcaaacaagccagaaaaagcattgaatatatataattaccccactgaatgaaaacattgttcgagagagagactcttaaaatcagaatgctagtcacttcagagaaagagaaaaggaggaaaatttgaaaacacaaatgattgatgcagagaggtatagaagttacctgtaaatgcttggatttagcagcttccccttcagcttcaagtatggtctgcttcggtctagcaaatattagctagattaaaaaccatgcatatataaccttggaaagaaaaggaaaggcatggaaaactaacctaaacgtcttcaaacgctcagaaaacgccagtgccattaactctcccccaccaagaacatttttgaacattggatgcaaaccttcaggaggtaattcctttgatcttctaatggattcctttgcaggtgatggttttgtctttgaatacaaacgaaatgcatttacacaggttttcatcaaagaactcaattcaccagaggaatcaatgacttccctaagtctatctgaaacaagatcaattactgtctggggaaagcgtccatagactgtttctccatttgcaatggcatcatcaattttggacaatataccatctttatcatcaagaacttcctcctcagctggtgcaggccaaattggtttcgagagaaatagatgaagatccaaaagataaggcatgtcctcagttgtaacaaaagaaaatgcagtaccctttcgaccagccctggcagctcttccgacacgatgaacaaaaattttaggctttggagggaaatcccaatttatgacattatcaagcaacggaatatcaatgcccctggctgcaacatcagtcacaatgagaaacatagttttccttgccctaaaccttgatatattaatcttgcgagcatcttggtccatatcaccatagcatacagaaggctcaataccctcttccctaaacaacatattaaggaactcaacatgatgctttgtggacacaaatattaatgtctgctcatcagaaccaatttgttcccttaccaaataaagtaaagctgcattcttttcttcatgtcttaaggtgaaaaatgcaagtttcaaatcagggctaatcttagtttccaaatcaagccgcacaagcagaggatctcgcaaaccagcctttgcgaactcagcaagggcactaggtaatgttgcactgaaaagcaaagtttgacgattttcactcaactgcgcaagaatcttatgcaactgctcagcaaaacccatgccaaatagacaatcagcttcatcgaaaacaacatattctacagtgcgcagtgacatgtcatccacctcagacaaatggtgcattagcctaccaggagttgcaattatgatatcaggagattgggctaactcttcaaactgactttccatactatcacctccaactagtaaactaatacgaagatctgaaataacaaataaaaattaaatttaagccaatcttcttaagtttttttcttttggaaaaagagacaaagttcacttgtctaaaccaatcttcttaagttaaaccaatccacccaaaagacaaaaaaaaaaaaacaactgattctaatttacaaaccatcatataaatatcaaatagaattatttagggtttagggtttaggatcaccttattatcattttccaattcctaatttgactcaaaaacccagcgactctaatttacaaataatcatataaatgatatacagaattattaaaatactttactccccataattgttgtcatgaacttcaatcatttacaacagcctttgacgaatttaagcattacaaatttataaaagtaaaacctctgtaaaatgaaaataaagaaatcattctataaccaaatgcggaagaattttgtaaaaggatacctgtaaagcggccgagctccttagtgaacttgtgcgtttgaagtgccaaatccctggtaggagaaaggattagagctctaacgccactctgaggcacgtgctgcttcaatcgctcaatcatgggaacaagaaaagcggctgtcttgccggaaccagtacgggccatggctacaacgtcgtttccagcgaggatgagaggcatagttttcctctgaattggagttgggacaatgtagcccttgcgcttgattcctcgaaatacattaggactcagacccaatgactcgaaacctcctgacttggccttctttctttgcttctccaaccggattaaatctgctttcgagctcacttgaatctgagtcggtttaggtctgcgatccgccattagagagtttctgtttcacacacaattaatttagatatttggtgcaatcctaactcagtctcaaaccaagcttattaataacaattatgtctattaatatgatgaacagtggtaactagtgtgtaattatcttattgtgaattattcaagcgtttcaactcaaatgaacagagcacaataaatccttttgtaatggttacctgtctccaatcaagcagaggaaaataccagcgtggttgaagttgaggttgaaaatagagaggcggaggccacaaatcgtggttgaaatcgcagagaaacaatggctgaatactcagccttgtatcgtcgagaacagagagaaacggaagaagaagaagaagaagaagaagaagaagaacagaaggttagccctaaaattagtgggctttgggctgggtttcatatattgggctttcaaattgaaaagcataaaatgacaaaaaaaaaagcttgaaataagttgaagaataccttt

SEQ ID NO: 187593 - DNA, 608 bp, Cannabis indica
tatatagtttccaaccagtaagtactcttaatttgtgtaacatataaaaaaacatgcttataattagctattatctaaaacagttacaatatatattattcattctgataaattttattcttgtttaaagctgtaataataatttgtcacatcatgtatacgtacgtaccatgcatgcaatattaattatttctacaagttcgggaagtagtatatgttccccatatcttaaaaagtaattatatatatcatgtatataatattattatgtattattattacatctgataataataatcatgggaatcatattaataaatatctattaagtctaaggtactggctatatatagtactagatattcaaatacagtaaattaaccctagctatacacatcaaacaaaaattatctaaatcttttttttctagctgtatggatatatgtgggggaccacaccacatgactacttatccataaatcatatagaacttttaagtgtatcgactcaacaaaaaaaaaaaaaaaaaaaaaaaaaaacctaaagtcaagagattcgtaatattataataagttgtactagctgctactatatatatagaccatgag

SEQ ID NO: 187594 - DNA, 2059 bp, Cannabis indica
tttaatatataaagatatatacttcacaatatttgtgacaccttttaataatttaagcttattaaagatttagttggaattgttgttaggattttattcatttttattcaatgatcgttatcttgttatcttaatgtatttgggtcaacttcttggaaaggtaataagatttgtatttattgaaaaaggttcactaaggaaacgtagcaagattggatactaataaaatgagtatatatattttaagagaaatgctaaaggcaccactggtgcctaacaccttcctacgtgtcaatatcgctattggtgcaattaagtatcaggtcccatatagtttaatataataatttttatagagtatcgctagccaattgcaagtcgacatatatatttagaaggtactaggcaccactggtgcccaatagcaatgctcatattttaacatggcttaacacattgtacactttattgttattattattaaaaaagtaataagcagcataactatcgaaagtttgctatttgatactctaaaccttttcctaaattaaatttttgaggactaaacctctcaaactttacatttattttggtctgtattgtttcgttaattgccaccgtagattattctttagtacctttctaattatttctttatcctttaatgcggttgataagtataatttggatccaattattaaatttgtgcacaacttttcaggattaataattatagatcattttttcagccatccatattattatagattcctaataaaaattgtaagaatcattttttgggaaactttaacgagtgaatcaaaaaaattaataatacgaacatgagttcatgattactaaggattcatgttgatctactattgatcatgtttatgatgtgaattaagtctttgtagtaaataacatgtttgataaaaatagcttaattacactccaagtcaaatataatctctattatatacaataccaccgaataacagataatgtgaattaagtctttgtagtaaataacatgtttgataaaaatagcttaattacactccaagtcaaatataatctctattatatacaataccaccgaataacagataatgtgaattaagtctttgtagtaaataacatgtttgataaaaatagcttaattacactccaagtcaaatataatctctattatgtacaagtcacaacctcatatatatatatatatgaataaaccctaacagataattggtgtgggatggctatgatggcgatcgataggatgagtaatgtttgggaaaccaggacagatcatttgaagggtcctgattggaaatcttcttctatcttcctctctattttgaatcaactttcttactttaagttttaatgattttaaattgttgtaaaaagagatgagttgatggctgtgaacaatttggctattcaagtgaggaaggatatatggtatagaaggaatatgttggctaattaatatgttttttctaattccataaagctgtgaagttctttataaaaaaaatctcacagatctgacacacaatagagaccatgacaacctcacacatgcgactagagaaaattaataaaacacaactatcgatagatcttataaccttcccaaataggaagcaacaatctccaacaaatgaaccaccaaagcacgacagtactcaaatgatggtgagccaaaataaagaagaaacaaaacttgcaagcaagcccttattagatccataaaagcaatgaagaaaacaagtaaaataataaccattaaaaatcatcttatatatcaaactcaacaccccttcccctcaaccatggccacaccccgagcccgcacggataggtcggtgagccctggccagagagggagcacaaagaaaatgtaaatgcatggtaacagagaataggaaaccctagagagaaaccctagagagaaaccctaggattctttttttagcactttttttcccttcctcatcttcatatatattgtcatgtttggctagaaggttggtaattacacataaaaatc

SEQ ID NO: 187595 - DNA, 4740 bp, Cannabis indica
atatttaattgcagtcaagatggaagtggagactggtcacttttgtacattcatttttgaaaaagatacattatgcatttgcaattaagccattttaagtaaggtttgcaatgacgacttttacatgaacaaagaaagaaactaggttcacatataattccataaaataaattaaatgaagaaactcatgtatgttctacaagtacaattaagatattgcaataaaatacttttagcaattcttataaaataaagaaaaaataataacagaataaaaaagacaaaacgaaaaaaaaaaaaaaaaaaaaaacgtagtggcaatcattgttgagaaagtacaaaatctttcctttcatcttgaacttgaccagctcaaagcctcaaccaagagagatttatggtttgtggggaatgaacttttctggtaaagcctcctgtgtttgtcttgtcattcccttctttccacatttttaatcttctctctggctgtaactcgctttgttaaacactcttctccgatgttaccttaaacactctggcttttgtcgagcaaaacctggctggaattcaccaaaaatggggtccaaacaagaacacaaaccagaaaaatggatatttaaacagcatcagttgttgaacatagaaaaactcatatcatcaaataaaaaacatgaaacaaattgagggccacaatgattttgagaccttttctgctgtatccagctaaatgcttttgatgtgaaaaattccaagaacaacagcatatagtaataatgaagcgaaaaaaaaacccaaggattacctgaagaagcattgatggaacatcaccagtttcagaaacaacatggcttctggtttttcttccattgagtgtcgtaatggatgggctgttagctgtggttatgtcccaaaagcttcgtttcttagctgaaggaactggtgatcggaagcgatagctaggactcttcaattcacctccaattggctccttcggtcgttcctttggccgtagactagcccttgtgatcatccttgtcgccgtctgtagtgacacttcttcttgtggtttgtcactcttccttgaaagctcacgaataagttgatccttttgtttcagctgcaaagtgtggtctttcttcattttctcaatctcagcttctaatgccttgacagttctttgaagctctctaactgtttcttcagcaccctttttccgcgactctggagtgaagcagttaccacctaagaaagaggtccttgtcctccttttctcatttggttgggctgtagatggaggagtcatgagagaggtacctgaagaaggagttggagagaagtttgcagccaacgactgtgcttgaagagttatgagcttctgttgctgacgagccatttgcaatcgcaattcgcgattctccttttgtaactcaagcaataacttggccctatcagtctcagattctggtggttgctgtatttcctcactcatttcctcgcaggcctgcaaagtccaagaatttcttacaacttacaaagagttacataacagaaatgtagaggaaaaggaaataagatcaagaaacagaagttaggaggaggaaccttggtcctgatttccttggcacgatcagcccagtgtagggtattttgggtttcaccaaatgagagattgcttggactgatattggctatcataacagtgttgcaagagcctcctagtgagtccttaagaagttgcgtcagctttgaatttctatagggaatgtgcttcttgccctccacaagggcattgatgcaactgctcagagcaagaagtgacctgttaatgctagcaccctcaagagatctaagtgttctttgatctgtggctagtgctctctctgacccggcaagatcaatcagtgaaagcttccccactcgatttaccacattcatagcttcatctctcactcggtattcaaccacaacctagatgatataaaggttagaaaacttttgtttactctacatgtcttttcttaaaatctcaaacagccatcctttaaaatacctgcaggatggcatgggaacgtgaagaagtttcattgagacgagttggttcggtggttcggttatggtttccctgttggagtaatgccatcacctatcacaaaccaaagtaaacaaaattacatactgccccacttaaaaaattggtctgctttgctgcatatcattgttaaaaacaacaagaagtaataacgaaagttttaacaagcaaattatatcagataaagtgaggaatgtacttcatctgttgagtaagctctgtactgtgtaagacctgctgctatgattccctgcaaaccaaaccttacttcatgaataaatacaatggtcttcacacactatgttaaatcattgaaagaaaatttgacttcaaaagcaaccagaacaataatcagaacaaatatctctctctagcaacaattggaatgtaattcatggcataataagaaaacagacctgtttgtcttctctcaacaccaaaggccttccaggagagagtaaatccctgacagtttcattatagacctccagataagaaagatgaactacatgatttccatcacagctcctctgccttatttttgtgaagaggtccttaattgccaaaaccatgactcctggattctcaaccgtaccaagcatggtgtaagtttttccagcacctgttgctccatagcagaaaactgagccatttcttccctgcaggactgcttccacaaggtctgcggttctgaaaaattgtggagtaccttttttcgatcaaaattttattattactaaaggtcattattgagttaaattttagttggcacaatataaaatactcagaggtacttatctataattaatcttgttcttttgtttggtgaagtagaaaatgcaaacaagatataacaagaaaaggagacattttattctttattttcaccgttgttacagaacttatgaaattcattgggcaaaatctatatcttaaacataaaaaaatttccaaaaaaaaaaaaaaagttgaagaatatagttttagtactcacgtagtggagtagacttcttgttgagtagcagtatctggaaaggaagagtcaaatgtgaaatgtcttcccctaagcctcttcagccttagatagtcgttttcattggcgaactcagtcagaaaaacatctcttctgtttacaattctcacacaacaccgagaacccatttctttttcctttttccccattggtctaagcctcacaaacaccataatcctactcccacagattctggttttcaccggaacagtctccaacttctccaattcttgaacattctttaacaagtccacgcctttcgattccatctgaggcgccaaactccccaatgagagcttcctcgctacaatttttggagccacggcctttctcggacacgctgagaagctcacaattcgatccctgccaccgccgccacctccaaccatcgccacattctccttcgcgtcatcatttgaaggctgagggagtacataagttcttgtaacggtggagttaggtattgagttctccctcatcacttggttattattcgactttgtttttttctcttcttcatttttacaaaatccctgaagctcacagcttgactgggtcttgaatcgttgctgctcttctgccatggaagactggttcttgagagccagggaagcctgcttttgctgctcgtacaaaagggttaaggctctcattttctctttcaatccatggtgaaggtttctatatggaagattaccttccttctgttctggactttcgttgctcccttgattcgtgagctgagaccgagttgaaacgggcattttataaattcttttcgttgttattttctcactatccaaacatggccagataactttctcccgaaccgagttgaggaaatttgctaaaaccgtcaagagagctcaaagattgtcccgaaaagttaagggctgaaaaagaagctgaaatgaagaactggaagtgaaacgagagagggaagatccaaagatcatacgttgtgatttcggttattaattatgtgacaatctcaaccgtcggattgtgagggaatgaacatgtgatcgaaggtagatgatttgggcaccctactttctgcttcttccccaccaaaggcgaactcttgtgtctctgatttttgaattttcaatggagtggaaatagcaaaaagggcagagttgtaagggtctttaaaaattttgaatcttagtttataacggtcgaaactttacaataataataatattatttttaaaaaaagctcaagatattttaaggggtttttttttttacaaaaatactgtatttttgacaaaaatttataattttactgtcacacagaattttttacaaaaataatgtttttatttttatcaaacaaccgtaaaataacaaaacagaacaattaaaacaaaaaataacagtggaataactaaaaaataattgtagaacaatcagtgtaaatttaacacagtacacagtataaaacttacacagtagttttgaaaaaaatttcgctccacaatgaaaaagtaaaaaagctagaaattttagtatgtagtgtgaaaacctaaactttattattttggatagtgagtgagatgagatcaatgagaagaatttgaagaatacccccattttttatacattaatcaaa

SEQ ID NO: 187596 - DNA, 11087 bp, Cannabis indica
gagattcagtccggaagacctcaccaaattcgaatcatcttgctttcattggacaccctctactaggtaaacatttttagatgtgcatgttttgagtattgtttagtgagtctgaaaattttagaagtcagagagaaaacaagttggttgcattagttagttgaagccaggccaacatgacccccccatgctaaagtttctggcataaaacccaataattagtatcttctctgtgactcaaaagaaatttataatatttttaatcaattactttaaaaaaattccggttagctgttttagacaatgcaaataagtgataatgaatacctcttctagagagcaatgctagttagaagtagcccaagcaatcttttatgctacaactagacatgaactctgtattactttttttgtctttttgaaggtgaccctctttatgttgttggtggtggacctcagcgctcagattctgaatatctggatgaaaatttcgcattagatgggtgtgtttatgatttcccttgcctataatagatagaatctctttttgaaaaaaagttgtttcattttattttctatcaatatttgtgtacagagggtttctgagacctacgaaacctgttcctggggactgtggctacagcttacatgctcataaagttacactatctcatccaaccaccaatgaggtaagcaggattaagcattcaaaaattaactgctactagtttagaatgcacacaagcagttctttgtttattatacttctctcaattagtgtacatttttcttgagattcctccagttgcttttattttctcattttgctttggggttctctgcgattggtccttctaatgaatatactgtcagattattcggtttaattatttttttcatataaacttaaataaacaaatgaagcctcatcgatgtatcgttcttgtaagatattttttttgttcttttaatggaatgaagcaggtgatcataatctcagcgcctcttccacccaaccttcggacacggaaagaagtgcaagaaagataggcatgagttagcagttagaaagattacaagactttttgttttatctttgcgtttgataaaacatgcaggtgagcatgtgcttgtgctgatgcgtaatgtttcattactgtattgagtcatataggtgtatcgtctccttttgctcctcctgcatttaaagtataatatcctccaaagaaaaaaaaattataaaacaattgttaaaagtatcttccatacactttgcttggttttagtttactacaagtgatggaagaacaaaacaaaaaggagaaaagtaatatattctcttctacttgattttatttcggttatgaaatagatgaaagcttttcccttctccttttcgctttttcttttttgcaaattggcaggtatcaactttaatttgtattgaaatcgaccaccagatcctatgtctacaaagctttatttgtcaattgctatgaccactaacttcactttaaaatcaccatcgcacgaaaaccaccacatttcagaaaatgcatatttttggtgttgaaagaattgcctagacaagcatgtaagttaaagagagagagagagagagtttggcttttcaggtaaaagacaaaaaagaagcagaagtcattaaaatcaaaaccataattgtaaagggaagagagagagaacttgaggaaataaattaatgagatgtaaaaagaagtcaaaatcaaataacctcctactacccccccactactaacttttaacgaattattttctgtattttttttatatcaaatacaaatacaaagctgctggaatattacaagcgcatctaacaagattactttaccaaaaagacgaacttaaaataaacccctctattgcccccctatcatttcattgttgaccaatacaaaaactataatacaacgggcggcaatgaaaagaatttgccgctcgaaagggccgcccgcgttcgggagaccccattcatctaaaaggcatataacataacatctactacctgctcatgtccccattccctctccaagattcatcctctctgataatgctgctactctggcccccatattgctgctcagtttttgcaaagtgtcttttaagcgcaaccacaggatccgtcacacccgtggtgcatcctccaccgacaacaatacctcccctccccaagacatttattccaaccatccctcttccttggtgctgaaagctggaaatagtttcaattccattccgtctttgcacctcagagaacatgtcttgtctctgattcacatctacagtaaatggctgcactttagcagcctctcggctccggtacacctgataatcaaccattcccttgctgttactaatctccctggtcggataagcagacacgccgttcacatcgagctcattactattgacaactgactgcaatgactgctgctccattgtagatgagggagcagagaaattactgaaggcagcaggatacttggctagcaaaatcgcagaatccggcacagatggaaatgtggcttgcaatctgtttccatcccaataagagtaattcctcatttgaacattctcaatacccaaataatttttatgatcaaaatttaagagggtagaatttccatctgaattgtggaggttcgcgaacttcatgttagactggttgctcaacttatggttgttactcccttcgttttcttcattatcccggtaattggaatccgcctttggcaaagatggagcagtaagtatcttaccaaacaatttcacatcaccaccgatcctgcttggcttttctgaatccgacaaactctgcgaacgagattttcgacgatcacttgcttgttctgtattttgagacatgagtggaaactgagtcgttgaacaagaaggattcacattgctgcacctttgtagatagcaattttgcaataaagaagcattgctacttgtttctgagctggaaaggccttgaacttcagaggaatttctgcacctgacatccccattcacctctactttaacattcattcgtactggacaggccctcagaacctgggaggattgagcatcggttaatataggaagacctgttacatgggcattagattcatctttacaaacagatatatgacacacatctctgctctcctgaaaatccagtgatgatgacattttatcttcattaccatttttctcacaccgaatagcaccagagttcagcgatatagaatttgcagagacaagaggaatctcttgagccaatgggattacacaagacttttccttggaattcaactctatagaaacttgacgctgatagtccgggttcagactgaatcccgaacaagagtttctatcagaagtcatgtgggaagcattgccagttgaatttgaatcctgtaccacagagtctaagccgctttgcccactagtacttgcattgcacttctcatctagcctgtccattaggttcgcaagttcatcagaagatacttcatctacaggcttcttcccaaccacagattctgtattgaatagcttatcattttcatttccctcactaacagattccaattctgcaacagaagtcccttgttcatccccatcatctcttcctgtgtctatactggacaacacagggagtgtttcttggataggaataacctttgcttcgccaacaccttgtgtgatagtactatcaccatcagacactacattgggcctactctcctgagattctgaagcatcgatgtttcttttactatcgccatcagacactacattaggcctactctcctgagtttctgaagcgccaatgtttcttttactgcttagttgttcccttccatttttttcctctaacctgctctgtacgtcaatgtttcttttactatcgccatcagatactacattgggcctactctgagttggacatgaatcagacagctgagattctgaagcgtctatatttcttttactgtttagttgctccctttcatttttcccctctgacctgctctgcgcagttagtgaagtaaagttctcagctgggtcagtttcatcattcttcatcttcacagcagacaatggcaagtcctcatccattttagaacctgacttatcactgcaaatacctgaccccatttctcgagcacagacattttcagagccacttccacttccattagcatcatcacctgtaaacgttctttcattttctggtccaggatgtatcagatcaagtccaaggcacttcctagccttactaaagaaaactttgcactgatcccgggacctcgatctaacacactgagagatcttggcaaaatccctaccatatgatgtaactgcctggacaaagatagctttttcctcatctgtccagtcagttggatccatttccccacaactctcatcagaacaagtcccgtcatcaacatattgtgtaacatcaggtgttaaaggacgtctaactacagaatcaactttctgagacctccactccctgtagccctccacaggatcaacagaacttgtaatacaagaactcatcgcctctgatgatagggatccacataaaccagccagaatatcagcagcaaatgtctctctatcattcccaacgatatcaatgctagatgatctttcatcagtaccataatcaccccgtgatgctttagattcactcaaccctccaaaaatcaaccttccagagcatgccttctgatttctcatgcaatcatcagcattagccgccatcactgaagccacatccagaatatcaagggaagcagcattcatctcgcgattccactttttgtttagcttcaagtatgtagcattagccaaggacttgacctgcttaccacagtccaatttcttctttttctcaaaagaatcagatttgtggtttttgtagtagaactcaacacagtcagcggttgtcttgtgatcaagaaaagaggctatttttttaaaatccttcccacaagatgctagcttatccatgaagatctctttttcttcaggggtccagggattaatcatagccctctccttctcaacaacacagggatcttcaactaagccattattagaaataaaccttgacacaatcttctccctttcgtccaaaatcagagcaggcatcttcaagttgtttctatgaagcttgacctgagaatccagcagcaacttgcttgtaaaattaacaacttctgctgtagggaccaaacttaagtttcctgctgtaagaaaaattcaagttgtttaggattagaatgagtggaaaggataaaaaaaaaagataccataatgtatatggacctacattctctagactaacataaaatgtgctcaaaagtatctttcacctttaaattaaacaataaagctcatacctaaaaaaaaacatatgtttcaccattaatgatttagcatacactattgtcacattttgagagtaggatcagataattttgatctattgatttgttatgaaacaaataagaatattgaaaaataatccaaactaaataacctcctttcattttttttatatttcttttctattatgttaattaattcaatcccactatccaaacagacctgagtggcataatatcacaaccaacaaaaaaaaaaaaacaaatctaattcagtcctaaatttaaatttcgccatatcactactattatggccaacatcttcttttacttctatcttaataggccacatccaaaatcctgctttctggtcagactatagttcgttggcattatatactttcttatacagattactttgtccacaccaagattcaatggtgataatgatatcttttatgttttaaaaaaatgatatattttgtgtagttattataatcagataataaaaatccaaaactccgttcttgtggcattctttgtaaataattcctgtttgatggtgttaccatggcgttttatttttagctcaagtaaactcctcacactcagctgtcagaataaatatcctttaaagtagaatgaactaatgaacgaagtacacagcttttcataggagaacagactagcaataagaaatatcacagttctttccacttaaccctaatacataatgtactttctcctccacttcccaatttaatctcaatacctccatagtaccactgaatctaagttctaatgttttttcttatttctattggggaaaaaaagaattccctcctgactactgtttaaactaaactacattacactacaataaagagagaataaaccaaacataaaaattaaataaaacgaaaaataagcccataatacaagagctgactaaaatgaatccacagctcttagtatactcacaagggtcacgaaattgtttcaattataaatgcatcataatagccagttcaaaacgaaagaaggctggtcacctggtgaagaaaaacgagaacggatggaagatcgatgcttttgataaccattatgcactgaccgtaagcttaattcaagctttttctgagattttgcacggtgtttccttatagatagcaaacgcatgtcttccttccacaagctttggaacgctctgaatttcaaggttataactctctccttaaaccttttaaactgcttcctcatcagaaatttctccttaactagtgtataatcctgctgagatgaggcattgagaccttcagaactatccaggctaaattcattttgaggcaatagcttattaaatacatcatgagctcccttcgctaactctttatttgacgacaaaatgacactctgtaatttaacttctccgtcagtacatgagcccaaagtatcaattataggtgcagttatttcaccctcagttagcatactacaatcctcataagtatctggaacagtttcctctcctcctgaaccaggcactgagtgttgcacttcttggttggtcaatggaatgccatccgaattcccagtagcatgattcaacaaatccgaagaagatacagctttagccaaagataatggctcaacaaacttcgaagtcacagttccaggactatcaacatcctcagccttcacatttgcacaagcttcttccttatcactattgctgattggtaactcttccgcaactgcatcatcagtggatctaatttgcaacagagcaggacgtgggacaagatgggtaataacttcttcttcagaagatattaaacggtcctctgcaggcaaagaacaagaaactgatggagagctaccgatagtgatggatttcaatgatttgagttcattttcaagtgaatcaatttctgtttcggtcacctccaaggtctttgaaatttcagccttccatatcagcaacttattaattgcagtagacctcacataagttgagtccactgaacttggataatctgactgtagtaactcaactagtgacgagcccaatgttgatattgagtttgaatccattttttccaagttaaacgagaatccttctgaatgattaagagacacaggaccatgattaagagacacaggaccaggtgagccacataagttactaccatcattatcaatactcactgccttgccaaatgatttctcttccacacctgtcacaaagtgataaaattgaatattaaaaaatcatatacatacacatcaaaataataataaaagactccttaaaagtaagaacaaaccgctgtcagcaggtgataaaacaaaacaaaattcacaagattattcaagaacaaaaattaaataattcgagtctccaaaaataagatcccatcaaacagccaattaaaaaatttagataccaaaatacgagccaaaattcaaaataaacctgttaaaacatgcatcaattaaaaaatggggaagagattctaatttaaatggcatctacaaatgataaaggacacatttatgaaaaaacggtaaaagataactttagaaggtacctatcagacaagtttacaagggtttaacaatttcaaattgtatatagcaaagaaaatacttttatgtattgccaagaaaaatattttagagttcttccacatgaaaaatattttagagttcttccacatgaaaaatattttaaagttattccacatgagtgagtactctagaaatataagtgcataggacttaatttgatagcgacattgagagagtacaataggaaatcagacctaatataaaaaacaggaatgtatttctacacacaagaaaaagtctacttctcttgggggagagaatatacctaatcgcataccaagtattttcactgcacttctacttcaatatgagcatcacaagacactggcacaactcaacattcagattttaaaaaaaaaaatagttttgcgaaatcactattaattgagtcccttaagaccatctgctacgggaatgtaaatatatttggcaccaaaagtcaatatgtgatgtatttggtacaattttagcactacactccaatgcaaaattgtaaaagctgatgcaataataaatatttcaatctttcatgaatgttcatttaatatttattaaagatataaaaaaatcataatttttctttatattttattgttgacagctaaaaataattccaaaagagttacggtaaaaaacatagcatttaatgctaatagctagcaaaagacaataataaattaataaaatatcataaaagtaaatgaaaatgtttagcatttataatgatgcaaaattgtatcaagctatattgtgtgccaaatttggtccaacttttagcatataaaaaatttaacaaaattgttgacacacccttggagcaagtattttctagaatgactacattgtagcaaagtatcccaaatttggcacactaatgaagatgctctaagatacatgttatttcagcaccaaatatttttttttttataaatgagtttccagtctttcagaaccttttgatcccaaccagctactgatacaatgagaaaaactacaaaattccataacagattgacatccttctaaaattagggaattacctaactttatagacacaaagcaacactacctcagaccataagattaatgatataggaataaattatacttctaggataagagaagaataaatgctaaacttaataagataggaataaatgatacttctaggatactaaagcttaaagatcttctgaattccaatccaaatcctcaaccaactaatgttttagttacagaaatcaattaataataataataataataataataataataataataggtagaagataatagattgtgaagatattttataaaaatcctcaacatacctggggaagaactgcaagcaacagacgatggggttgcaggagatgcacaatctgaaaaactcgtcactctagggcttttatcaatcaggcttgaactgagagaatgagaaggttctgcattgcttacagcaaatactccatctctgttaaaggtgacttcagggacttcaactttctttttctcatacttggccaatccctcaccccatccaaggcgtggcttcttcctggaagtcatctcctctgatggtgcagaagatgccacacatgcgttagcatctgctgaaggagactgaactggagttgcatttttcatctgcgattcaacctttgtgtcaattgaatcaacagccccagtagtcttagagcaactcaagtggctgaaacctgaacctcttgaagataagcttccagatcttgtccacttcataggcttccaatcatttatgcccagagaatgcttcctatcacatctctgagctgtgcccaaccccatggaaccacctgccttctcatgctggtccttaaactgagcctgatcccatgtgtttccaaagctaccattcgaataaggtgaatatggtggcaaatcttctcgtgatttctgttcattgttcatgtcatgcactcttccaggtgtgcttggaaacccattgttcacgtcatgcactcttccaggtgtgcttggaaatccattgttcacgtcatgcactcttccaggtgtgcttggaaacccattatttgtttcccaggtgtgacctctccattctctttgattataggagcctctattttcccgactacttctgccatatttcccttctccgcgagaattagaaggccggaagccatcatcttctagaaccttctcactggaccgagatgcatacccatggccaggcacctcagaaaaaaatcgccaaccaccttgcttaccgtgaccttcacaaatattcagaaataaattattaattacatatcaccatgggaaattgcaaggaagccaaaggcaacaaaatcgcctctctcagatctttacacaaagtaaatgaaaactccagatctaagaaatacccataaaataatgaacacagacgataattcttaagaacggatgacacagggaccgatgtcccaaattataaacagatggaggaattgcacaaaaactagttcacgggcctgcctaactccctccttcgttgctggagtaaggtgagaaaaattgagaaacggaataaaaaataaaacaagagaaccatcgcgttttaaccatacttacctaatggtctgcgaaaatcggtcgatccccatcgattgagctctcgcgagccatgatgtgaagagtccctccatctggcgacagaccctagggactccgacctctcctgcttcctctccctgaagaagtccttccgatcccaaggcagtggttcaggcggcatgaaaaccaacacaatcgcatgggaaaccccggccccctcctattccaaaaaccctaccacttaactcgcaccaaacaacaaccaacacctctgccacagccctaatcagcctcctggtgccttaatctggagctcgaaaccaccgccaatcagagaatgacaataaaaagtccccaacctaaaaggaatttcaaggttttcaaaccaaaccacaaccagaaaaataaaatctcaaaacacgaagcaca

SEQ ID NO: 187597 - DNA, 7288 bp, Cannabis indica
attttgatgtttttttttaaacttagtatttaaaaaactgttgttaaccaaatccctcatttagttttcaaaattaatttttatttttaaaaaaataaaaatatataatttttagtttacttttttttttttttttttatttttttaaatttcacttatttaacgggctaaaaagtcagcaataacatttggagtcggattacaataagagaaatatttgtgaaagaaaaggcctaatatataatagtaccaaactctgaagatcatctgtattactataaattgtttacagcaaaggaaggcaattggaatttggaaaacacataacataaagccaatcttaattaactaattttcacttacattaacttctttaatttttcattagtaaaatatagaaataatacaataataattttaacaacaaaagaaaaagtaagatggatggatggatggatatgaactcttctaatactttttttctgtaatatacatctctctctctctctctctctcttttaacttttataatctttattactatatatagcacgaaacatagtgtaaagaatgtgagaaaaataaaattgaaaaaatatttagtaatgatgcgccactagtctagaaagaaaaggtaagattgagaatagtgcatccatctagagccaatctttttgggaataccaagtttagagagtgaagtagtgaatggagtggtctgtcactgactccaaagccctcaccacttcatgggacgttagaagccccacgtattaattttacgttgctatttgtcatgtgcttgttttggaattaccgcatgggcttatctctaaccgtttcattaatcgtcaccgcttccaagactaaaatgccccaacttctctcctactacaattacttccctcaaatccagtacaatattatcttttatctttttacactattatcattattttaccaaacatatatatatatattattatattcatatatataaagaccagggtttgggtttgctcttcctgagtttgccacctgagcctactgatgcaaacaagggggttcgccaagtgtgtgtaagagaattgaacagtaaggttgcccatggacacgatctgtacggttcatcatgccaagtatcagctcaaccccaccagcagccacgtttcaggtcagcttcgcatctctcattactctctttcctattccttccttccttgcttatttgtcatttatatatactacgcctccctttaacccaactctcctatgacttgtatgcttaaatcaaatattatctccttctcttctcttctcttcacttattatatacatcatcatcatcatcttcattatatatatttatatctatataacttgctactatacactcatttgaattcaaatctctctctctctctctctctctctctctctctctctctatttatatctatttttcaactcaacaatgttgaagtcaagcattggatttgtggagagaagacaggtgaagaggccagctcaggcaagttcaagaaaagggtgcatgcgaggcaagggtggacccgagaacgccacttgtactttcaagggcgttcgacagaggacttgggggaaatgggttgccgagatccgagagccaaaccgcggtgcccgtctctggttagggactttcgacacgtccaatgaagccgccatggcttacgacgccgctgcccgtaaactctacggctccgaagctaaactcaatctccccaaactactactaccctgcacttctcctcctcctccaccaccaccctcctcatcctcaacctcctccacctcctcctcctcctcctcatcatcatcatcctcatctcacaacaaaattgatcatattcgttctccgatatctgataatcagaaggagttaacagccaacctggaccaacaaccaccccaggctgttgttgtgaatgagaaaatgaaaattgatcataacaaatcaaatacttctgtaaatattgctcctgtggctgtggacggcgttatccctcccccaccgtgtgatgatgagcatcacaattcgaaggtggagcatgatgatcaagtagtggagagagtaaaagcagcagggctgtgggggagtgtggacactacgttgcctgagttcgatgataatgagatatgggctgaggctgagatgtctctcgactttccaatcatggaaaatccgagcattttcagtgccaacattgttgatggaactggctgggaaactctacgctctccttggtgcatgtaaattataagaagatgaaaagaaaggatgctataggcttaaattattagatatttatacaatcaattatgtgtaaattaataagatatatatatatatatatacttaaatcgattataaatataggtataaagtaaactagatatgtaggtagtagtagtagtagtagtagtaataatatgggtttctgggatattcattacatgcgcttatttgtatgcagttattaatttttaatttctgtttctgtttttaattttttgttgtgttgttggggtttgggagtactgttgttatgtataaaaatctagctggcaagcgtgctcattttatgaaacttataggtttgtttgttagttggtaaatggtatgtgctcattttattattattgtttatatttgctgcccctctatgtagaatagctctctctattttctcattatatatatgtattcagttggttttcaacacaatgcgtcatgactgatggattcttctcttctgaattatcagtagagagtagatataattgacagtctgggtggtctggcgtagtagctaggagtgctgttttggattcttgtacaggttttcagcaggccgcctctatctgatcttattctccttttcctcttcttcaacactgttaaaaaatatcttattttgagttgagttatagcctcaattcatttgtcgttatgcgttctatatttccaccactgcttctgtacatttaccatatttggtccaagttcatggtaaaaaataagacataattatgatgttattattccactatgtagttaactggcacaaactatattgatccaaggtttgttactaactattacaaataagataattcgtcccaatagcaaactttgtaagatttgctaattaaataattagtgtccgtggacatggttgatggtagagtgagaagaagttgtttctggagtttttgagtattataaaatggctatggatgattgttcaggtgaagggttccagtatctgttgtggagccatgtggaatcagcttcaaccgcatagccatcttgatttcgatgccaactataaaaggcatgacttctgttctttatctcaaatatcccatgaccaaagctagcttcccgataagcagagtagcttggctgtggctctgtcatcctgcagtccacacacaccacacccccacccccaaatgaaattaataataaaaaataaaataaaactctgaaaatgatagatcagaaactttattcggtgtgtgtaactggctagtaataaatactgaaaagatatggcaattgagagataataaagtaataatagtagacatactctgtcaccaatcctttaagatttcctccatctccaattgttatgtaaactggtgctgattggtcacttttgggtgtgcaaatcccattcacaattctatatgccacatttgatatgcgttcctgggatttaaagatgtcaaaacacatttaatatgggtttggtttaattaattaacactatatttaaagaatttaattgtgtagaaagtaaaaaggggccgtacagatctttcataggcatgaacatggcctgagaaaactacatcaactttgtacttgacgaaccatggttcgaaaaccactctcatgggttcaccctccatgaaatgatccacataactattgtatattgggcaatgaaccagaacaataagccacggtgtctctgttcggtccacttttggtagctctttcattagccatttatactgaggagttgatttaactacacacacacatacacgcaaatatagagaaaaagggtcaaaacaaacataacaagtcccggttttcttgaaactataaataaatacaaggaatctttctgtgttctgtgagtggtttcttctgactaatgaagtcatcactcctccaatatcttcctcgttttcagagctatttgtcacttcaaacatcatagacagctaaaattgtagtgatcctatatatagcaagaaacacactcacacacacacacaaacaggaggtggaagaagagtgacgttaccaaatgctgaataagaagacaacactatgatgtgtgctgaagctcgtttgatagaataccaaagaggagatgtactttgtgaagctctgtacggtacatgaaaacggctagtataaggtttgaaaggttcactctcaccctgcaaggaaactcatttgatcaaatcattgctccacatacacgtagttaaagcaaacctcataagttttacatttatttagcacaagtcaaaagtcaaaattatgatccatacaagttgtggagcaaattcaacttcatgattccctacagtccaaatccaaggttgataagcagcatttctctctacaaaccttccccaagtgtcccatctagtaccatcatgaaaagggtagtcgtttgcataagaaaggtccccaacaaacaatacggtttgcccttttgcagggtttaactcataatgtgtaagtgttctgtttgaatcatgagattggcccatatcccctgccctcccccccaaaaaaataagtaaggccattttatattgaagatcaaacattaaatgaaaccttattacaaattgaaatcaaatatatgatttaggtatggttaccaataatgccaaaagtgtagggaacatccggaccaagacttggaagagtaataaaccaaaatttccttgtggtattaccaattccaacttgatagaaaattggtgtcaaactgcaattataagcacaagacaatcatatgatatggatcacaaaataatgaattggggggtaattaattgataaataatactactacttacctccaaatcgtcaatggtgcagtgatggaggtaaccagaagtgtagttgaagtagctgtaagtaataaaaacgccctgggcactgtacttcaggtggctcttttctgaccagtaaagtagtgtacttgagccaggttcatttggagtaacccaagagacaatcacaccctcgcccacatgatctccttgtgtaatatgaaccttaaatcacataaatattattcaaaccttagaagtcaaagaaattaatataattagtacgagcaaccaagcagatagggaccgattgattgagttgagactcgagaatgagaatgaaaactcacctgttgaggggcattataaccggagggtactctgaaaacatcactctcaattggcatatctctcgagaaatcaatactcctaacataactacttgttattccaccatcacataacattaatccccaagaaaaaagattaataataataataataatcaaaacactatcacatccccacctcacttccattcttaatataagattataccttatcgatctatctattgatcacctttaccaaacaatacagagaaagtctccctttttatacactcaaatgacttctctttctcattgtacattttttgatcaaataatggagaataatatctttattttaaaaaaattaataatctcttatcatctcagaaagctgaaagcagccaatgaccataatggtttgttggacactatttgacttcattgacaaatacaaaaaaaaaacaataaacaaaagtagaaatgcgtattaaagtaaacgtcttttcttctaattgccattgtattgtagtcattattgattaaagcgtgtagtttcggtaactcggacaaagaactagagggttcaacacttcaccttttatcctcataattaaggtctcataatcttccttcttttaattaaattaatgttctatttcatctttatatatatataattctcctgctttaattatgctttaaactagtttttcattttttgggagttattataatatatcaatccaagttaattgatacattttatactaagtttggaacaccatgtgaataatattatatttgattcaatccaaaaatgaaactcttttaaaatatgcttacaaatatatagtaagagatatgctcattattgggtttgggagagtgaattcttatattttataatattttgttttaaattgtcttggacagatgtacaatagtatctgttgtaaaatctagcatgagctcactaacttattgccacttgttccatattttactttttgattaaagaaaaatagcgtgcaaataaggcatctcagtgacttattatgacatatatatacatcatcatatttaatcccaaaaaaataaaaactccatttaggtaattaatgagagatttttgtccactacttttcttttcccttgtatagtctaaagtagttctaaagcttttcagttctatggtggtttcctttgacacttggagagtttataacaatttgttttaaatgaatgtatatattaaatttttaaaaagattctaaataatttattatgctaaaagtagaggttaaagtatttatttcatacgcatatgtaaacataaagataaatacatgtacaaaaagttgtttcataaaataaataaatcagattttttttattaaactgaaaaaacgtatgttagcactataatacacattaccgtatggaaaattagaatgataacttcttgtactaaataattttcattttcagaaggtttaagtttctttcctatactctaatagcaaaagatataattttctttttagaaaatgctaactagcaatttttaagcaccacaaaaaaagtgatattattagtacattctaatattaaatccacacattttgagcactgcaccctacatagttttttttattttttttaattaatgccttatgcagctcttcaataatgcctttttatgcagcttttcaataatgccccttgcctttttcatctcaataataataataaaaaagaaacaataaaataatggtgtacagtgagtaaggagattcatatcatacatatattcactaattccc

SEQ ID NO: 187598 - DNA, 2342 bp, Cannabis indica
ttaagttggattcattctttagaaatttcctgcataccgcttttccaatgaatttagggaaacttgtataatgattttctgaatgctcaattgaaattacctatatttattttaatgcctctggcatcatatatgataaatcaatgattgggttctcaaagaacactcaattttatgactaattcttttactcatcacattctccatgcaggctttgaatgctcaatcgagagcattacttatgcagaaactagaccgcactggtattgccactaggttcgtctgactcaacaatcttttataactgggtcacgcagtcactctctcacatattctctcacttactctctgcatggtattatctttgacatttgcagtattgtggggtctcttggagtacctgcactgaatgggtctgctccaaaccaaagtgccatgaacttgccaattaatggacaaactgcagtagctgctcaaggtctttcagttgcagcctcagtccccattggaactcctagtgaatgtttactgctaaagaatatgtttgatcctgctactgaggtttgtagtgttattgtcttttctagcgtatgtgttttaataggaaaaaaattgacgagaacattacgtattaatattgacctttttctgggggggttattgcagacggatcctgattttgatgcggatattaaagatgatgtagaagaagaatgttctaaatgtggcagggtgatacatatttatgttgacaagtaagtatataaatacttgcaagtaaatctgttcctgttcttgtgtgtgctagcgttgttgtatctcattttaggtttctatgctgataaatttatgtggacaaacggatttgattagtcttgtgcatgatttatgtatttttattctcatgtttaagaaatgaatactgaattcactggattttttgtagttgaatgatattgtagaaagtgtatagattaattgttttacttgcttggttatatttctttttgatattgtagataacttcctaatccctgcagactcttatagctttaatcctaatctcagcagattttttaattcaattgttttgttacgcagaaatagtgctgggtgtgtttatttacggtttgaaactgtggaagcagcagctgctgcccaacgttcaatgcatctgagatggtttgcaggcagacagatctttgccttgttcatggtaatatatgttgccccagacattgtcatttatataatcgaataagagtagaattatttcatttttgttatcaggattgtgtttcatgaacatcctttacaatattctttgcagcaacctcaagtatacgaggccaagtttagaggagcttaaaaagagaggtgtgggagttgcagatgggggttatctggaatccaagctcctgttctttatctcttcatgcctcagttttaggacattaatttttatagattcgattcgtttacctgtatcttaacagccagcgatatgtttttgtggtggatatgtctgtccaagcaatctgtaaacatgtattttcatttgatctttagttattcaaacgtatttgttctttttgggaaattttgccaccttttggctcttgggatggcacgagatgttcattatactattggttcacttcacgatgcaatatttacttgatcaaataataggtcttttaaatttaattaaatggctcaatattcaatgttgtatataaaattgattaatacttgaaaaatgatgtctgaattcaaaatatcatgtgaatttgtaaaggtatattttaaatatccaaaaaaatatatatattttatggatcattattttgtttttcaaaatttggtggttgttttattttgagaaagggtaaatacatttgaaccgtatattttgtaaaagttactgattgaactttttgtttcgttaaatgataaaaatgttaaataataacccgaaaagtattatgacaaaactgtttatattttcggtatctattcgtgttaggaattgtttttaagttggtcgtattaaaagaaaattgttaaaaattaagctcataatcttattttggaaaatacagagtccaatttgtaacttttgcaaaacatatagtccaaaatagtatttaccctttgagaaatgatacgtgaattcaaaatatcatgtaaagtatattgtcctaaatatccgaaaaagttcgaaaaaattaaaaaattatggaattctagtatttttttcaatatttttatttgttgttatactatattgtgctattgttaggggtgtttatcaaactactcaaaccgctcgcaccacaccg

SEQ ID NO: 187599 - DNA, 3118 bp, Cannabis indica
ttaccattttatttttgtatttgctggtggttctcgtggccaactaagatttatggtgcatttttttaagaaaaaatgtgtaatctcggactgttacgtttagatctatgatttcttagttaaagtctgactttctcttgctctattcaccgttctctgtcgaactgcaaataaaaaaatataactgcctcagtagagtccctttagaggcaattattagcaaataaccgtttccatagggtccctttagaggcagatatttgctaataatcacttctaaaggaccctttagaggtggttttttttaaccctttagcgacccttagaacgccaacaattacgatttttttaaaaaccacctttaaagggttgaaaaacctcctctgaaagccctttttatagtagtgagaggataagcatcattttcattttcaagcagcccctatcaagctgaagggggtttcaaccacaccaaagccagaaaatgaaatcaattatgagtgaggtgctttgttagacagtcgacggtttgattatgtgagggtatgtacctgatgataaggcttttgttcaacactttatctcttacaaaattgacatctaattgaatgttcttagtccgatcatgatacacggggttagctagaagaaaactggctctaatggtatcacaccaagtaacaagagtttgagaaagaggatacctgaattgattctgtaggccttgaattcatgaaatttttgccgccacatgtgccaaggctctgtattcggattctatacttaagcaggatacaactgcctgtttctttgatgatcaagacactaatgtatctcccaaataaacaaagtacactggaatacttcctctatcatcgagagaacatgccccattcgcatcatagtaacttgttaagtcgaatttctctaagtactagatgtgcaattcaagatggaatgttcattttagatatctaagcccatgtttcattgcactccagtgtgttatagatatctaagcaaaagtcaggtcgattgtgtgtcaagtactgcagaaccccaattatacttcggcaagaagttggattttcatgtggctctccatctgacttttagaaagctttaccaactttcatagggattaaacattgctcaagatgttgcatagctgtgttgagcagaaaatccttttatgtatttagcctggttatgatagatcccggtctcatccctatgacctcaatgcccaaaaagaaactgagatatacaacgtcttttagatgaaagatataatttaatttagtgatcacaactaaaaaacttcattttcccaactgtgttaaatagtctggtaaattattcacgacagtctctaaaatcgatgcctattcgacgtttgggaaaactggatagattaggtcacagtggaaaactgtcgataaaactttttcctgattgtgcaaaactatcggggataaacaatcgcatgtacacttattgccaatggttttgcatagtagattaactgttcaaagagaaaaaaaaaatggttttttagtgacatttcctttgttacgttgggttgtagaatagtgaaaaaatgcaacttttttacaattttttcctcagcattgcttgtacatttaaaattttttcaattttgaaccggcgacaataattaatctaacaaattttttaataaaaaagcttgtattttatgagatttttggaaaataaaatattcaagagctaaagaaataataaatgccagaaaataagagaggaagattttttacgtggttcggttgttaacataccctagtccacgagtcagtctattagcgtcattgggcgatattgatgaatttacaatgttttgcaggaaaccataactctttctccttaatttctatctgaagacaaagaaggtcaaggatgattttatcaaagattttgctatgtgttttgttgacttgcccctgatgcatgaaatgaagggggtatttatagcctttctgacgggtatggatcgctcccttacctacctaggatatctgctcaaatcctactagagggtaaatttcatgcaatatagagctgaatgactgttgctcccgtgggtagccttatgctcgcgcgtgtagtaggtggttaatgggaaccactttgtactacttggacatgtgtcacacaatggtttaatctttaaaatcaaaggaaacttgttactctaagctcgctcctttgaggatagatgtctaaattatctgctcgatagaaagatggtggtgatgcgtgtactacaatgcggtattgtaagggacaatatccgattctatcagggaaagcataactgtcacttcattacctagcacatagaaaaagtcgacatccaaaacatctagtgaaggtcgacatcctctttaggctttaagggcatgtatcctaaggttaaccacaagagtctctctgttagacccttccgagtttgagaaagatacttttcatcccacttttaggaagtacttaccaacgcatgcgacttctcacgcatccccgtattttgaacgactcttagtttacggagacttcataagtgctccataggattttaaatgcagggagaaaatgtgaatttcatcctttcatgccacgtgtcttactctgcaaaaaggcagataacattaccctcaagcttttgggctactctatgatctagaagcctataatactcccctgcttctagtagagaatcttgtagacgtggcactagcctaattcgtggatacatcccatgcattgtcaccatgcatcaggatgataatcacaagtatcattagtctgtcccacatatggcacttctaattcatctgctgatgtcgcatgcttgttgggatagcgtcccttaagtaatgattatgggacaattgaggtgacttctaaattaatgtgtacaagacaagagacttgtttaaatgttcatgttgtgtattaaatgcaacccttttggttccctatccattggatcaaaggatgattttttgggaggacaaatttgggccatcagttggattataaatttgggccatttttcattttcctctttccatcaccctta

SEQ ID NO: 187600 - DNA, 1891 bp, Cannabis indica
ctccaaacacccatttgcagaaactcactcttcagcttcattgctcatcacaaccatttgaagatttctagggtttaactctccaagtttggttttacacggtcttggaactttcctcgttaaagctcagaacttcgattagtaataaactgttttgctgagttttgaggagatattcagtgctttcttccgtcgatcggagatttgggaaggaattctgaaccagttttggctttttcttttgaggttagtggatcggcatcagttcattggaattcgtgttcgtgaaaaatttcaagtctttgtttcgagttttagcgaaaataaaaggaaagaagaaaactgggaatctggaaaatatttttcgttgatttaaaatttgtatagtttgttctttttgggataagttgttgagttcaattgaggattttgtttcaaacagtttagttctatggcaggttgtttgccttttctgttttattttttctcaccaaccaaacgatggttcgaatgtaagatctagagctgtaaaagaacattagcaagttacttggatttagaggctgtgttgtagattcaaagaccttgtgaaccgtcccagcatgtcaaaatagattttcttaccaaaaaacaagcatattcttttgttgattttacttggtatatgggtaccgacttgtcctgattatttcgataaactttgaggatttaagcaagcatctttaggtgttaggctcttcaattgcgacccataagagtagagcacttgggtctaaaccttgtatcatggtccccgccattattgtcgtctgattagtccttcagtgggaccttgctaaagttttgtaggcttttttatttagctcaaaagtaagctttttgatcccaattctatccgattacttgatatttatgattttcagaattattcagggaaaatgtcccagaaatcccgtcctccgccaaatttccaatcgatcaaatcattgcctggtgatttaaggctcatgggttccccgacctccgatcaatttgggaagtttggggatgcaaagttaggacacagtgatatgtcctcatcaagtatacctgaaaatagtgattcaggggacgtggttgttgacaatggtgttggaagcatggaccaagtgaatgaggattcaccatatggtacaaacgtagtttcagttgaagagagaccctcaagtggtgatgaagattcagactctgtagctctgcctgtgccatccgtctctgcatctcgcagtgaacacaggtggggtgataccaactcctatgctgcgaagaaggtacttttctggcttctttttaaattccagataataatagcagttcttgtctgcatatgtaattcattttcttctatggggtagtactcatgaaatgatgatgttcattatgtattttactcactactcaagtactgtggtactgtgggtgtttgggctaattttgcagacgttgtagatatttgcaacatcaaagttgaacagattataacttactgtttatcttaacaattttattttatttttattttttgatggaacattcgttcatttttaattagtacatgatattattaacctgttgatgcctatgcattttgcttcaatgtttagtaactgtcggagtctttctgctataggcttttttcctctgccctcccttcccatttcagttgtatatttattaataacacataagcgctctttgccttgtgtttagtagataccagattgatgttttacagattcttttattgatgttgttatacacaatgagtctacattatatgatctagacttgaactgtatgtatgcttttgcacttctatcaaattaaatcgtcttcctttggccgaaccccc

SEQ ID NO: 187601 - DNA, 3505 bp, Cannabis indica
aatttaattatttaaaccaattaaaaattatcagctgtcaaattacttacttaataattttataaattaaatatttatttaggtataaattactctaaataatagtaataataataattaattaatttattattatatgaaaaagggtataattttgtatatattttttttttgtgatatgggcactcccctctttctcctcctcaaactctatgcaaagagagtttcataaaggagactactttatttacctttttcatgatgcacgcatccatggcagagaccctcctgactacttactactactgctaatacacacaaagggtagaaaagaaaaatacatattacaagaaaaaccagagccaagaaagaaagacagagagtgagagagagaaagaaagaaatggagttgaaatgagttgattcaggcaagtatggcatgcgaggaacgatggtgattttgatgaagcttctcttcttcattcttgatggttatgagtattattattgatttttaaattttaactaaaagtttattgctttaggaaaatcctcaaaacccacttcagttagctaagaaagtttgaatctttggtgggtttggtcggaaagagaggaaaaggggtatcagaaattggagggttttgtttcgatttggaaagaaagaatcgaagaagaagaagaaaccccacttatgattttcacatgagaagaagcccgagccctcccacatcggcggcatcgactctctcttcgtctttcggtggtgggggaggtggcgatacagacaacaacaacaacaacaacaacacgggaggtgtggcgcacgttcttccgcctgagtctgctacttccggcaaagacgagtggattcaagctggggttggggttgaggttggggggtcagttttgggcgaaagatgtgggcttgttgttgggttagaggattgggagaacatgttgtcagaaacagcgggaggagtggtggccggagattctccaccatcgggaggaggacaagaccactcacttctcaggtggatcgctggggatatggaagacccttcttcttttggactcaaacaacttcttgagtttgatggcaatgccggtgttggcttgggaatcgttgatcaaggtccgggctttgaccatcttatggctgggattaatccaagtttgggtttttctggttctgtgtttgtaaacaatgactgcaacaatgttggtagtgagaagattggttcaattggtatacaaaaccccatttactcaaattctgggattcataataatagtcttcctcttcctgtttctttgcctcatggaatgatttattcagatgagaagccacagattttgaatccacaaacgttaataaaccaacaacatcatcagcagcagcagcaacaacaggccagtactactcagttctatactcaaaatccaaacttttttcaaccattagaacaacagcttcatcaacatcatcatcatccccaacccaagcgccacaactctggcagtgcagacccaacatctcagatcccaggtaacgagtttctactaaggaagcaacaacaacaacaacaactgggttatcctcagtttcttcctcagcagaagccattgatgcagaaagtggtgctcgaaaacaacaaccagcaacagcaacagcaacagcagcagcttcaacaacatcaacatgctttgctggaccagctctataaggctgccgagttaatagggactgggaatttcacacacgcgcaagggatattggcgcggctcaatcaccagctctctcctgttggaaagccccttcatagggctgctttctacttcaaggaggcactgaatttgctcatcttgaacaacaacaacaacaataacactattcctcctaagtgtccatcaccttttgatgtcattttcaagatgggagcttacaaagttttctctgaaatttcacctttaatacagtttgtcaacttcacttccaaccaagctctccttgaggccttagacagtgctgatcggattcacattgtcgatttcgatataggttttggtgctcaatgggcttcttttatgcaggagcttcctgttaggaacagaggacctccttcattgaaaatcactgcatttgcttcgccctcaacgcaccacccggtcgagctagcgctaatgcgcgacaatctagctcaattcgccaacgagattggtgttgctttcgagctcgaagttgttaactttgattcactagaacaaacctcttactcaatgccattttttcgagaccagggcgaggttgttgctgtgaactttcccatttggtctgcctcaaaccaaccagcagcattgcctaatctcctccgttttgttaaacaactttccccaaaaattgtagtgtcattggaccgaggctgcgacaggagcgatcttccattcccacaacacatcctgcaagccctccattcctacattaacctattggagtcattggatgctgttaatgtggcttcagatgcagttaacaagattgaaaagttcttacttcaaccgaaaatcgagagctcagtgctcgggcgccttagagccccggacaaaatgcccctttggaagacgctattcgcctcagctggctacacacccgtgacatttagtaacttcaccgaaacacaggccgaatgtgtagtgaaaagaactcctgtgaggggatttcatgtggataagcgccaagcttcgctttctctttactggcagcgtagggaattgatctcggtttcggcttggagatgctgatgaaacaagatttattattaccaattggaatgatgaacagagttgcaaacaccagagaggttccaaacttattctactcttgatatttaagtcaaaataaattgtttttaaggaaaatgaaaactctgttcttcgcaacctttgttatgacatcttcaatctttgtgaaaattgtcatgattattattattattatcatcatctgtctatctatttattatcttcaatctatgttgttttgcatattattggtaatattatttcatatgttgatattgttatggtgagaagaagaagaaaaagatgatgcattgttttgattttcttacttagtggattcaaattcctatatttgcactagagaagtagttttgtttagggttttaaaagctgttttcaggcttctgaagcttcaaaaacacttgtgttacaaccgtaatcagtgagtttcactagctttctcgaagcttggccaaacatggctgtagtttacttaggaaaattgaagttgttccctcttattttggccacgaatgatcttattattagttaaggttaccttgttttgttcccggaaagtagaagctcaaccaaacaggacgttattttacttagaaaaattgaagtttttcccatcttattttggccatgaatgatcttatttgtagttaaggttgccttattttgttctcagaaagta

SEQ ID NO: 187602 - DNA, 2116 bp, Cannabis indica
atattaatataaatatggctgcattgaagttggaaggcaaaagtgccatgtggtgagctcagatgtgtgcacatggtttctcagataccaaagcaaagagagtccaaatcagagcaggggaaagagaagggttttgggttttcaagagaatcatcagttgcagaggggaaaacccacctgacttggtgttattaaattgaaggatcaacccttttgtttatattttacaattattttaaaaagtaattggcacttggggaagtgtgatttatgtgataagagggccaaattgcaaacttttctcggtgcaaagtccactaattttgtaatagaaaaaaaaagaaaaaaaaagtactcatgtttgtgttcactattgcccctgctgcttcctctttgcaaacagtacttcatcatgtatatttgtttcttcacatctcaaagcattttacagcttatgttcattttcttccttcttgatattgatgccctcttttacagagtactcttttcaactcccatgtaagcctttcctttcctcatcctagctattaagccttttcattctgacatatatatatagatccatccatttccttggtttcattctttctttcttttcccacattacaatatttttagtgtaaaagggttcatatagacaccatacgatccttgtttatatttcaagcatatctctacttcataatatccaatctatagatgagaaaataaaagatattaatagaaaaagtttatttgtggcttactgtcacatagctctacatactattttcgtcctttattttaattagtttgatctatatatccataaagttggaagaaaaaaaaatggttgactatgagataatcaaccatttatgctcctttagaaactcaccaccatggtttatactccttgttccattactgttaacttttgtgggattagtttttgggctcaagttcttcttctctacccttctcatcataacatctacaataatctatctcttcacattacatataatctcaaagccaaaatctgtactggtccaaagtttagtaccatcccaggaagaagatagtgttcaaatctttgaaaaaaaccaagatatcatcactacaagtagtagtactactactattcctcctcataccaactcaccaaataatgatgactcacaatccgaaagcgagttcttggattatcattctaccacgacagatgattcagatgaagctgattacgagcatcaatggccgtacagaaacgaaaagaagaacatggagaaactacaatggccgcgcaacacaaataatttctccgacgacgacgacggtggttccatctctgacgaggaaagcctcattgagatctctctccgaagtgggcattacgttgatcatcatcatcatcatcagaagagtgataataataataatataatgagtaaagatttgttcccggacgttgtttcatcatgcaataatatcttcagacagcgtagcttaatggagttattggcggagattaatgagatgaatgaagaagaaaatttgattgagattgatatatctatgggatccatcaagtgttccaggtttgagattcaagcttgatgatatgatcaggagctagctttacttaacttacagctaattataatatatgagaccatatatgcttttcttttttcttttttcactttaaatttcctattcaagtttaaagtttttgatccactacatggatttggctggtaatggtatatcacttattattaggattttaattattacatgtacactactttttcctttgggtgtttttttgtcgtgttataatagtaaaattaataagcaatatattgtattgtggtgcactatacagtatacacacctactctctatagatctgccaataataaatgtttataatcatgaactttaattggatacccctttaaagcagttatagcatggcccatttttataagtcacaaattttgttgatgattatggcatggatcgcaagccccactttttcttctttcttatttcctctgttgatttatcgctctctcttctttttttttttttttttggttggacatta

SEQ ID NO: 187603 - DNA, 4268 bp, Cannabis indica
gaacttttgttaggtcctatcatggccctatatatatatagggataattaaaaataataataaaagataaattttttgtaagaaccgtatccaaacacagtagaactccccttcctattccctccttgagttaggaaaacaaaaagagaagaaatgaacacttcttcttcttcatactgctttaccatgtggggcttatcctatgctacccgtccttatcctgcaccaactctgaaaacctcagtatccatgttcactgctcctcgttcaagctctcaactctcagtccctcaaattactcaccattatcatcttaatcacagcccttttgttccagaggtgagtatttctcacttcctggcaaaaaatagaattttttaattttcctcagaaagttcggattttgtttggcaaaattttctgtaaagggtcttcattcatttatgtgtgcaggttattgaagctgcggactccttatattcagagttcagagcagtggatgatttggttgcttgcaataccagccgtgtccttaaagcattcaaaaatgcccgagttgggtcccatgtaagtctatagtttaaagttcaatgatgttttctcattgaaatttacatatttcagagtgagggaaaaaaacccgtgattttgatgtttcggatgagtgatattcagtaaaatgtagtaaaagaaccatgcttgatgaaattagcacaagcaattatatgtattcattatgcaatcatgtaatgttttattgttcatgggatatataatgcactgcacttgtctgtatggttgtctaatgtcattggattcatgccctttcttgactttggaatttaggtttttagtcttaccattgctgtgtatatagaagttgtaactgattctgtctggtttttcaatggaccatcttgtcctatcatctaaaatcagcactttgccggatgtactggctatggtcatgatgaagctgggggacgtgaagcacttgaccaagtatttgctgaaatcgttggggctgaatctgccatagttcgctctcaggtctgccatttatttctttgcttgtgtttatttagatgggtatttcgtacattcaattgctcatcatccgtgtgccagtttttctcaggaacacatgctataacttgtgcattgtttgctattttaaggccgggggatgaggtgagctatcgattgaatgttttataggaagtttaaaatatttcttccaatcttttattttacaattcagtctagactgaattatttatcagcttttggcagttgcaggtgctccttatgataccttagaggaagttattggaaaaagagactcccatgggatggggtccctgaaagattttggagtaacataccgagaagttcctgtgagtaactactctaaaaaatgtagaagtctcattcctgctttatgaaatgctctcatgttgattattttcagctagctgaggatggtggacttgattgggataaacttggcagggctttgaaacctgagactaaatgtgcactcatacaaagatctcgtggttattcttggagacggagtttaagtgtgagtgagataggtagagcaataaagataatcaaggtaagcttctcaggacaacaagcactgtgtatgtgcctagttatttgcaacaatattttgtcagttctttaatatcgaatagttactgttttcgtgttttactctcatttaacagatgcagaaccctaattgcttggtcatggtggacaattgttacggtgaatttgttgaaaatattgagcctccatatgtggtatgtggtatgtgacatactttttcgtccctttctttcaatatttttgagaatgatcataaaattaccaatatcatgtgcagggtgcagatttaattgctggaagtttaattaaaaatccaggtggaaccatagcaccatgtggtggatatgttgcagggaaggagatattggttaaagcagcagcatctcgtttgtctgcaccagggctcggagtagattgtggctcaactcctggtgatattatgcggtcttttttccagggattgtttctttcacctcagatggttggagaagcaatcaaggtactagaatttgcagcatccttgtccattacttaaaattaaacacactactcgactttgatttttttcttgtgacattagggaaccctgcttatagctgaagtaatggcatcaaaagggtataaagtagagcctcttcctcgtgttactcgtcatgatactgtacaggtgagttttatttattatgtatatatcctatgaactcttaaaagttaattttagctaaattgtttacatgtattaacacattactgtacaatgtttcatatcttataaactcttaaaaaatcctgttctttttcaaattgaagatgtagtaatctagttctggggaacactttgcatgcatctaaaaattaatatttaatatgatctaatcaaagctaatacagaactctctagattttttgcctccacttgacccaagcatgatgcagacacaagaaaaaagctcattttatgatacctttcaggccgtacaactcagaagccgtgagcgtctcctttcttttgtgaggctgtacaaagaatctccccagtaggttcattcactaaaccagtggctggtacaactcctggatatgcctccgaggtctgaccatatgcaagctttaaatcaagttatatgttatgatacgaatagatcttttggtgctatttctttctatcaatttgttctcttcatcaccttcttagctaatatgtcacaggtcatttttgctgatggaactttcattgatggtagtacaagtgagctttcatgtgacggaccattaagagaaccctatgctgtatattgccaggtatgtcgtggatgcttgttcttctccatttttccattcatcctgatttgaatcatagaatattctttgatttgaaagttgtgtcaaatgtaaaggatataaaagtatccagttgtaatttatcacttgttttttccccagactgaatcacaagtttacttaaactttccattgcagggtggcacccattggactcagtggggactagtccttgaagaggttttaaaatccatatgaaagaaatctgataaatgacaatgaggataatgatgttgcttcggttaagacattgctgatgacaaatgtgtacttctaccataatacaggtaaagccatattgtgtgcagttaaattatcttattctatgttgtgacatgtagatttcttatttcgtctgaaattaaattaatgtgatgtatccttagatttaattattatcgatccacattggtacattggtaatacattgagtttctccattgctgtttgtattattttgcatggaatgttgactgtttatattgttaaatcaagccagcaaggctctgctgttcttgcagcccgagacaggtttgtggttttactgttgagaaggaagttgaagcttgtaaaataacatactgaagccaagcttacaatgaagacgaagacattcatatattcatttgtgggttcatgtgactttttgtattgaaataaaacagcgtggattgacttcgacaatacaaatcttataatcaatttttttttttcaaatttttttaaggtttacgacagcaacacttattcttctttttcattatcctggaaaaatattttacattaattagattatagtacatgtagtcggattaagttaatagatgagaaaaactcttttattttactgcattgtataaatggcagatatgtcaaaagtgtttttaggttattacattgagatgtatatatagggcaaaggagaaggcagcccatgaagtaaagtgggccgaaaatagtggctcaagatgaaatatatgttttttaagttcatcttggttacaatagtgtgaaaatagcctgggaaaagaggcttggtaaggatgtcaacaatgttatttttggtggtgacatgaattagctttagtgtgccctcttggatcttctctcgcacaacatggcagccaatcttgatgtgctttgtgcgttcctcgaatacgggatttttggagatgtagatggcggcagtgttgtcacaataaaggatggcgggatctttgtgatggatagtcttgaaggagtaacaatagccaggtgatctcacaaggggcatgagccatggctcggtattctgcttcagcggaaga

SEQ ID NO: 187604 - DNA, 2035 bp, Cannabis indica
caaaaatagaaagtagatgacactttgagaacaccacaaaattgcatggatataacagatttaggtctgatataatttttacattaaatactcaccgctggatcaaaaggcttccctactgttggaataacagttacatgcaagctcctcattatttccacaaattgtttgtaaataccctgataactagcatcaatctttttctccttctctgtttcaggtttaatttgttgtttggctctctcaaaattgtccaccatggccaagagactctcaattacctctcctcgagcatcagtgcttattgtatgtctgtctttctcagttcgttttctaaaattatcaaaatctgcttgtaaacgaataaatttttccttcccagactttatctcagctgtcaaagttgaaacttgctgaaccaatttgtccatgttattcccaatcatatctattctagcctcgatttcagatacagcttctacatctcctatgagtatagcttccttgtaaactttaattagggatatcaaactgaatttttgatggtctgcttcatctcctacagcctgattactctctgtctggattacaaagaacgaacaaataataataaataacatagtaaaataaacatataccaacactcaatgaaaacatctgggtgtttccactgcattaaaacataactacgggagccctacagaaagcactttctgactatcggtgagagggtactatgtcaaatcattatctagaaaatctaataatcaataacagaaatggataagtcacttcagggacatcccataaattggaacagtacagaaaagactaacatagcccctgagcaaggatgacatgcacaaaataagaacaaaaatggatatcttgaattggcttggcccaggtgtgtttcatatgcacgtgaaatttaatggtattattcgttgcgattatgtagattacccagattgggaagtgcctaaactgtttcattttgtcactaaatttcacagccaccggttccagcattattcctcctgatttcttaaatcatctgaacttggatcaattacatctgtccaggcagtcaatgttaaactttatctcaactgaaatatttttctaacctgtactttattaatctcttttatatttcttaacctgtggggatcaagaattaggggccctactaatcctgttggaactgtgcactgtgccctcagaggattccttaaataagttggattaagtcactatattatatatacgaggcatagttccaaatattcacaaataaataacataagcatctcaacagatcctaatccagtaaattttatagcattgaagtagctcttgcgcaaacatcaatactccaatgtttaatctttgaacaagaagtcatttcatcaagtatttcaatatattttaagcccattcacaagttctcagaaatctttcctacggatacccactttacaccttcgggcatcagcatttgttgtcctaaacagatacacgtactattttttaaagtgcacgcaaagttttattttatatccaaattaacgtactcccaacacttctctaaacaaagcaaattcatagctagaataagagtataagacatgatcatccgcaattaaaaaatcaaattaacgtatagaatatacgtacagaggaagcatggtcccgcgcagcaagaagaggttggaattgtgagtgcgtggtcttgtgggctgcagaagagccaaggatgcaagatggaattggattgcgtaggtgaagggaagaagcccgaaaacagagagtggtatgagtaaggggtaaggctttgaaaggcttgtggtttaaggaggtcaaagaggaagaagaaagaggagccaatagagagtggttcgaaagagaaatggccgccattaaaatggattcacaaaaatgcaaaacttgcccacttcctgcaaaatgatgcgtatagttgcacagaatcagacttacaatatcacattttgaatcaaaataaaaaaaaaaa

SEQ ID NO: 187605 - DNA, 2848 bp, Cannabis indica
aaaaaaaaattaataaaagttataaaaatttgaaaattaaaaaaccaaaatatttcaaacaaaactcaattatgatgtcacatcatcttacttagattatatagatagattgggaaaaccatacgtaatagtaaggggtaaaaatgtatttccaatttacttattgttgccaccacttcaataattttcgtttcaacaaagcatcgtgattgtgaaaactattgattttacatacattaattccctagtataacaagatggttgaactttacaaagagatacttacacctagttgctttttacaattatttttatattgatttccactgatattttggatttaatttaatagaattcagtttttactctttgggaaaagctttccaaaaccattttggttcttttcagagtgaatgtctggatctaaggataatgatgaatttctctcacttttcttatttgaagaatatgaccatttatttgctgctgcttctgaaaatgcagcatctcttccggacaaacataaattagtagaccgcaaattacgtgcttcattaccactttcgtagctctgtatgttgtccaccacaatagtaggatgaggattctcagagtccagtaggaaatcttctagactagcaagagacttcaaatgctgcccaagtgatgctattgttttctggcactcggcaaacttatccgcagccaaagctagctcgttttcctatcattaacaagaaaaaccaaaccaaaatataagatggaaatttctttaccacccaaaaccaagttatgaaggcagctcaacaagatgtgcaaactgtcatgtgtagaaggatgccaattttagtttagagtaatagatgaccactagcaaagaacagaagcccgtacgtgaaactacaacttaggaagcaatgggtaacagcttaggtacaaaccttagaaaagccaaaactacacagcaaatatgcaagtagttgttctgtacgtctataaaaataggtagctaatatagcactaacagcaaacattccaaagaagctattgttattaggttcaacaagaataaggcaatcttagaaataacaaaattgtatatgattttatataaaatgttatttttcattttttaggagggcaaaagatcagccatttcggttgcactacttgtatggtatatagcttccacatttacagttaaaaaagaaaaaactttagcttaattatatgtccagattaataaaatgtaagactagttattatttgttaaaaggatttaactttaagattctagtgtgttacctgcttaatttttagattgacgccatcatttttggtacgctggaactcagcctctcgctggtcctcggcttcacgttttagcttaaatagttcatcctccaatttctggcatttggcaattttatcagcagataaaagtcgctcattctgaacctcttcctctaacgaagctgcttttaagagcaaggtgttgacctcattttcaactactctcaatcgagactctgccaattctctcttagcttgtgatgcttttacttcttcctctgcagctttctttgattcagtagcaagaaccatctttatttgcagctcctgcaaatccattgcagtttctactagctgactttgtgatgtctcaagatgctttttgcaagcactcagtgccttctcaagttcctctttttcttccacaatttttcttaaattctcttcaagttttatagtcttttgaaccatcacttcaagatcagctttcaggctttcgccaccatttggttgatctaacataggtcctgcctcaacacatctgcttccactttctatgactggcaatgcagcaagcttttccatttcaagaaaatcatccatgaaattgatatctactgaaggaaccattttgtttctttcatggttcttttcattttcattttgatgttctgtaacaaaagaagatccccgtagacctgactggcttgaatcactttcatttggttcaaaactactcattttatgagagccatattcaagtgttagtagcctctctccacaatctgactggctatcagtgagagattctgcatatactgaggatgcatacttttgatcattagtctgcgacacttttcgagctatggctttgagtctccgacaatcagcttcaagcttagccaccttttttatgctctctaaatattgcttactggctgtttcagcagctttagtgctcaggtctcgctcaataatcctgattttaatttctttggcttgagaaaggatctctaatttaagggtcgagttctccttctcagcagcctcaagcttttgttgaagatcagaatcaaaggatgaatcggtttgctttttaacactttgaagctgaacctgaagctcaactagttgatcctcgaggacagattttaaagattcccattcatgagttttctttgaaaccacttcacggatcttctgttcctgctcttctcttgcttgtcgaagttgtctcacacattccttcaatgccccatcaagatgaccaagccggtcttcaagagctgaatttttctgattagctgtctcaagtttctgttttaaagccaccacttcattttcggcattctcccatccttcaaaattgcaagaaatgtcactagcttataaatatatgaaaagataataattaaagcataaacaaatagaatatatattctaaaaaatactttgatccaggtctgaagttgctttacgtttactgacaaattcttatgaaaaaaaaaactaatttctgatggaaatgaaatactgaaaagtgagaaaactgaat

SEQ ID NO: 187606 - DNA, 1943 bp, Cannabis indica
ttatcttttgaagtcttttttggtacgttacaaatttacaatgacttcaactagtgtcttttcatggaacaactagtagtcggttttgtttgtttgttttgatctaatgatgttcttcaatccaactttttatctggataacttctttgattctctctcatcatttattgtttatttattccatctttttcagtctataaatatgtacattcccttcccaatttattttcgcattcaaccaaacatagtcctattctttctcttttcagtcatacaaacaaaacacttaatccattttgagcttaaaatttaatatttgacttccattttgaactgtgttttttgtaatcattcattaagccctttagtatacctcttaatccactctgttctactctgtcatggcacctcctaatgaccctgctaatccaatccaccatgtgtctgaatcaaagactctggaaaactactttgatttaactcatgaaaagtttagtgttaaaggtgtccctttactctctcaagttcccaaaaatgtaaccttcgaaccattttgtagttccatctcttctcaatcctcagatgcttcaattcctttgcttcaacgcgtaaggacactttctcataaaggtggtttccttggcttcactcacgaggaaccgtctgataggttggccaactgtttgggaaaattcaatggcagagatttcttaagtatcttcaggttcaaaacatggtggtcaaccatgtgggtggggagttctggttctgacttgcaaatggagacacaatgggtgctgttagatgttcctgagattaagtcttatgtgataatcattcccatcattgagggaagtttcaggtctgctctttatcctggttctgatggacaactcatgatctgtgcagagagcggttcttcacaagctaaagtgtctagttttaaagccatagcttatgttcatgtctctgataacccttatagctgatgaaagaggcttatagtgctataagagttcatctcaacactttcaggctcttggaagagaagaaagtccctaaaatagttgacaaattcggtggtgcacttgggatgccttttatttgactgttgagccagttggcatcttttatggcttgaatgagttttctcaaggtggtgtttcaccaaggtttctcatcattgatgatggttggcaaagcattaacaaagatggggaggaccctaatgaagatgccaagaatctagtccttggtgggactcaaatgactgcaaggctttacagttttcatgagtgtaagaagttcagaaaatacaaaggaggaactttgtcaagcctggagactccaaaatttgatcctaagaagcctaaactacttatctccaaggctattgagatagaacatgctgagaaggagcttgataaggctagtcttcaagcaaaagcagctgatatttctgagtttgaagctaagattcagaaactaaaacaagagttggatgagctttttggagaagaagaaagtgaagaagcccatggaggaaggtgttcatcaggcaacaatggaaactatggaatgaaggctttcactagagatttgaggaccaggtttaaaggcctagatgatatttatgtgtggcatgctctttgtggtgcttggggtggtgtcaggcctggctcattaactcatcttgattcaaagctagtttcatccaaactctctcctggccttgatgggactatgaatgatcttgctgtggtgaaaatcgtagagggtgggattggacttgttaatcctaaccaggctgatgatttctatgattctatgcactcttacctcgctggagttggtatcacaggagttaaagttgatgtaattcacgtaagtaaaatatatgtactcatctcctttttattattttattatctgcgtacctacac

SEQ ID NO: 187607 - DNA, 3001 bp, Cannabis indica
ccttttccatcagatttgttatggagacaacctctctttgatcagcttattgcaaatttgtaccatccaggtagaggtaatgattcataatctataatatggtcttttttagggcagatataatattattggcatgtgattgttataaatgtgtgtattttatacaaattcttacacccattcggccattcatatggattagatacaaattttcagtttttgctatgtgacatatcttgttaccaattacagtaaaaaaaagaagagaaatttgcagggaaacccttatgttatacacttaatttcttttttttgtggtaaaaccctttaattttatttatttttttataaaattgacacgctatttaaatattactgttaaatatcaacaggatcaccactgtatacatctgtgtgtatatgtagtaggaaaatctcaaaatcgaaatagtagtaattcaaatagaatttaacggtaatatttaatggacactttaaatttgcaaaataaataaataaataaataaataaaaggagttttgctaaaaaaataaaagattaaatgtataaaaattaaaacataatggtgtttcgcggcaaatttctcaaaagaaaaaaaaaaatagtactaaaaaacttggtattgtaaatgtgatattggttttgattgttcatgaattgagactaagatttacccatattttgattattacagggaatatgtgcacatgttgaccttatgagatttgaagatggaattgctattgtttctttagagtcaccatgtgtaatgcatttcagccaagttgaagctgaaggtggtgagagtagtagtagtagtagtagtagtgcaaatagaaagaagatcccagtttatctgaatccaggctctctgattctgatgtctggagaagcaagatatgaatggaagcatgagattaatcgcaatccaggggttcaaatgtgggaaggccatgaactacagcaggctacaagaacgtccattactctgagaaagcttcgatgtgttgagtagtagagttttgattagaccaccaaccatgctcacaaattggtgtgaaaggctcaaacatatatatttttctcaaagggtattaggttacaaaaagaaaatttaactataaaatcaattttaaaagtattaaagttacatttattaactcaaatgtaactttttttgttctctctttttctggttgaataattttttattattattatttttctcaacaaatgtatagtgtaaatatgagatattatttttaattatttaaaaaaattaagcattgaaacgtaaatttttctaatgatattcattcagttgacaaacacattagttcatgtttggaactttgattttaaaataaaaataaaataaatttaaaaggttttattcagaagcgagagagaaggaaaatgaaattatatacttgtataacgttgacgaatagattagaaaagtaaaaaaaaaaaaacaaattactttcttgagttttagaaaccaactgaaatgtatcaaatcaagctttttaatctttatgttaattggtgttatgtatagtgtgtactgtataaaacaacactaattactaataagaacccaaatgaagtgagcatggatggacacacatggccaaatggagactaggataggctgcttaacaaaaaattaaaaaatgttataaatttagaccgaggaataaactttgtattcttttctgttcttcactttgcttcatattctttatcaaagttacacatatatatatatgtgaatacatgaatgtataatgtacataatcattatacttgctactgctacaagtttgaatactattcctattattgtaatattattatttagaatatactacatattctatacttatagtcattcataataaaattccttcagtcaaatttttgaatcacaaaaataaaatacttgttctcatataatatgaaatttcacatttattttatgcaaaaattgtaaccttaatagtgggattggagtgtactatgggactagatcttcttctttattcgattgaatttggctgtttaaatctaacaaccaaactcaatcaaattaggtctaataacatttacacagttttttctttctctctaaattaggaaaaaaaaatcttatgcaaataacataaagtaaaagacaaaggtgtgggtttagggcccaggtctgagtttgggatctgcggttaggtacgagatcagggcctgagtttgagtaaagggtctaggttcgggtccaagttgggagtttaggctaggaattaggtctatatccaacattcgagttgagtccaaatctaggttcgggggtcgaggtcggggtcgtggctggggtcttgattccagggtctgggttcaagtttgattttcgaagctagggtacaaggtttaggtcggatacgggtttcggggctaggtaagggtccagggcaggtgcaggttcgggggcgaggttcaggtactggggtcggggttcgggtacgagtccgggactgtgtctgaggttcaagtctgggtctggggttaggtacaagtttgggggttgagtatgggttcgagagtcaggtctgggctagggtctagttcttggtctgagggccagcttctaaggtttggggcccaaattgagatcacgttccaaaatttaatgaaagagaatgtaaatatattataattaagaaaaaaaaaatatataaataaattttgaaagtgatttttttaggagtaattttcaaaaataattttttttttatgtttttaaaatttatggccttaagttttatttaaaaaacacacttgtaaagtctttgcttagtaaaggaaagaagacaaccaaaagacaacaagaataaatctcgcgataactataaaaatacaaaaaaaaaataataataacttcatgtcaactataaataaactatataatatatatataaaaaataag

SEQ ID NO: 187608 - DNA, 4341 bp, Cannabis indica
aatactgcttacttgcatatttcggtagccttcatccagatgctcaaagctctaagtaagtgtgaagacacaaaactaaccttttcccgattatcatttttgtactcttaattgtaagatttgacttgtttctaaactttgttgttccagtgccagtcgcaacatttataatggcagttatgtgtggcactgacaaagcaaggtgtgacgtcttcttgaacatgctgctagtcagtgttggagttgtcatttcctcatacggggagattcattttaatgtagttggtacactttaccaggtaacgggcatctttgcagaagctcttaggctggtcctaacacaagtcctcctacaaaaaaagggcttgactttaaatcctatcaccagcttatattatattgctccatgcaggtatgtattttcaaattatacctttggtgttttgggggagagggtaatcgaagaggcgatatacctgttgtttcaagtggtgctaatgtttgcttcctgtcattatattgtgaatgcagttttgtttttctattcataccatggtttctgctcgaaaagcctgcaatagaagtatcccagattcagttcaatttctggatctttttcagcaatgctctttgtgcgttggccttgaacttctccattttcttagtgatcggtagaactggagcagttacaattcgtgttgctggtgtcttaaaagactggattctcatagccctttcgaccgttatatttccagaatcaactataactgggttgaacatcattggatatgcaataggtagttctctaccttgacattcttttaaaattttgaaaattttggttaaccaatagtttctcatctagtctttttgcattgcagcactatgcggtgtggtcatgtacaattacataaaggttaaggacagcgcttctcaactgcctgccgaaggtcttcctgatagaatcgctaaggtcggttatactctaagctgaattttacttttcataaactcaatgaatcttacaaaaccattgagctaaaccgaatgacatagtgatcaaatatgtaatacaggactggaagttggagaagaaatcatcagatatattcgtgccaaataacagtggcgatatcagtgggggaacaggctctgcaattgaaacatttggtgatgaagaagcacctctaatgccgtcggcaagattgtcttaccttggaagaacacagcttggcaaaccaaatatataaatatatttttatattattatatacatatatctatatatatgtgctcatgttttgtaagggaagaaccaaaccagactaggaaacaaaggtgaggcagctatagtgcaatttcaactatatatatatatatataaatattctttcctgatgggagagattctttcttagaaagcccttaggaaattcgttttgtaatatttaattttgtattgtgagaggtgagtggccttttagaatggatgaacaagttgacaccatctctgttgatgaagaatgaaaaccaaggggttgtttggtattggtatgattgtttattgggttgggaatgaggatgtttagtatgggttcttagaaagttttagcttatgtttacacttatctcagtaatttatgttttccaagagaacaaaaagcatgtctccaaatcaatatataagtcgagcatttcttgctataaggctcctaatatcttattgtattggaatttgatattaaattgtttcaacaacatcaagtgtttaataacccttattaattcttattgggaaatcataaatcataatatttattaatgtgtatatatatttatactcataaatgaatgaaatcgctatcattattcattacaatgttgttaatgtagtagttatgtttcttacatgtattcataattgttctattatcaataatagtaaaagaaagtattaatactattttggagtttgtattttgtaaagttattgattgaattttttgttttgttaaatgacaaaatagacactgtatttttcaaaatagtacaaaataagacactgagctcaatttttgacaagtttttttaatataaccaatttgaagacaattcttagtacgaacagatgtagaaatgtaactagttttgtcttaacacctttaaattgagctattatgaaattttattttgacaaaaaatcaattaaggatactattttatactattttagaaaatacagtctacaaatggaccaatcaataatttttaaaacatagggtccaaaatgatatttatcctaaaagaaatgctgaagagcacccatggtgactagcacttttgtgatatgtaatatcggtgcaattcaatatcgaatcccacatattttactttaataaaaaatataaaaaactcctaaccaattatagaacaccactaagcagcaaggtgccccatagctagcaactcttatagtaacgtataattaatttagttcatacaaactaatatgatatttatatgattcaaaattttaaaattgtatttataaataaaattgtacaaatcacgtgttgtgtgatgtagtagtactagtagggaagtctttactagtctcctttcttgtttgggtcaagagttcgattctcaccaagcaattgtgagagattatgtttagcccttgaaaattgatgttgtggtaaactatatttggaatagaaactaaggtgtaagtaccgatgactcaagtaaaataagatgaggtataagactcttctagctagcacgtggtcgtcgaaactgccattggccaaagggatgggaacagaatttgcaccacatgatccctttttctctcagcaaaaaaagacacattcttttgttttgtccaccaattcacacaaccaaaaacagaaatatagaggaagacagaaatatatagtatcttcgtctgtacataatatagccaaagtgtttctgtattttggtaatctaaaacacttgttcttattagttaagcttttgaggtagttttcattaaacattacttcctcttcttgtcatctactataagtctacataacaggacaatgtggtactatttgtacttgtacaaagaaaactctaatctcaaattctgaagtcaatcacgagaaaaaataggcccccagtcatttttggcatgaagacaaaaatggaagagagttaagagctcaaaagtcagactcatacatttttcattgttcagagtgaaatgaatcaatcacggagaaaatagccccatagtaagagccataatccatataataataataatgacatgacttgaaccaaaatctacatccaatttaaagaatgctgctccaaaatccaaccatcccacgtaaaagatttatagaaagagaataaaaaaagtgttagcatacatacatattctcaaagatcatacaatcaatctcctttcgtgggacatgtacagcgtggattcacaggcgagaaaagaaaaggggaacaccaccatcatcatctccggcaacttactaaacaatctttgaaaaaattacagaatgaaacgaatcatatcatcgaaatcaaaacaaagctagaagaactcgcatgtgatttacacagaatcacaacacaggatatgcacaactcaagcaagaatggattcagctattgaaaataaatgaaaaaagaaccgagtgatgctcgcaaataacatcccttttgagcagcttcctttccatccgccatagtaatgggatggatggacgaaataaatcttgtgatataacacaatcttattccaaataatctgcggtcctcagatataaaagcttccgacttggggcaggtggtgccaatccagggatgtccctaatgtctttgttacttggattcacgatctggatattgatataacatgattaatgagagtagagaagaaacatcaatttaaaaaacatgtcattgcaaaagcacaataattttctcctccttaatatcctcattaagaaaataaatttggaacttctcttaccaaacgacacttaactgtttatataaccttttaaaagctctaataaaaactctcctttccaaaaacttctgaaagtgcatcttagaaagggctcataattactaatataaaaatgaaaagctttataaaactaataaattcagtacataccttcaccacaatgattgctataacacctacgacaataaggaatagaaaaagcatgatgcatttatccgttgcaatctgaaaaccaattaaaaaagataataagtaaacaaatttagtttaaaaaatgagacacataaattacatataga

SEQ ID NO: 187609 - DNA, 2849 bp, Cannabis indica
tgaattttctagcatttgactcggtgctactgaaagatttattatcatcccaaatcccaagttttaatagaaccgagggaaaacctcggtgaggataggaaggtttaccaggaacagaactgttgcacaatattttagaacttcaagattcatccgaacatcgtccaaactcctagaaaaccatcatagaacaagattagcccaataatctcaatcaagataacactgtgaatgatacttcgaaagtaggtttcggaaaaaagtacctatgtgtttgttgaccaagcccaaaatatgttgcaagggtagccatctacagtgataatgcagatgaatcaagcatttgttttttttaaaaaaatacattaaaacactcataatattaaactattgttcgatttcataatccgtccaaatccatcagtctaacaccattttcctcgtaaagtagaaattcataacaagaaaacgagaatgaaaaagaagttcaaatttttatggttgaaattaagaaacttccaactcaattcaattcatattacttgacaagcatataaaccacttcttacaactcttatatacataaatacataatattataggcatattaccttcatatcaccagctcttcgtccaaatttctgagtcaacaaagccaatgaatcaattgtacccttcggttctggtgctggtctaccaatgtcagcgtatgcctcacgaatccgagcacaatcaaatctcagtatattgtgacctgcccatatccgtcctatacacaatccaaccgaaaaaaaaaaggtccttaagcatcctcagagctcaaacaaaacaaaacccttttttggagaaaataatacattcggaaaaccaacttgacactgagcttaagaaaagaccaatagtaagatttttttatcgaaaaacaaaaaagaacaatgaaaaggaaaaccaaccatggagaatgtcgtagaccctatcagcaatgtctctgaaagatggggcagcgatgacagcctcacgggtaatgccattgcagcgtacagacaaagaagaaatgagggaaaggtcgataggtctgaccaatgtggagtaattctccaactcctctagcctccttggacaaaccagtatcgaaccgaattccaaaatggcaaatttcactccagctctggttggaaaagttgtttccacatcgaaaaatgcaatctcataccgatcttcactcgaacccattttcaaaatacgaatctagatatagtgtgtaacaataacaactgatatagaattcaagtagccaagcataaaaacataaagatcagattttttgatcaagtgcaactaagttcactgctttggcataagctgtttctctatgggatgcaattgtagagatgacaatggaagtaacagtgcctgcagaacaataagaatgtataaatttacattgaagaaaaataaaaagcacagctttactatatacaagagtgtaacttgcttcgaaaaatgaataatttacaagagtaaatgactaaatatcattcaatcactcttgaattgcctttaaaagataaaatcttcaaactcatcaatgttagtgacattgtcaaaatttatgcttacctctctgagagtagaacatgatagaggttgaggataatgggggcatcattaaatctttaactaaattaaaatttattacaagtttaaaacttggaaaatgggccatattgagaatctgcatacttgaggctatcccaattgtaacaatctcaataataaggccataaactctccaatgaaaactttaatctttttccaataagctactttgtaattttcaaaactccaataaagggtgcatgttctaaaatataaataaaattagaattcaatttgagctttccctgtaaattgattcctttggaagttttggtatcagtactcaagcaaggaatataaactaacacaaaaacttgagtccaaaggaagacatcaaattccctttttttcctttacaaacaagaatttaactacaacaatcaatcactgtaatgccaatcaacccctcaaactcaaaacataatcaattccagtcatggatgttcaatctgaaaaatcctaagctaaatcctaatatggcaactcttctcatttcatcaacaaattgcaaattgcaacattggtgattacagtaaatcatttcattatatataagcctactccaaattctgttcatggaaggaaaaagaaacccaaaaatactctgcattgaatccaatgaataatgtcccaaattaggcaaatttccaccattcacacccaaacaaagaacaaagaagccatggaaaattgaaagactcagaccccactaagctcattgtaatctaaaacccaataacaataataatccaataaaaattaagagggcaattcatagattaatactaaggtaatttatgagtaaaataactaaaagagctaaaagactagttttttagggcacagtgaagaagaagaatacctggttatcagagttcagctttgagaaaaatatgaaatttgaggcagagaagaatcgcagaggttgaagatggaaaactatgaatgcatatatacaacatatatatatataggataatttgaatatatatatatagtgaaattagaaagaaagaaaggaatatgatgatgttttggttaacactctttttattgtgagtataaagaaaagaacaaaactttcacattaagaaagaagaacacaccaaataaatatgatcccttttcttcatcattctataaagcaaagaacaattttttttaatctactattttttattttatttttt

SEQ ID NO: 187610 - DNA, 2332 bp, Cannabis indica
agagcgggtcaccttgtcgaatatagatgtagtcttttaaattcccatatacaactaacttaaaaaaaaataactacaactatataatatatatttaatgaacgattatatttgataaattttattttagactctgtgttttgcaaaaattattaattggactttctgttttattaaatgacaaaatgaactctgtattttttaaaaatgtgcaaatagaatgctaattgattttttgtcaaaataaaatttaataataatctgatctagacatgttatgataaatctggttatattttctttatatgttcgtattgaaaattatcttaaagttagttatattaaaaataaaattgttgaaaattgaattcaaaatcttatttttactattttagaaaatatatataggatctattttgttatttaataaaatagaatgttcaattaataacttttgtaaaatacaaagtctaaaatagtaactcgattgtattttaagaaaaaaagattttgagatctttttgtaatgaccgtaaagtaatttttttattcaataaacaattttatttttaaaaaaagatttcataacttagacataaattaacttaattaatcatatagttttgttttctaaaatcttgagaaacatataaaatattcttacacgaaaaaatgaatatttttggaacaaactaaatagaaaagttaatattacatacatactcatgaaagaaaccatttattcaaaagtttatttgaccatacatatatatacatataaatcaacctaaattttatattgacaaaaaataaaattaatgagaaatgaaaagaactgtgaaaaatgagaatatgttgcattcacatggaaattatataagagcgtacacacaactaacttgactacttgactgaagacttattagttaccttgaagactttaatatcacacaataattattatttggttgaataaatttactttgtgaaaatatatatttacaattatagaagtgtaattaattcaaaaatgttttccggccaaatcctccaccaacaattctttttttttttttctgtctaattaacttcaaattaatttattaaccatgtgtgtaagtataaatatatctatgcagcattccaccaacccacacacatgtacaattaatttatatatattataataaagataaaataatataactttttaaaatttcaattaaagttaaaacaattaacttttttaaatgacttcctatataataagacttacttttttaggaatataacttgtaattacaaaaagcagtactttttaagtagcttttaataagattagaatttatatatgactcttgttcaaggtttttttacgtgttaatattaataatacatattttgtgagtcacttaattcaatgtgaactgataagaatgatatgtttcatctcaaaaactaattaattatgagtaaaataattcatatttttatatatgactcattttttatttatttttaattcatataagaatatgattatccaaatataaaaaattatagtttgagtggaagttttgtgtgatagtgaaccctatgttgcaaggaggaatattaaagaaagaacattgctattaggtactagtggtgtttagtacttcctcgacatgtagcgttacgattggctagtgatactccctaaaagttattatattaaattatatgggacccgatactttgaaccaatagtgatattgacacataagagagtgctaggcaccactcatgccctttaacatttctcttaaagaaaataataatattacaagcttttatacatttattgcggtgggcagtggctgcttaagtttctaatgattgattttatacatttacgggatggaatcgatacaatctaacattcaatgaatattggatcgataaaatgattgaattcaattagataggatcagatagtaaaatttaatatctaatatatcattgaatcagatctgaataaacctaaaaacattcaatgtggtcaaattgtgatgactgcttgggtttctaattaaggctcgacttggtgtgcgtatgttttagttttgttatgtcagttataggtggtcagtgatatttctttgttattcgatctatttgacgagttgcgaatagagagacttatacacttacaacttctgtgactagttctttcgttaaacaattgtaagataattaagtttgttttgtaacagttgttatttattttgacaactttggcttagtagtagtattagagacttaggctaagttagttaagttagttatggtt

SEQ ID NO: 187611 - DNA, 2747 bp, Cannabis indica
tgtgtttcatgcctctgactaatagtaattctcaaggatttcttttgttttagcacccatttctttttagttccctttggctttagagcacttgggaaaacaagccttttgaatgctgacactcgtggggtggatgtgcttgcttcaagctgtcaaacatcgacacccacgaggtatcatcttgcaaaaaaaataaaaaattgttcctcttttattaactcgccttgttcaaaagatgcttttaatcaatcactattttgatagattttgattcatttttgcttcttaatatggaactttttcttgtccactttgaaggctttcgaaattacagaagctgaaatatttatattaatagtaacaacccttttattttgcttgctattctcatcaaaagtaattaaaatttacattttactcttgggtagtaattgatcaatttttattagtagtaaagtaaaactttttttaaggattgtcattgaatcttcaatcggtgtcaaagctttttgccccattccttgtttacttttagggatgtacttgaaggtttgttttttattagatacatttaagtcctttttaggctgaggagatttcacaagggatagttgcttaacttgtggagaattttgtgaggttgagctttcatgatatttggtctccttaaacttctctttcaaaactgtgacattagctgacttgtaaaattttccatcagtgtaattcacctgttccccataaaagggatttaggtatgcgttaacacttttgacttttccttccttgcaaaacttaaagcattggtgaagttttgaaagaataaccccatatcatgaagccaaagtcgccctaacaacatactttaggatgagctggatcaatgacatgaaataagacttcagaatttagtttgcatatttcaactttcaatgtgatacttccccttactttttctccaactctgttaaaaccttaaattatcaatgatgatggagacaattgatatgggtgtaaaccaacatctttcaaagtttttaaaggaagtacattcacagctgatccacaatccaacatgatgtgactcacgcgaacatttacaaccatacctgtcacatagagaggttgattaagctaatcaactcccaactaacgatccttatcatcaaagattatgcatgccatacaacagggatgtgtctcgagtgatgtagattttattagatgtatcttcttatagaatccaacacttgttaatgcgacaacaagagcatttctatgctcatgagacatttgcaatgcatcataaatgctgaagagagtaaggatgcactttaaatgagccaatatatcgtattttgcttgtgtcatttagttttcaccagcgcttttatctcttcaaccgtcattaacaaattctttattgattgaagatgaagggttttgaagaccttgtttagccttttcaaggtcttcgctttttttttttgccttctttgagataattttttcaccacatatcttacaaggtaatttcatctacttctttttcattttcgggcgaggtagattcaggaccttcttctaccaataacatcatgcaacaatctgacacattatcgtcaatgacaactgcctttttccataactcttcttgtgattatttgtctctggtctactccaaaatttgacttgagagtttccaaatggttctcgagttgaaatttttataagcttttttcgagtactttgagaatcctcttcattatcacaccagtcattctaaatttatagattggactctgtcatgagctcgtacagagtaggaatattcaaatttcttggttttgacatgtctaagtgattttgaactattgtaacattcttatcgacttcgaatgccatagaaattgcatccttttgcgtaagattgtttggcgtttggtcattttctactaaaaaagttgtatttgtcgccaatttttcaagagacgagtcaatttcaatttcttttctcttgatcatgtcttcgataatacttttgaggatgtagcaatccatcagtggatggctcacaattcgatgataccagcaaatatttgggtcatttttcatatcaatctcattgggtcatttaggctcaggaattcttattgctttaacctttaacagctcatcaaaaatttggtcaacgtcatcatcgtcaaatgaatatttgacctctttcttttcttggagagttaatttcttttgcgacactcgtgccttctctttgtcttttttattgccagttattgataaaagtagctattgattctcccttctttaatggctttttattttcaaatctcaataaaagtttgccaccattttttcgagcaatttgtatctcaacgctacatgcctttgatacaagctcgttgaaagttttaggctctattgtacacacaaaagtagctacctcagggttgaggtttcgagcacacaatgaaccaaaacttgtactgataacctttctagacattggagattaagatttatccatctcgttataaattcattagcattatcactggctcgttgctttgtttccaccagatcatggatgcttatggtcttttttaaactcacaaactatgccaaaaagactttttgcatgtcgttccatgtatttatggatcctaggaaaaattaggtgtactgggtaaatgctgtctcttttagttaggggtgaaaattggtcggtt

SEQ ID NO: 187612 - DNA, 2076 bp, Cannabis indica
caagtagcaagaacacaaagtactagtcttagtctcatgggattgatgaccaggacaaattttgaagaattaagtttgtatagagattacttcacatgaagacaacaagagccttttattctaatgttggttcaaacccaaatccagatcatgcacctgtacaaaactaaccaaaataatatgaattgcctcaaaaagaggaaaaaaagaaaaaggtttcaagatcaactggcggcagcagcattaaaacatccacaatttacattattttactgttcttcaaagcatacaagtaaataaaatattatagagtaaacttgtactaataaaagctagactagggaagtttatttaataatatatatgctaaggtaggtagaaacaaactgatattcataataaagaacctaattccataagaaaaagagtgagtactgagtacaatacaacacctacttgtcttggcatatttgttaaaaggtgaaattccattagtaaccaaaaagtgcttgagatttgattctagtcattgtttttcaaatgtaaaattgacccttttgataggcttatgatctgagaaacatgagccaaaaacaagacaaaacaaaatttgcattcctaaagcttatggcaaaacaaaagttttccttatataaagatgcccaaaattataacattgaaaagggttggataaactgaccaagtagagaagaaacaatatcaatctgccctcatctgcatctgatcaaaatcttcttctcctctaagaatgttgtgtacagaaatcgttgaacaaaagctaatgactttgtggaatttattaacaggggaaggcaatggagggactcttctccagccacacttgtcatcaccaccagactcatctacaatctcacaaacacaagcagggtatttcttatggtaatcttcattgaaaacatagataagattaccaagtccaacacatttcaagctcgcaaatttatcatcatcatcactatcaaacaaactgtacagcaaatccctaggcatagctccaattgagctgaactccatagtcttctcatcgattttccacaaattaaacgacaacccaaccggcgtgttacacattccggccaagattagccggtcctggcacgcgatcaaaaacgagaaaacaacaccaggtggcctaaggataagaacatcgctccactgatgttggatcagatcaaaagacgaaacgaaacaagagtatataccaaagacataaaaccttcccttaaacaaagccgacgagagagattgcgatgaattaccggatctgaaatcagacggcagaggtggacaaatctgccaagaatcagaatcaggatcgtaaatctcaaccgccaatcgatcctcaatatcaactaagttcccaatgaatctgacaccaccaacgacaacgaatctgggaactcgtcgagattcatgatcaaaaacaccgacaagaggattaatccgcgagaatcgaagcggagaagtggatcgccaagtccgtttaagaatcctggagtaggtgaaattaggagcagtggtgagaacgaatttatcgagtccgaggaagcaagatgaattgggtaggtgaggtgcaggagaagctccggtggggaggcagaaccagagattagataatgggtcgaaagcgaaggactggttgttccttgaagaagtgttgtggagtccgtaaaggaagaaccatgggatttggttggtagaagaagagaaatttggggatgaaacgatgtggtaccagagtttgcagacagttgaagctctgaggagagttgggattggaaggtaggagaggatgagttcggttaggtctggagtgaggttgctgaattgtgccattggaggagattcagagtgtagtgtgtggaatgaaagatattaaatatgtgagaaaagagaagaggagagagagtagtagtagtaggtgcgatgtatggatgagatttggtacttggtagatacggaaactaagtacgcaaatcacccattccctctttcaatttgaacgacggttgtctttgtattattataggtcaa

SEQ ID NO: 187613 - DNA, 5360 bp, Cannabis indica
aaaaaaaaaaatttacaagtgaaaattatcaatgtccctatatacattatatcaataaatataaaaagctacatcatgaccaaaatcaaactaaaacaattataataaaagtgtatgcaatgactcaaatctctacaatttaacttgtatgattattactctggtagtaatggtagtctgtccaccaagtagggagatccattagagttaccaccatcatcatcatcgacgaactcgcctacatcatcatcatcatcggaaatgggattttgttcgctgttttcctcctcgaattcagttgtctgagcaccgaaaggaaggatgcgaagctgcgtatctgtgcccgagcctatttgttctgcttccagttggtatttccgaataaggtcaagctgaagagacatgatgcgcggtgaccttggtagtagttcaaccggttcgccttttggaataacaacttgctcaatggctaatcttgcctcctgtaaatacaatccattttagttcttcaaatcctattgctttgttaactttaaaactaaattgaactaacaagatacataaaatgatagttttcgatatttgggagtcttttgtattaggaaaaaaattgatttggaacctgttaggataccagattgatcaagtatggaattggttagtagtatatatatataactacttcggcctcaggctagttttcgagagtgagttctatccaagtagatcgagtgttatcaaagctaggctgagggaggacaccgaagaagttagatactactaactattcccatacttggtcaatgcgagatcataacagaaccctttcagttagagccgaatttgaacaaagtgaactaacatgacgtcgtgagatcccgagaattcggcattctatcctattaacggtaaccaaaactcgataacattctaggcatcttgacaaagattaaatgacaaaactagtttgaacaacaaaaataacataagggatttattgttacctctaatgcatcagttttctcagatggtttcaccttttcaactgatccaaaatcctttaaaccctcttcatgatcaccgagtaatgcccgaatcaccttccttatttgcaccaatgagctagtctagaaatgacaggagaattcaatagagaaagctggtgatatgggatcaagactataagatgaacaaagcaatgtatttgttacctttgtcatgtagattggtatattatgagatttaaaagcagcttgaattcggggattctttttcagcttcgattgcaaggcaagaactgcgtctgcttcgctgatattgttggttaagctaatactggtattatcttcaatctttaactgcttaatcccttgtatcacactcgcctcgaggatctagaataaccacttgttgtgtgagtcactatattagaagtaaaaatggcaagaacagcaacttagagacccgagactcaaaatctcgtgctgaagagtgtggaggttcaagtcctcttttaaggcataatattgaatattaagaatgctcattgaattggaataagttcgcctccactgcttaggagcttaccggctcaatgaatctatattctatattttatggagttcaagaatttcatatgtagttagaacgaccctcacaaattgcaaatactaatttgtatgtaaaatttcaaatgctgaaattactcattaccccgtaaacaaagaggtgaagtggcatccttccatcccctgagtcgtctctcgtgttttgggagggctcgtaaacgaagtcattgtaaggagttccattttcgatcagctctggatcttcttcatccataagatcactttctgtatcagatgaagtgccaattgaaggctcggtttctaaagtttcaccggattcatcagagtttatcttgcgaacttcaacgtatggttgacgacctatactagaaaggagagtaacatgaacaagactatacacttcgaatctcgtaatgaagatttataactgatgaggaagaaagtttacctgcgagaattgcatccacggttgaatctaagctgcgatgaactctcaactctctcttagaaactatttcaacggcacaactaaatgttgccggacctttcctttccaacactgatttctggacaccccgtcggcttgcctcttcatctcctagagtcacactctgaaacataattctattaaagaaaccgacaatcatgaaggtacacattctatggtaaattataagggaccccaaggaaaccaaatgctaactttcaagtcaaatttgagctttttttttctgcaaataattggttatcaaaattcatactttgcttatttccagtgagattcttgtaatgaaaactcacctgtattcccccaacaagcatttctagggaaggattcataatcaaattcttgattgtcactccatgagctgtagcaactagttgaataccacgttgggcaatcgtactagcggccatagcttcaagttttgtgccgatttcatcaattacaatcacttgaggcatatgattttcaaccgcttcaatcagtacctgaacaaatcaatataatggacatgaatcatgaataaacatccagaagatggagaacattcaaacacctgattaacaatgtagccaatatcctaagcttttgaatcatacctcatgttgcaaatctgagtttggcacttgcatccgacgtgcattacctattccagcatgaggtatatcaccatcgccaccaatctcgttggaggtgtcaacaatcataacacgcttgttgtaatcatttgcaagcattcgagctatttccctgcaaattagagctcactacataggtagattacttatccatacacacaactaagaaatgcaatttcgggtaatatgcatacacaacaatattctaagatttcgcatcattggtgaattccagctattgaattgggataaaatcaccaacctgataattgtggttttccctacacctggaggcccgatgagcaacaaagaagaaccatcctggaccaaatatcgcagcaaattagcacttcccgatatagctcgaccaacacgacaagtcaaaccaataatggcaccctttctatttctgacagcactaattcgatgcaaagtcctgctgatgcctgctcgattatcgatagcgaagtcaccaacctaaagaaagtacagttaagaatgcatcaagcatgactttccaccataaataacaaagtaagataatacaatcaatcataagagaatgaagagttggtgtccaaaaagtgggtttagcaagaaaaatggccaccaatgtgttaaacttaaacaatgaacttttattgcatggtacaacacatcattgattgaggttcatatgagctaaaatggaatagagtagtattattcatttccccaccaagcaatgaacaatggaatagagtagtactactctactcgtagctaattggttttaaaaaagaacctcatacaccttaccatacacttcactctatcccctactttccaaaccacactttcatattttaatacagtatcagatccaaacaaaaactttaacgagtatccgatttaaaaatccaaaaaccactttaaaaattagagtcgaaaaaactacttgtgattcggaaatagtaagtcaaaaagaaccacttgtgatcgagtcgtccaaaattagtgagctaaaataatcactatcatgaaagaagatgttagagagtctcacattaataatattatgtggaaacttaacatgatatataatactcctaaccaattaattttgagataagaatcccatacatcttactatacacctcactacatcctactttctaaaccacacttccatattctaaaagctaaccctctttgggtaatgaatagtgagaatttgggttcaaattattcagcaaaagttttgcttaactacaaatatataacctccaaataaatctcaagaacaatctaaaacaaaattccaaaaccaatcagtagtggtaaagtatcaaactttacctgagaagtagcatattcaagatccttaacagtaataggagaatctgacaaaacaaaatccccagatgggaatcgagctaatggcttccgacccaaatccataacaacttcaatcaattgatgaagctctgtgtgttcaatcactctaaccctcatttcctcaggcaaaagagccaaaagacggtccaattccatctccaaatcatcatcagatgaagaaccagaagaactagaataagaacccagaaaaattcttggatacccagatgagattgtgtttgggaagtgagaaaagggtgagaaaagggggcatctttgaagagataaagatgggatttttctgggttgaaaagctaattgagaagtagttagaaatggtgagaagtgaagaagaggaaagcagagcatttggcgggaagaagataacgtacagagtgtagtgtagtcactcaaactcaaagcattcaacaatggagatatatttcaccttactatttttctttttcttctctatatataattttttaaaattttatgatggacccctaaaatatatgagaaatgttaaaaagtattcttggtgtctaatatcttcttcggtatcatactactgctattagtataattaagtatcgggtctcataaaaattaagaaaatagcttttaggaaatatcgacaaccaatcgttgagcgctacttatagaatgtattggacaccactggtgcccaatagcaattgatattggatactattgatgtatagcacctctagacatatcatcttgggattagctagtgatactccttaaaaattattacattaaactatatgggacataatacttaattggactcataatgatatttacacataggagggtgctcgacaccactagttgtcttgtagtatttctcttgctattaggtactagtggtgtctaacacctcctataggtgacgtcctacgataggttagcaatattccctaaaagctattacaccaataatggtatgacaccgaggaggatgctaggcatcagtggtgacttttagcatttcactaaaagttatcagcagtgtctagcattctcatacgtgtaaatattgatattggtacaattaaatatcgagtcttatataatataatataataacttttagaaagtatcgctaactaattgtaaagtgacatactaagcaccattggtaccctatagtcagggtcggccctgagcataggcacgctaggcctgtgcctagggcctccctagctcaggggccaaaaaaaa

SEQ ID NO: 187614 - DNA, 2741 bp, Cannabis indica
tagaactagaaatataaccttagaaagaaaattagagattttgtattgatttgattcaaggtcaacctttactattcttattttataaagaatctttgttattagtgcattgctctctactggtaattggttattgaatcaagctgatatgactctgtaattaaattgcggactttgagctttctatttgtgaatttgtttatatttataaaagtgctgtttttcaggatggcgaagacgattgttgatgccgttttgggccttaaccttgatgattcagcaagcaatttagctgctgcttgtctactttatgtcttgacaagtgatgtaagttgcattttgagtttgcaactaatttattctagtcaatgttattacttttttttcttaataactcgagtcgtcttgatgggttgtctactactctctgtcagggtcaagatgagcaccttttggaatcacccagttgcattagatttctaattaggttgttgaaaccaatagtgtctactgctactgaagaaaaacttccaaaaattggtagtaagcttctagcattacgcaccgacattttgcaaaacaccaagaaaaaattagactccagttctgctgcacttttttccaaagttcgtgaaattcttgtgagttgcaaggagataaaatcgagtgatagtgataaggatgatagtagcatggaaaagccagacttatgtccaaaatggatagctttgctgaccatggagaagtcatgtttatctaccatatctcttgaaggtttgtgttctttgttaatgccatggatttaagctctgttgtatatcactgaattctatattgttagcattagtcatgctttttatttgccactagattttccgttatctgttgctgatgttcttttatttgccttgaatgtggccaatcagaaaccactgggacagtaaggaaaactgggggcaactttaaggaaaaaatgcgagagcttggaggacttgatgctgtctttgaggttgccatgacttgtcattccgatatggaggtgtgaacttgtatgttagtttgatctcactattttatatattaaaaagaaagggtcaagttaattccctttaactataaataacaaatacttttattaaagaaagggtgattagtttagagttcataatgctctaagttgtgaagagcagaaataatcataataggtgattagatttgtaaagtgtattcttggttgactaattttgttttgtgatatggcactaatcattattgattaagacatctaatattggtgattaattttgtaaaattcattcacataattttagggttctagttgaagttttcattgtagccaacctcggtctgcatacctcaaaaactttttgaattcttgtaatttgttagttgttcgttcattcaattttatttttagagaaaataagaaacaaaacctttgttgattgaaaattgaattgcaataaaagttgtattcattctgtatctatgaagtattctgctgcatcatttgtgttctttaaatatacatatttatatgcagagttggatggaagatggcttaccatctactcaggatgtaaaactcgaaatagatatgcaaagcttatccttgcttttgaaatgcttgaagatcatggagaatgcaacattcttaagcagtgaaaatcaggtactctcttctgcttgattagactttggctttctctgcataatgaaagtgaaaatgaatattcatatttctgctattgtaacagcaccatttacttaggatgaaacgcaacataccttcatcggggagccccctgtcgtttacacagcttgttatgagtgtcattaagattctatcaggtagctaagaatgcacaaagcggtacttattttttatcaatgtctgatttgtactcataaagctaagaatgctaacctttgcattaattcccagatctttatttactcaaaacttctgctgtggcttcaactaaagaaaagtttgcttcaattaccggctctaaaggtaatatttgatgaatatgaagtgctctggattattcattatagtcagcaatatcaatagaaaagcaaaatataagacttttaaagttgatttgctgatgcttcaattttcagggaatgacgatgtggatttattttttgatcccattaaaagcagcccagagaagattttctctgacaaaagcttcaatataagtcggggtaatcaatttttgtcctcttcacggttggattgttctaattctgaaactacgagcacctcaatgaatgattcctgttcagtaaggacaagacttaaatcttcttcatccagctcatgcagtggaacatctaggagtttacttggtatgcataaacttaagaatggttctagaaaaaatcttggtatcgtccaaggattgtataataatgaagatataaaatctgaacttttggaggaggaccaagatccttttgcatttgacgaagacgactttggaccatctaagtgggaagcactatatggaaagccaactacatctcgtactaaaaaaagtggggaactgagcagagaaagagaacttgttgaggattgtgtggctcaaataataatgagtcaacaggaatcaattaatcgagaagctaatcattcgcaagaagcttcctgctcttctgctatcagtgaagagtccattctcttagcggactgtcttcttactgctgtg

SEQ ID NO: 187615 - DNA, 5036 bp, Cannabis indica
aaaaatgagagaattaagaagatagcaaatagaggtatttagagtttttaaaatgttatgtcaacacctcatatctcttatatataggattcttttactgtgagaaattttctaaataccttatttgtagagtacttaatagcttgttctaattgagtaagtgcattgtaatatgaatgtaacatatttaaactaagattaatttaaatatttttttattcagctctattttttgatatttgctatttaattgagaaatgttatttgtctcccacgtgtccatcatatagcatatcatctaaccaatttttataattatttttttattaattcattatttaattttattcaatgatatggatcccactaatataataatctatctctcctcctcccttcttctctatcttcttttgtttctctctttgatatatgttttttaatatctatctttatctttctaataatgttatttttttaatttttttttctgtttagtgaaaaatagaaatttaagataattcttgaaaattagtgttaacttttttttttggtttatttgtatttataaacaacaatgaaaaagaaagaaaaacgtctgcccaaacttgtgctatgtggcagttgagttgtccttcgtggttttaactatttttttggctaaattcaagccagtttacagcagtttcttagtagaatatttgatcacatagtagtttattgcagtttctcctggttcttttcataccttgttcaattacaaatacattcttcatcatataccgagatcatttataacagatttgtatcccctgaagcttattctccttcaatctgaactatggatcctcttaaaggcaaaatgaaggccccaatcaaacttacagaggaggagcagagtgtattcgaatttgaatttggtgagactctttcatccgattcagttggccataatgtgctttacacccgaatcatatgacttccaagaaagtgtaattatctactcttcaaagacaaatggttgagcattgggatggacgatttcctgtcaagatctctgaggttgatgatatgtttatgttaacatttggttgtgaaggggacaaacaaagagttttagagaaagagccattccattttcagaaccatcatgttattttattttctcctattattggtgagaatgtctcttcttccaaccttattttcgtacccttctgggttcaagtctataggctaactttcatgagcaaaactaaagggttggctgtagcacttgggaacttaattggtgaattcattgatgtgtttgaagactccctttttgaaggatagggacctttcctacgtattcgtgtcgaaattgatgtaacaaagccactcctaaaagggcgtatgattaccctttcgcaagttcgggacaaattctgggttgaattttgttatgaaagattacctgaatattgcatggaatgtgggagaatgggtcatccttacaataagtgcacaaccttccttgaagaacttgataggggtgaagaacctgaacttgagtataggcctactatcaagggatctccactgcctacatccggttatgataggtacagaactgactttggaaaagggaatgcttggcctttgctcactcgattagcgagaacttcactcattactgttgtcccttctcttaacgggtgtccacaaccacatccaacacttttacaccatggagagtcatcccattaaaggcatgatgtgccaggggttatgcagcattcggtgactttcccatctgcttctactgctgtcacaattcccattacaacacgtatgatttctgtaccagcaacctccacaattccctctccatccaacaacttctcaacaaaatctcaggcctcccattttggactgtcacatgataacaagcaaaattttacacataattctggtatgacacctactgctccattcattgctgtagtgccttctagatctttatcattggcacctacaactttcacaattcacacttcaacacccgaatttactttagcaccacagaccaggcctgttactcatgcacaatctgatgtgcataacacttctctaacctctaaactgggttcctacgatgacttatctggaatatatactccacccacaggtccacattatgaccaaaatattgttgctacctatccaccccatcctcacactgcctcatgcaacaacaccaacatacttcatgcttctactaccaattcattagcctctccttcaactattttgtctaccaacgctgcaattatgggaaaagaaaattgctctccaaatcgaagtttcaagagacaacatgataggaattcaatgagagaaacccttaagagatgcagaggtctgcctcagcctcggttcaccccttctttgtcagctgggatgaccaaaaccatcaagtttccaatgctgatatggattcttctggttctcttgaccttgaagcggtggctgattctcagccacgcaatcaaccatgaaaatcctaagttggaatgcacgtggattggggaatccacgtgcatttcgccatctctgtttgcttgtcaaagagcaatccccacatgtactttttcttatggaaactaaattaggtccgaatgttatttcccgttttcgtaatgttttacattttaataatggacttgaagtccctagggtaggattgcggggtggtttgatgttgttatggaaaaatgatgttgatgtatctattttaaattataatgcaaatgtatttgactgttatatttcttttcctaactaaccaagatggcattttactgccttctatggagctccttgtacacaattacgatccctcacttgtactttgttggaaagactcaaagatgtctcacctttatctccttggcttgttatcggagattttaatgagatcctttcaaatgataataaattgggaggcgctcttcgaaatgaaactcaaatggagcaatttcgtaatttacttgactgcttccacttaaatgaagtgccatatgagggtgacccgtatccatggatcaaaggtagacaatcattaaacacgattaatgaaaggttggttggtgttttgtgaatgattgttggacatctactttcactccaattgtgactaaacatttagactactatagcactgaccatcgggctatagttgtcaatgttaacctgaaagactccagccagcagcagcatcatagacgcaccaggttcaggtttgagcaaatttggcttcagcatgaagaagctactaacattattgaacagcaatggttgtctcaaggatcggggtctgccatggaaaattttttgcaaaaaaatgcagcttgctcttcctctctccaacaatggcgtatctctacttttggaaacatgaaagagaaaatagctactacccagaaacaagttacccgattgaataatcaaccaacaagaactctaatactggttgaagatttaaaaaagtctgaaagtattttggatgagttattggaacaagaagaacaatattgacaacaaaggtcgcatgttgattggttaagtagtggagatcaaaataccaagttcttccatgcatatgcttcatctcgaaaagcttcaaatcgaatttcttctctcttggacagtaatggtaccaaaataatttcaaaggatggaatctcgaacataattacgaatttttttgctgaactttttactgctacaggagctgatcaatctgctatacaagcagttacaaccaccatcccaacatcgataacatctgaagttaatgcctctctcactgttcctttcactgaggcagaggattttgctgcattaaagacaatgagcccggataagagtcctggtagtgacggcatgtcagcaatgttctaccaaaattactggcatatagttggataatctgtaactgcagtggtactgggagtgcttaaccacggtcaaaacatggacttaatcaacaaggccatcatcacccttgttctgaaaattacttcaccctcggccatgatagattttcgcccaataagtttatgcaatgtcatttacaagatcatttccaagatgattgtgctacgatttaaagaagctctccctttagtaatctctcggaaacaaaacgcttttctctctaaccgattaattaccgataatgtgcttgttgcctttgaacttgtacacaatattcaacatcgaacacgtggtaaaaaggggttttcagcactcaaattagacatgagcaaggcttttgatcgggttgaatgggtatacttaagggcagtaatggacaaaatgggatttgcacaatcatggattgatccatctttaagtgcttatcatcttctagccttacttttgcacttaatggagatacaacgagtcttgtaaaaccttccagaggccttcgccaaggggatccactatcgccctacttgttcttaatatgctctaaaggtctctcacgcttcctgcagcacgaagaatctattgaaatctccaacggttgcggataacaagacgagcgccttcaatttctcatctccttttcgccgatgacatcctactattttgtgaaacaacaaactattctactttagcaattcaaagagtttttgatatttaccataaagcttccggccaaatgcttaatcctcataagtcagtaatgtcattctctccaaatactcctatggcagagaagttatttttcaacaaattctcaacatgcctattagtgagtgtcatgaacgatacctcagacttccttcctactccggccgtcacaagaaggtgctcttcagccatattaaagaacgtgtgtggaagttaatgcacgcttggaatgaaaagttattttcggttggtagaaaagaagttctgttgaaagcagtagttcagtctataccaacctatgcaatgagttgttttagactaacgaaaaccttttgtcaacaattggaaagcat

SEQ ID NO: 187616 - DNA, 4880 bp, Cannabis indica
agttcaacttatctataatgggtaaagatatctctgctggtgattcaaatgaaagaaagcccggcttgttaaaagatcaaatccagttggtgaagagaaaggattcaactcgttatgaaattgttcccattaaagattctctatcctttgaaaagggtttttttattgtcatccgtgcttgtcaattattggctcaacacaatgagggcataatattaatagggctggcaggtccttcgggagctgggaaaactgtattcacagagaagatactcaactttatgcccagcattgcggtcatttcaatggacaactacaatgatgccagtcgaattgttgatggaaattttgatggtaagttaccttttactagattcactttatttgcaagttttaataaatcaaagtgaggtgagtttttgtttcctagaaaaaaaagtgaggtagacaaattctaaaaatgatcttaacaacaagagtagctcaatgaggtttgcatccctcctctatgccctacataacaatgtttattgtttactatttcaaatattgtaaggttagacaaggagtccaatttccaaaatatgatcttgaacaaatttttccattgcaattagattggaatgaggctaaaaaaaagacataatgcctccttttttggttttgctaaacagatccgcggttgacagactatgacacgttgcttcagaatgtcagcgatctgaaggaaggaaaagaaatccaggtcccagtatatgatttcaagtctagctcccgtataggatacaggtttactatcctcttactcatctccatgtaaattgtaattaatgtttccccatctcacccaagtgaaggcaccttgtcatgtatatgataagaaaacaccgttccccatttcctatcctttttatatcaatagatttatgactgtttttctgaagttatttgtgggtaatttgttgcttgggaactattcttctaggtttgttatgttccattgcttgctcttcatactctgaattgctaattaaagcatgttccgatgacaggacagttgaagtccctagctctcgtattgttatcattgagggaatctatgctttgagtgaaaggttgaggcctttactggatcttcgagtatcagtcacaggtggggttcactttgaccttgtcaaaagagtaatacgggatatacaacgagctgggcaagaacctcaagaaattattcatcagatatctgagacagtatgacttttccatttaatgcactattttttaatacgtggtgattaataaatattaaatccttgatgtcttggcattcaacaggtatatccaatgtacaaggccttcattgagccagatctccaaacagctcatataaagattacaaataagtttaatccttttactggatttcagagtcccacttatatattgaaggttgatttcctcaactttcattttatcttgccatgtttgttttgttactgatttcaagtctttttttttttgttatacctcccttcatagtgacaaacaagtgtgaattttattgcagtcagcaaagaaggtgacggtggatcaaataaagactactctttctgaagattatattgaatcaacagagcagacatatgatatataccttttaccacctggggaagacccggaatcttgccaatcatatttaaggatgcgtaataaagatggaaagtatagcctcatgtttgaggtttgtgttgattatagtttattctgtatcactgttggaaagcatgtgaaataagattttttttagtgttaggtggataaattgtggataaatctcatataaccagatataaagtagttgggttgagcagactatagaaacacgcatgtaacatctaacatatatgctcaaggatgtatggaaataggaagtttgtggagcaatattttattcagaagaaactttataaagtgaatcttagaaatcattcaacctttgactttgtatacagccaccaacaaccctagtttcctagatctttgtagagagtggaaattgttgacgtattagatcttaatacttgttttcgattttgagtttttgttttgtccttgttttcgacttgaactttttgctaatgtttaccacggtattcttccgccacaagtgaggttctcaatacataacacggtggggggagtctaagaaaagtgacctctttcactttttttttaaaaaaacaagctgaataagttcattggcagcacaattataaaaatttacatcagtgtttaacacttagctacataattctaggtttgtgttaactttaggattttacaagtataatgtggagattcatgttttttattttaccatatgcacctccacatacttgtaaaatattagaggttgcttgtctgacatgattgatcatctttaccatgattgattcctggtatcccattgctcatgggtttatgttcttaaccaattctgcattgtatgtttccctttcaggaatgggtgacagacaatcctttcgtgatatcaccaagaataacttttgaggtcagtgttcgtcttcttggtggacttatggccttgggttacacaattgcaactattctcaagagaaatacccatgtattttctagtgataaagtgtgtgtaaaactagattggctggaacaactagatcgggaatatgttcaggtattgctcaaatatgttgtcaatggttgagaattatatttattttaatactctggtagaatagtatacttatttgggttgttcatatagtaaaacttgttttacttttgtatttcttggctgactctcatgagttcatgtaagcaatttaaaacttttttgttgcaatgtgaaggtgcaaggaaaagataggttgattgttagaggtgttgctgagcagcttggtttggagggtacatacactcctcggacatatattgaacagattcaattggaaaagcttgtgaatgaggtcatggtatgatcactttacctttctgatgccccatgcactctcctttgttgggataagagttatgtgcaaatgtttttgatttgactattttacaggcattgccagaggatttaaagacaaagcttagcctagatgaggatctggtttctagccccaaagaagcactttttagagcttctgcagacagggttgccatgagaaataagcacctgaagaggtttggttttgtcttcagctgtgttgtatctatgcttaaattgagtagttaaatgtttctgcataagacatttcccttaatatagtaattataataataataataataataataattaaaaagtaataaaatattgacaaatttgtttttggaatatgttataaggacggctaagaaaccaatgtaggtttgggatatgtgtagaatctgttcttttgggggtccaatagtgacaaattgctttttccctatttcacgttcttacttgtagattacctgagtgggtcatatagacataacattataacaataaggagatttcatgttgaatttagatacaaaagttctttagatgatttcaaagtgtgtgcttcaaaatacatatttccctctttgtatgaagtagtttagttttccctggaaagggcaatagtgcatctccaacatcccttgcagtattccaacttgtatgttaagcatacctatagtaacttctttgtttgtcattagaagaactgtgattttgtgactttggtccttattttttcgggagcttcttcttatatcttgatttctttggtggccaatattctttatcatgaatagtggcatgtcacagtcatatacagcacaaggggacaagaacatttctaagcttactggatatgctgctaagggtcaaggatatggagagagaaattcagtaccaaattcaacactagcaaatcaagtatgctgattctttctctttgttaggttattttacattatcccaagcaagtaagactcttttcctcatcattttgtccatgtctcagctttcagaccaaatatcttcactgaacgatagaatggatgagtttacgaatcacattgaagagctgaattccaagttaagtcagaagaaaaattcttctagccaacaaaacatagctctccaggctgaagcatgcaatggatctgctcctacttcctacttcatgtctagagtgggcaatggttcaatgaatggatctttaatgccgaattcgttatcttcgtctcagttggctaaagactcccctatactggaagaggtatgtggccccaacctttttatttcttaagtttgcttccttttctggagttttgtgagtccctcagtttaagggggccaaagcatagatagtaaggaggaaaaatttagataataaattgaatggagattatgatttttaattgggtaggagcaactgataagagtgaagaaatgctagtggaaaaaagggtcttataatttaggtgtaaatctattcattaacattttctctttctttttttttcttcttcagttaacagttatttttgttagatgagctgtgaatattacgtgtgtatttcttagatgtaggtcatttctgccttagtattttttttttatttaaaaaaaatgtttaagcttttcttgataacacactaaaatcaactttaagaaacagatattcttcttagctgtaagcataatcagtgtttaaatactcggataacttgaacagcattgtatggatacttctgttcagtctcacaagagccattgaagctgcatcaacattttttaataccatttttatcaaatatcgtgcttgtttcctttgatgttttgttttctaatgaag

SEQ ID NO: 187617 - DNA, 2785 bp, Cannabis indica
atattccttataattaaattttttaaaacataagccactacccaggacctttaagctattaagctaatatatgattgtaaaaaccattacgctacactcaaacaaaaaaaaaaatatattaaacatcacgtaccaaactctccctttcttttaaaagaagaagttcgacagattattatacatacttttcattatttctacaagattagaacttctcttcaattctcttataagacaatagcttcttaagacagtaaaagctctaagtaaacataaatctattactatctcaatatggaaagtgatctacccacaaattattatattctttatttttattttttcattctccatcgcttatcaaaaagtacagaattgaccatttttcagcttcaacaaatgaaattttacaaacaagtagcatttctcttttcatttaacatctgattaagaagagcgtaaaccagttgaattaagcattttaattttaggttttgattaaaaattgcaaaaataacttgagctgttccagcaaaaatcttcgatctacgcgtacaatacatacattcgacaaagcattgatccaataatcattaattttgataaaaatatgcatagccgggtattttgaatattttcactcctcaactagacaaatccacttcttggtcaggaacggaattataaccaaattgaataaaaataaatgtaactaacccttttctactttttcactgaatctattgcaaacttaataaaggtctactacaaaatcagttgcttaactgagagtttaacacactctaggcacacaaatataacttcttttcaaccaaaaaaaaaagagaacaaaaattgtctaggagctgtgtagttccatggccaaaatctgccactaagccaaggaacaactgtatcacggttgatatgttctgcaaactcttggtaaacaatcacaggttactgctgcatcgctaccagtttctctgctgagaacaacagaccaagattgaagataatcaataagcatacatcaaaagctatactcttctcttgtaagcctaaaatgtatcacaagatcaattcaattgcatgcataacaacacatacagttttgaaaagggacaagactaatacataccctagtctttcttctttatccaggatataagattcaaaatttaaaatgaacggctaggcctggcttcggcacgagtgactcggatttgtcttccgtccaagtcctaagtgataaaacgtttagattaggtttaaggttatacaaatctgaaatatgtaacttggaacaagaacagtataagttatacttacaattccattcaaggactcaatagcattgttaacctcatcagcagagttataggttacaaaaccaaaacccctagaccttccactctccctgtcaaaaacaaccttggcatccacaacctgtccttgctcactaaataagtcatggagagtagaattgtcagcactccatggaaggttaccgacatagattctgttgccatcatcacgaccaccaccaccaccaccacctcttccaccacgaggaaatgaatcatccctagctggaggaggtccaaagttcactctcaatgccctaccatcaagttcctgccattcaaaataacttttacttagataaattcaaatatgaaactgtcaacactcaacagaacaatgcatcagaaacaataccgacaaaaatgtaagacctaaaggcaatgaccactcaatgtatcaacttacatagccattaaactgctgagcagccgcttcaacttcatccatagaagacatggtcacaaaaccaaagcccctgcttcttcctgtcgttttgtcataaattacctgccaaaaaaagaaccacttcttaagacatatgaaagcaaaccaaaccctagtctttaacaaaagataaaggtcaaaattttcaaaaacaagtaatgaatatacttataaaagagtaaaagtttacctcaaccatctcgacatttccagctctctcgaagagaccagcgagctgagcactgtcacagttaaaaggaagattacccacaaagagtttgaggtcaggggcgaaatttcgttcgccgccgtcgctggaaacctcttcatcctggtcaaactcagacgaaatagcaacattccgtacgaaccgagaaggaaggttatggaaacccttggcgggaacgcagacgagattgacattgagcttcagagaagatggagagagtgaacgaagggagagcaaagcgggtttagggctgaagagagaaagggttttgggagccaaggaggcaagagctaaggaagaagcagcggcagacatggtagcaacgcttatagaggaagatgaagataaggtttttcgagaagagaaaaagagagggtttgggtttaagaagaagaaaatgaaaaagaaatatcttaaaagataagaaaaatacttttggcagaggggatatttaaggagggtttcgggtccgggtcggatccgggttgctgcccacttgctcttgtgtcagattatagcacagccgttgtgatgttaaaattggaaatgcacggttacgattgatgccagctgtagatatggcttgttgtggatagcttgatgggtggtccaggttttgagtcgcacttatgtttttattcactcactactatacgcagcagctacaacttggtctaaatttaaataatacaatttaattaatgaaaattgttttatgaatgaagaaaataccacctaagcaac

SEQ ID NO: 187618 - DNA, 949 bp, Cannabis indica
acgtgaacttaagaaggatagccttagggatcattcgagaacaaaatacgaagaggcgctcggtaccacttttcatctcggaggcacctacgtagcgctcctataacacgatctagagaaatttggcgacatatcttctctatcaggtcttggaaaggcaaaaaaaaaaaatgaaaaagaaaaaaaaagacatacttttgggcgcacacctactattttgacatttatttctcccaacgcctcacgccccacataatcacatatcattattaagagtttgatcgtgtatagaaggtatcttaattcaacttgagtctcacttaccctatttaataatacaaattataataataaataaatgtattttacgccaacaaacgctattgtacaaatcaccctaatagactcggatccgttcgacccattaaatatatgtgcctataaatatgactattactccatgcaaaaggttcgattctcttagttcataactagaaaataaattgtaaacttcatactttcgtggaggaatacttattaattcctcaactatacataaaagtcttatcttattttcttcttaataccttcttcaacttaatttttattataatcagttttcaaaaaaagtcactaatagatccctaaaactacacatccgaaattcaaagggaaattcttttgaaatattaaagaaaataacaaaatacttcaaaaataatagaacaattttgatcctctttctaatcccactatcaaaatactaaacgaagtaaaagaagacatacaatacaatcttctccatccatcatttcttccatcttttcgaactatgttcaatagagtaaaaaagcgggaggaaaaacaagtaaataaaaggaaaataattatactattaaaggaaataacagagaatggaagagacaaatggaaagaaaaaaagaaaaaa

SEQ ID NO: 187619 - DNA, 1565 bp, Cannabis indica
aattcgttcgttggttcccgacagttattaaaaccttttggtatggtctactttatacaaagccgtttatatatttaaaaaatcgtttataaattgtaactggacaattactggtgacactaataaggcaattcagttttttgggttgaattgatatatcaatttgtcttttaatgtacatttaagatgccatcaaagaaaaattaagatctactgaaataactgaaaaatgtgctaaaaggcatcagtgctcgcatcagtagtgctcaaagtgttatatgtagaattaaatattagatacataatttaaataattatataatatccctaaccatttactgggatactaggcataactgtacctaataatatacttaatggatgtataattataaaggctaagacttctttgttttcattatgacagatgagcataacaaatataatgctaatgggtttgctattgtgctgtaattctatagtggtattgcattgaagccctacctttctttttctccacggtgaactaacaaagctttcttatcattatttcaaggtagtggggagaggtgaaagtcagcagtacaaatccattagtgaataatatatagcacaaattgtattaaactgtccttattgtatcaacttctgtgtcatgctctttcttatgaactccattatgatatttaattaatattaacaattctaagtactgaagcaattagaattagtgcagtcaatttattggcatttggttcaatgtttttagccttaagctatcattatgcctctttttttatattcataaatattcattgttgggttttcttttgcttgtgcaatatcttactttagagataattttgtcactttctacaaacaaaccatattcagatctttgcctgattggatgtgcccacaatgatggataatgtatgcaaatatatatttattatatatatataacttatatatttgcatttaaaggacatcatcatcaccaccaaaccatcacaacatcaatatacatggtttcatttggatcaaatgctgcatgaaaactcttagttatatctctttctttttagataatgattaaaatttagagtgatttaattatatagtaattgaaaccaaggggtttttcaacctctactctacacatgcttggtgcacaagagttagagccagtcaaatactttcttcacaagaatccaagttatataaatatttgtatcttaacaaaactaataaagtttatatcatcagcaagataccaacttaccaggctgtcttcagccctatataactgaaaattttcaatcaccatcggctatcttatcttaccttgactatttgtttagagaacccaaatttataattaggttctgataaagaaatttaaaatggatgaaactattaattggtttcccattttctatttctgtcatttatgtcctccaatatcttagtgacatgacactataacactattacctatatattgcaagatctttctagacataaacatatcaacacataattatatatatttgtacattacc

SEQ ID NO: 187620 - DNA, 3030 bp, Cannabis indica
attagttatgtgtatttttttattttttattaaatattaaataatttattaattaaaaaatatacaatgtaaaaataagactacacttttagggattgaactagattacaaaatataaaatttagtgaacaagatgcaatgagcaaaatagggggattgaatttcatcgacattacattttttttaaaaaaaaaaagctataacattgtcattcttgtttcacgaacattgtacaaggttgaaatgagctgaccaaaaaacaaatttgaaatgaaagtgatcacagcaagatccaaattcaaacattttccctccttccctttctcgtcttcatcaactacattgtccgccatacccaaaccaagtcttatcagaattccttttgaccatccaatcccgcaaaccctttttcagctactaaagcagcgtcctcaactccctcagcttaagcaaatccatggcagagttttcaccgtggcactttcatctcattcttctttaaccacctctcttattaactgttatctctctttgaaggatctcaacggtgctagaacactatttgatggttacccttcttctttagcccccactcttgtatggaacctcatgattagagcttattcaaaattacacaactcccaagaatccatttctcttttcagtcaaatgctggcttcttctttccctgataattacacgtatacattcgtcctcacttcctgttctcatcagatatcttcactccatggagagatttttcacgggttggtggtgaaaaatgggctcgagtccaatttgtttgtgggcaatgcggtgattaacatgtatgctgtttttgcaagaacgggagatgcccggaaagtgtttgatcatatgtctgagagagatgcttttacgtggactagtcttttacgtgggtatgcgaaacgaggggagattaacaaagcttgtgaactttttgatgagatgccattgcgcaatgaagtgtcgtgggctgttatgatatcaggttttgttggctgcgatagaaatattgaagctctcggatgttttcatgacatgttgtatgaaggcaaggtgaagccaaatgaggctatccttgtttcggttctgtctgcttgtgctcatcttggtgctttagatcaagggaagtgggtacacaaatatatagatgctactgcaatctcattgaccaataatatatttactgctctaattgatatgtatgcaaagtgtggaaaaatagaccgagcaaaccaagttttttgtaggattcccaaacgggatgtctttaactatacaagcatgatcaatgggttatcaattcacggacgtgggaaagatgctgttcaagtcttctctcaaatgttgatggaaaatgttatgccaaatggcattacaattcttggactactaaatggatgtagtcactcaggtttagtagaagaaggctcttcggttttcttgcgtatggaaagctcatggggaatcactcctaagattgagcactatggctgctatattgatttacttggccgcgctgggcatttggaaaaggcatacgaagttatcaggagtatgccaatgcaacctgacatagttatatggaggtctttgctgagcgcttgtaaaatccatcgtgatgtcaaactaggggagcaaattgcaaggcatattgagctgttagaccataatggacatactgaaggcaaagtgcttctctctaatttgaatgcctctcttggtaaatgggagagagttgcagaactgaggcatttaataggggagaaaagaaaccagtgcagcccagggcatagctggattgaagtcaatggagtaattaacgagtttagagttgctgaccgatcacatcctcgaattgcacaaattcgggaaaagttaggtgaagttctgaaacgagctcaattaggaggctatatttcaaatacaagtcaagtttcctttgatttgagtgaagaagacaaagaacaagcagtcactaaccatagcgagaagttagccgtggcttttgggctgatgagtaccgagcctgggacttcaattaggattgtaaaaaatctaaggacatgtgatgattgtcattcagctatgaaggccatatctaaagtttataatagagaattaattatcagagatcgttctcgtttccacactttcaaagagggggcatgctcatgcaatgattattggtagtttttcacctttttgtaaaataatcaaatacaagttgaatgaaaattactgatatgagaattaacatctggaaagttaatataataagatttgatctattgagtatttaaaaaagtagtaccgtaaaggctggaatattaagaaagtatatactgcatcttgaagcaacgatgtaatattttttcaggtgatatgttcagaatacagacaactcttacgtgatgctataagtttgttgaacaatggcaaacatctaatggcccgcaaggaagagcattatgtattattgttggaatctgaagagacccaaatgcataattcacagaagtttcatgcttagaaaaagctatatctggtgagctggttcagattgtcttactctaaaaaagttgcccattaagtggagcaatattcctaaagtgataaagttagtaagaaatgaaatggaaaaagggaaatagagggcaaaaaagatggtatctttagcctctgtttttcttgttcctggatgctgaaaggcaagaaaaaggaatattataaagagaaacaaaatggcacgggtgtgagaagtttctgctacttccagcgcactaaaagaaaagatcttttttttttttttatttggtgtctctcactctcttactctttaaaaggtcaaaaaagtagtagtactacagctctaatgattgattacaggtaatcttgaaacatttatggctctcttttttgttaaaaaaacatactttgtgctaatgaatgttggttatatatatcatatgcattatgaagattaattctcatactactttttct

SEQ ID NO: 187621 - DNA, 2232 bp, Cannabis indica
tatatatatgtttatatgttctagcatttcttgcggattttgcagttaagggcacctgcaaagcgtgtaagcctagtgacaaaagtaccaggcttggccttgatcatgtcacgtctgccaaatggccttttcttgctgggatttcctgattgaacaaagaaagctccattcatcattagatctccctcagatctccatgtccatgatctccattccgattcactagcatagtccctcttggtcacctatattattatcatcattacaaaatgtcttagaatgcggtttcactttgttaccatgttagaattgtaagatcgactctctaacaaaatgcataattcgctttgaacatactaaaagaagttttgttgtgttttgcttacttgtttagcagcagtgtttggaggggctatgaagcgatttccttggctaataatggtgggatgtgagcttccaccaatggcgtacataagccaatgagtgtagtcattattaaccacatggaagaaaccccatctgcaccttggcatcctctgtacaagtcctcttccaaaatggttgaaagccactgtcacttgcataatcttgtcaccttcaaagctgtcactagcaccaaatagcatcacctgtgttcatatccaaatcatgcaagaagaaatcacatgtattaaaatctccaacaaacaccaaatattagtaacaataataataactcaagttgtgaaaaaagagaagtaattaattacatcattgtgatgagtgaaatggcaattggaaatggttatggctgtagagccttggatgacatcaattaaactcttgacaacggtacattgaaatatgatcaagccaaatgttggtcgatccaaagattgaaatcccatctccatcagcaaccgtacggagtccaatatgatccacagagtctctaatcagaccaccattacttgacacaatgtcatgtatccgaagcccatggatgatcacattttgagcgaattgaattgtaattccagccccataagcaatgtgtacattggctccacgaccgtctatggtcttgtcactcgttattagaagctcttgagacagcctgatgatcatgctgcgcgcgaaaaagatccacaacggcttcttttggatcacagcgtggcgaagagtcccgggttttggactctgaacatcattgtctgaggggtcagtgacaatgtagtatgaccccctcttacctcctgtggttttcctaccaaaaccaagaacacatttagccaagcgttttcggttattggcccaatgcttcttgcaacgccagcacctgtcgatggggtttgtagccaaacaaggaccaaagtacttcttcaattcccttcttgtactgttggacccctctgtcaacctgccaattcattcacacaaaaacaccttaacataacacttttaaaacataacataacactttaaaaacataacataacactaacttgttaacttcatagttcaaattttcagtaacttgttctgggttaggttcataggcttcaagggcagctttctttgattcttcagctcgtttctgccattcctcgtcgtaaccgcctatatgggctagcagggttgggatcagaaccaaaaacgaaatgagaaaaatgaagccaagttttgtagttgctgataccatattttctgttgttggtatcactctgttaatttatgtttaattaaaatgttattgtggccaaggtcctgttatcaagtttggccttgccagaccggaccgattagaccaacttaaaagaatttgattttactcacaacatggtaatgttgtcacggtcttaaggctaggcaagagaatgttagagaccggttgttaaataggtaaacagaacaagtttttagtgatactaaaattatcaataatgattttcgtaaaaagtggggaaccattctcttaaaatggattgacagttttgaaacatttttgttacaaaatgtgtggaaatggttcaaacttagttagagcaatgagattattagatcattggtctagaagtgtacacataattttcatttaatgattttttttattattggtaataataaaaaaagcaagtcaaattttcttcctcttcggtttttgtacataataaaaggggaaactccataaaaaaaaggtggaaggttttagagtcactactatttttaaaattttaagagaatataaatttg

SEQ ID NO: 187622 - DNA, 3067 bp, Cannabis indica
aaataaaataaaaaaaataaaggggtgtaggtgtatatatatatataaagtgtttgattatatattatgatattcaagtttgacgttgtttggtattaaaatgctttactcacgccttaatcagaggcttttgaaacttcagtttttgctgttaaaacggtacgatcttttcgatcattctcttatcaacacctcatctcatatcattccctagtctttgttttacaattacatacattattattattattattattagttgagtaaacccacttaattctccggtgactctcctcggatctggtcggagagttttaccggaaaaccaggtcttacgtaatgatatcttttgggcttataaaaacccgaaatgggtctgtctctatatttttatatgtatattctaaacacattttaagtactgtgaagagcaagttatgagaatcttagagatgggttgattattttactctgtttttttttatgaattcaagaaaagttcttatttttatttatttatttgtttgtttttacattttctaggtgattagtgcttcgattacgtaagaagagtcagcttgtcttgtgctgagagcaagagcaagagcagataaagatttttgttaacattattggtcattgatttgatctgtttagattaaattgaatttattttttttagcattgtcatcttctactactacccatttagcttaaggtcgcctctacccaaactttttggttctttctgtgtttgtctggttcttcaagggaaactctttttaaagctgtgattggtggagttcagccctttttggttggtgggttttgaaaataaaatgtgcagagtaggagagtccaataaggactgtaattacaaggaagagaagaagaagaagatgggtctcaaatttttgcttaagcttgagaattcaaagattttaatgggttcaaaaaccaggatgagattgtggatgataagggcttttacgactgtttttctctgggcttgtgttgttcagttaatgatgtttggggagctatggggaccaaaactgttgaaagattggccttcttgttttactacttatcaggatttgcctttggctaatacttatttgtcttctattccacccaaaactgtttacccaccaaagagtgagtttctgatttcaaacacagaatttttctttacttagtaagctcaaaatctcaattgggtttcttctcttgtgtttcagggatttacaggaacaatggttatctcatggtctcctgcaatggaggacttaaccaaatgagggcagcggtgagaaaattagctacttttataatgattatggacacttcatttccattttctgaaaccacattgttatttatttgtgcattttctgcagatatgtgatatggttgctattgccagatacctgaatgtcactctaattgttccagaactagacaaagcctccttttgggcagacccaaggtgggttgggttggttttatctttgtacatttccatagtttctttcttcaaactggtattaaattgcttaagcttttcttaagagtgaatcccttgttttttgcagtgagtttaaagatatatttgatgttgaccatttcatctcttccttaagagatgaagtaagaatattgaaagaattgccgccaagggtcaagagaagagttgaattgaaaatgttttactctttgccaccagttagttggtccaactattcctactatgttcaccaggttggtgcaaaaagatagaacacttcacttgcttgtgaccttttttcttcttcttcatatttttcctgaatattgaaactaatttccaaattttggttcaacagattcttcctctggtgaaaaagtacaaagttgttcatctgaacaaaacagattctaggcttgcaaataatggcttgcctactcaacttcagaagctaagatgccgagtgaatttcaatgctctgaggttcacttctcagatagaagatttgggcagaagggtcgttaggatattgagagaaaagggtccttttctagttcttcatctcaggtatgaaatggacatgttgtctttctctggctgcgcgcatggttgccgccccgaggagatggaagagctcacaagaatgaggtaatcttggtccctatctagcttctaatacttacactcttacataacctttttatgaccaaatcttatcttatgaaatttctgcatgattttcagatataataatccattgtggaaagaaaaagctataaattcagagttaaagaggaaagaagggctgtgtccattaacaccagaagagacagcactagtgttgaaagctattggtattgatcgtaatgttcaaatttatattgctgctggagaaatttatggtggagaaagaaggatggcaagtttgaaggctgcttttcctaacttggtcagtagacaaaaacataagatcaataaccttttttatatatatatatttataaattacagagccataaaatttatatttttttatggagcaggtaagaaaagagactctgctggagccctctgatttgaggtttttccagaaccattcttcacaaatggcagcactagattatttggtctccctggaaagtgacatatttgtgcccacttatgatggaaacatggctaaagttgttgaaggccatcgcaggtattatatataatacatattatgattctctatattattaatattattacattttttgttcttgatatcataaaactttgatctgaagtcaagtattttatacaactacagattcttaggtttcaaaaggactattttattggacagaaagcttgtgattggtttaatagatcagtacaaaagtggctcattgaattgggatgacttctctttgattgttaagaaagctcatactgatagaatggggaatccaagtaaaagagtagctataccagataggcctaaagaagaaggttacttctactcaaatccacatgagtgtttgcaattgatagatgatgatacattattattgaaaa

SEQ ID NO: 187623 - DNA, 5705 bp, Cannabis indica
aaaaaaaaacaacaacttagtggcaaatttttaggtgcatgaattttattgcaataatcattttccacgtataaggaagaactaaatcatacgcaatatttttgtttaatatatatatttttaaaaaaaatatgcatgttcacgattaaaggaaatggatattaaatataatgaccaatccactaaatcgattggttttgagttagtataatttataaatagtcaaacatatcccgaaatttggtagagatgataaaataaaaattagtcgcatcatgtcgcttttagtgcatgaacatttttgaaaatttattagttaaattagcttgtgtattgaaatagtttcaagataaattgaaaataattaatatagtttagaaacctatttgcatgttctcttattttggaaacaagatccttatatagtggatcacaacctcattttcatgtgctaaggacaactcttgtttttccaacccaagttcaaaaatcgtttggtaattttctacgaacataccaaacatttatttattttatttatttagaactagaaaagatcaagaccaatattaaatataataaatagaaattcatatattctgttaattttaattaatatatttaattttgtaaatagcagtattttttttttttaaaaaaaagaataacaactctattaattaattagcttcaactataacaatagataaaacaacagtctctcacggaaaatacgatttgaatagaaataagagtcgctagcaatatagtgagccatattatttaccgaacgtttaacaaaaattcaatgaatagacttcaaatagtctaacaaacccttatactcctgaaccatgcacctgactaaacaaagatggcatgtgaatggcactatgcacggtttgaacatcaactaagaaatatgtctcaagttgaacatcaagttaccttttccttttgatctaacctaaggcctctttgattccaataacctccataaaaaaagcctgagcctgcccatggaaactcgttgaaaagccttacaaaatagtgccaaaactatcacgagttactactcccacactaaacttcccttctgacactaaaagtgctctgttgccattaaccttaatcttattcacattctgtttaatctagtgctcaagtctattattctacttcatcgcgtgagagaacgaccccattctattatattgagcatgttgccattaattaaggaccactcttgccaagagaataacttctaatatcgtagtcgtcttatcttgccacaccacatcattacaaacgttccaaattgcccacgctaccatatcaagttcttcacccatactagtaactttcttctaagtaactcgaccaaaccagtcccacccacttctttgatgctaacatcagactgcatccaatatgcacgagcaaacaaataagaaaccagtagatggaaactgtttcatcctcatgtcggcacattggacataaaataagaaaccacacacgcttagacacaactgaacctgagtagccaagcctccagataaagcatgccaaagaaattgttgtacctatagagacaccttcaaattccaaactatctttgaaatggccatattctcattactcgccaccaaagaatttagattatgcagaaacttataggcttctttaactggataaagccctttgatatcacgagactaaaactagaaatttgaggcaaccgattgactaatttgagtattcaaaattaaatccctatcccaaggattgaatagatcttctacaatcttcctatcccaaactctcctaccaacctccataagactatcgaccgagacatcatccataccaatgaaatcaaaagtaataaatggattgttattattagggagccacgaatctcgcaaaatatttattgacgagccagacccaaccagtcgtctaacccttactttgattaaacattgcattttaaaaatgctcttctaaataaagttgggactatcctcaagggaagcattaagaaaagtccctcgaggataataacgagttttagaaacgcgactcaccaacaaagagtcattagtaaccattctccaagcttgtttcccaacataaaaagaataaaatcctgtaaatgtcgaaaaccaacacctccatggttgcttgcatgactccagattcttgcagggagtgatgtcgactttgctgaaaccatacataagtttcttacatgactccagattcttgtagggacaaacccattcttcctagggtctatttgaaaatgctatctaatgattcttcattgttaatcatcacattttccaccatcatgaaaaccttgctaatgagtgggtcattatttggttgatcgaagatgtgattaatgtctgttgttgttgggaactagacagactacctattgttgtaaggaactagacaggcaggtcgaaaactgaaggttggcgcagaggttgctttagttttgatgttgttgccccaatattagtttcttagtgactggggagaagctttgaagtttatttgttgaagctaattgctagcagcaagatagaccactatcgaggtgtagtggattattgcttgtgctcttggtgttcaagcatcagttcactttatcatcataagtaaaatgaatctctatcgaagagtagtgcgaaaaaacccaccaaatcttttgtataagggaaaaatcataggttgttaaagaaccttacttgataatttcaactcatagaatcttgttaaaggcttaaaagaaaaaactgcaagggaggaaaaagaaaaagatagattggactgaaccaaagctaagtacaatgtcccatatttatgtggagtttagccattaaaagaataccaaaactaggatagcgtcccactcccagagggttttcttcaagcaattagaaaatctctgctggatgtagcgtcctgcttccagagagttttctataattgatatttctttctttttcttctttttgatatttgtgatccatagaggaacacttgcattagcactttagatttataattcattcattatattcttgtgtgacctcaaccgtttatatcataatagtgcttaactctggcgtgtaaatagtctgtatgtgtggttgatcaacttaatgaacttatcaatactggcactaacacttcaggattaagaaactcgattactagggataatgtaaacgtttaattaaactatagaaatactaacttaggtgtgtaaatttttttgaatgcccttgcaactcctggctcgcgtagaccaaggtgtatgtgccccccaaataataaaagaagcgccttcattagtcacttgccataccaaattctgttgtttcttgatcatgaatcttgaggagatgtcgcatgtagagcattcgaccactcatccagagattcatggctttgcaatgtttactcactaaagaaataactgaagttactcaagaccaactccaacaaactttactcagtgcttgggagcatcgtcaggtctgtgaactgtaattgattaataacaatgaagtaccaataagctttattcaacacttttattcatgtgatataaaatacaattacataggttgaggggggttgcgcacctctagctaatttggataaaattgaaacaacacttataggtttacaattttatcaaagaagctaagttgatccccactaaactgatgttctatttagctaatagtgtaagggccataacttggcgatggaccccttagcttaagatgactttgctgcatatttttggctcaagaggcaatcgattcacttccacaaggtaaaatgaatctcactgtgaagagaacgttctacggaacagttgctttactattaatatcatctcaaacgctccccgttccagtaccctagcaccaacaacagattcaagtggtagtcatagcaggctccatcttgtttgtcttaggttctaacgcttttgtgacgatatagggtccccccccccctcctctcattggaagtcttcaatgtcactttctaggtcaatatcttcaaaagactcataagtcacatgcatcttcactattgctcccctattcttaatcattgttggaaatagagggagaatcttcgtcactaccctcctgtcccaagttttcttgggaagtaaggtgagattcttcgtcaatgttatcctgctcgagatcatcttaagaaaaagcatgggacttgtcatcactatctccctactcgagttcatgttgggaaataaaagatgagtatgtttcagtagaggcattcaatgttgattcttcttcactttcctggtcaatgtctatttgagacttaggaaatagataagcaatataattggttgcttctggttgagaaactcctctaaccttcttgacggtctcttcgagcttgatgaaatcatctgttctatctagaaactcatgaatggtgtttattgatttgagtttcaagtctttctataatggactcataatagttaatacaacaaccatcaccatgagcttggcatcttcactgagtatctttgtctatgttgtcgcctctaagaattgttgtaagtaatcctctagaggcttgtcttcttgcttcttaatgcatacataatcaccgggttcgattggtctgtaccttgatgaggagaattgatcatagaatgcttatttaagtgtttcccaagaatttatagatcctggagaaatcttgagataccactgttgtgctatttctgatagcatggctggaaggattcaacatcgagaagcatctcatacgccttgtaggttagattgtactttaaaattgtgtacgtgagaaagagaatcttctttaccagtgtatggctgccacactagatttttgaactttgaagggatcttcaaagccgtaactcaatctgagagatgtcaacttcattcccattctagctcaaactcagttgccttcggatttgtgatgctttttaccaaggcattaagagtatcaaattcggccctatagacatcacgtgtggtgatgtgtgtatcacttgtccacttctttttggtgtcgcttcgcaagttcctttgtctttcaaatcgatcaaagacattgattgatccaggtcttgtggttattgcatggtcgtgtggccttgctagaacctgtggggatttatcctatataatgatagagtcatctctctaatgtttgctccatgagcggctgctcgtggtactatactgagtgaaatagtcttcctcagagtggcatgagtggagggaatttaactgattgatcaagttcaacatgtctctatgcacccatgtgaagtatttttcctgctagccatcaggacctcagtcgaagtacctacaccaagcatctcgttcttcacaaaaataattttcgagtgtagagtagtttgctggtcttcactctctgaatcttatacccttcactttcttcgtaaagcttccaagtccctctcccaaggttaactgcaggtccctttccctttgtagggtcatggggtggcctagagtcattagacctgtgaagagaatcccacagaggagattagtttcccacattattcaaatttcttcaagcagaattacggttggtcctatcaattgcgtgtggtgggc

SEQ ID NO: 187624 - DNA, 1147 bp, Cannabis indica
aaaggtgcacccacaactcctttgtcaattaaaaatttggtggagaggcagttctgggtttgcttggtttttccttctgcacttttttatttttgtgttttgtgatgcattctttgttttctttctatgcttttcttggagccttggtggtgcattcaattactgaagtgccagtgtttgttcaggatggtatgcaactcagtctctctttgtttatcttttactgtcccagttaagattttggtgatattgacagagcagatgtcatgtctctttaatggcttatggagatattgtctattttcaagggtatagatagaaaggatgtcagaattgtttgccattttaacattccaaagtcaatggaagccttctatcaagagtcaggtagagctggtcgtgatcaactactctccaaaagtttgttgtactacggaatagatgatcgcaaaagaatggttagtataataacttgcaatatatcatttctacaatgctttgtatattcaacaaagctttgtgccttgttaactatctgttttgcaggaatttattctgaggaatgcagagggtaaaaagtcaaaggcttccaatgcccaggaaggcttgtcgaaaaagtctctgacggacttccaccaggttattctcaatttcctaaaggtctgaatggacctctctctgtatatatttgaccactctcaaattcaaatactgcagatggtagagtattgtgaaagttctggatgccgcaggaaaaaaattcttgagagtttcggtgaacaggtatgataaatcacttaattttggatgctaaaccttattttgaacaagattcaaaagctcaaagttagctctaacattccaatacaggtaagtgcatcattgtgtaagaagtcatgtgattgttgcaaacatccaaatctagttgcgaagtatttggaggagcttacgaccactagtgttcttaggaacaaaggtggttcctctcaaatttttatgagcaggtgaatcttcatatagtgcctatctagtactgcactattaattccgctttactaattgtgatttagtatgaggtgcaccctataaattcagatgtcagcgcctttgatttgagctgcaataattacttggttagacagccata

SEQ ID NO: 187625 - DNA, 1421 bp, Cannabis indica
ttactccaataacaatttacaacctatcttcattagaagacctgattttcctatctgtaattgatctcaaattataaacatatatttcaccattttttttcacatcaacagccaacaactgaacaaaaataacaaaaaaaaaaaatgctacagacttgtaaaccagtcgacatctgcttgttggattttttttttttggccagttacaaatcactctattcttcacagtttcttttgtggcatgaaccacgtgatcttaaataattttaattatagagttataattttcagtattatatatatatttgtcatggtgattaaaatcactcataaatttatcccattctcgaactaaaatagttcatcatctaataaaaaaatatactttgtcaaaccatggactgctaaatatatatatatctaagtattattattataatatttttaatgtcataccgtacttttcaggtttgtcgtatgacgtatttttcgggctagtttatttgtgcttacgtgttgcacctttcgttcttctcatgtcgtaaggacatatttttcgtggcgctatatcgtattaatttatagtatcgtgctgtgttgtgtctaaatttgtattttttgtgtttagtcgtactcgtgtaaatttcatgtcgatcatatcaaaaagctcaactcatatttatatatcgcactaatcttatatagtggtatttattaaaaaatttcgatatatatgtatatatatacgcataaaatgaataaattgaatatacgcataaataaattacagtgataatatttgatttgtaaattaatcaattaattgattaaaatattcttattaatgattatttttaattcgttatcttatttaattttttaaattaattgtcaaaatatttcgataattaatttgttataaatattgattgagtatttaacttataaatataggatatccccacctaattactataaaaaaaatagtaattgaattctatgagagttttgaaagttccaatatccacactaacgtaagattttgtttcttttgtagatgcaaagatcgtgggatctaataatcttaaagaatcaatgactagtagtattttcaatcctttaattacatatttaagttttatatatgtttaaatttcatttcacatttatcatataattcatatcgttcatatatatatttcatgttttacattataaattctaacagtattgtaatagcagtaaaaaattcaaacattaattaagaatcaataagttatagtacccaacattattatgatgtgacattttatgaatatgatttaacagtttttcgtaatagttaatcttatattgtggttgtattgatcaacatcactgatattatttaacagtttttaatctatttaatgatgtctttt

SEQ ID NO: 187626 - DNA, 1731 bp, Cannabis indica
tcaaggataatttttctagagttttttcctatgtgttttgctggctttcccctttgcatgaaaaatagagggggtatttataggcttaagtgatggatgttggtcgcccacaaaccacctagagtatctgcttaaatctcactattggggtaaattacatacactgtatgactgtggttgataccgtcggtagcatcatgcctgtgcgtctagcaacaacataatggggacaaccttgtactgcttggacacatgtctctcaaaggtctaacccttaaaagcaaagaacacatttcatttaaagctggttccttttttgggtagaagtctgtattgttctgcttggaacaagatggtggcgatgtgcgcaataccatgctctatcgtggggaacagatcagattctgtcaggaaaaatgtaattgtcgttgatgacatgtcatatggtggaaaaggttgacatccgcgttcacccatgagtgggttagtgtctgggtctagtgtcactagaacgtattcaggaacttcccaaagtggtcctcctcgttaggcgcttccgaatacaagtggggagctcttatcccgctcttcaagaagcataggccaccgtaagtaatgttccacacgtcttctctcattgttggccctaggttcggggagatctttcaatgtccatccgtctttaaaagactaacttgtggaagttcaattgagcctttttccataaaagtgccacgtgtcatgtcttgtgtaaaatacgaataacaataacaatatggcaggaccacaatggacagttgtcctaattgtcaaaggcaaagattctgctatatcatgagatcatttcgttattgtgcaccagcaagggaattttctattcctcatcaaattagaaccggtatatgtctacacaaaactagtacaaccaatgtatcgaaaagaattacaaagttttatataacgtttccaactactctttatctttcctactcaatttcatactactcaaaaagtctaacctattacaaatattacggactaaaactttaaaagtaaactaaatagttggttacaaatcacattgtttgtagcctgccaaagataatacatcgtggattcatggctgtaatgacacttaagaagaccttccttaagtttctcctttaatatgtaacaaaaaaatttgctccgtgtagagtctagtctccttgtagactgagatttttttcctgtatactgagctttatacccttttcccattgggttttcgtgtgtatcttgatcctgcaagagtgctttctcctggttttctctactccattttaattgtgttctctggttggttgtttgtgtcggatgggaaaggatatacatgtggaagttgtagatgatgaaatgaacaaagtgcttcaacgtgacagcgaacttgaaatggagatgctagaactatttgaggacgttactttggaagatattgtatctaacaaggcgtgcgtggggaaagttataggctgaaaggatatgcttgcatcaatggtgaagaagattctcttgggagtgtggcagaggctgggcccctagaggatgaagaaatgttaagatggagttctagggttcttctttgaggaagaacaagactactcttatgtcttggataaaaggccttggctggtgaatggggtgctattgaaccttaaaccatggcaagcggagggaaaagttcgaggtagt

SEQ ID NO: 187627 - DNA, 1513 bp, Cannabis indica
tattttttatgtataaaaaaaatcataatttaccagagagactatactatatattaagctatatatgactccatctagagcataatttacttattttaaattaataaggaactattatgtactaatttattgttcttgttttcaagaatagaagaatgaatattatttcattaattagttctgtttttcatagtgtcaaatatgaaaattacaactgaagatgcacaattaagtactgaatccctcaataaaaataatgacgagaaaaagaaaattaaaaaaacgattaacaagatcattatagttcgtaatattcaacacttcatttctatctattttggacaatatttaaccctttattaattagtttattaattagtataaattgtaagttcttaacggaaattaaaaaaaaaaaatatatgcggaacagaaaattgataatcaaattagacgagaacacaaaacgtgccatataataatgactacccaaataacattgacaaaattaccaaactcatccttattaattattactacaatcatcgtatatataataatatattcattgctaaataattttttcaaaagattctgtgacgtatcaaaataaaataataatataaatgaactgtagagggacattacatgttaatataaattaactcataatcaaactgtatacaaaacccagaataagaagaaatccagatatatttgaattgagaaaacatattcatattgatatacatagtaataataatatgaaattaataattcctttcatcacaaatacattcatagtgatctcacctatttgaaatggggtttgggccacttggaacttcatgtgcactggcactaaaagcacgtttctgccatgttggaaatggtcctgatcttcttcgttgatcaacggccatggtcgcctttgaaacaccttgccttgttgagaataagggttttgaatttccaatgccatattgtcttctcgtagcaaagtccttcacattgtttggtcttttctgcatgatctcgtcattgatgagtgggctactactactactaccactagcattgtttttgaaagccacaaccggatggaataaaataactaaaattactgaaaataaaatagaaatacaagatagagttgaagaagatgagattgtttgatcacttgccatatatatatgcatgaaaatatgtttataaagtaattacataagatgctaatttagatcaaaatcagtaatcaaagataaggcctatagctacggtttttgtgataaacaaatgaagataggtttgtctttgctatatttaatctcaagaatctaagaatgacaattgggatgagaattaaggagtgactggatttttattagatgtttatagcatgatagggtttataggcgtacctttaactaaagaagtatagagagagagagagagagagagagagagagagagagagagagagagagagagagagagagagagagagagagag

SEQ ID NO: 187628 - DNA, 1814 bp, Cannabis indica
agctttttgatagtttcacatgcaaagtttaaggcatcataacttggtctatgtgcgcgcctataaacaattatagccatatattgcaccttcccaatactaacagaagtggcaataaactgtttacggcaatatttttacaatcttattcatatattgtattctaattttacaatcttattcatatcgtattctgtttttacaatcttattcataataggaaagtataggtttttcaaatgtaaaagctattgcaactggttagaaatataatattgtcgccaaattctagtttatataatgtggaatttgaaatttgttatcttattctgatttttattgttgtaacatatctattcttatttttgctagttgctaccgtataatctgaaattttagtgataaaaattgataacattgtgattttctttgactaataaaatgatacttttatttgaaagcaagtaatacttttatctgaaaaaggaggaataaaatagtactttggcaatgtatatctgatcttattttttcactcaattaggtgaagtgcaagatccaaacattaccccaaacaccacctcaagcttgagtttgttgaagaaggtaaaaaaatatttgatgaatattgaatatagttctttcttttatcatttatcatgtttattaatttataattatttgagttttcttttttaattgtagacaataaatttgatgtaagggatcatcaccaaaagagaaggaagataagactattgaaagtgtgagatttgctagtaattttttttttttttgaaatggaccaagctcagtaatttagtcatcgtcagttcacatattttgatgggaaaaaaaaataaaacgaatacaaatggagacgaatttttagctgaacgggatatgagttagacctgggcttgggccataatcatagcataggcacatgccacattgacttacaataaaacgaaattcactttctgctatgtgatcctttaggcttactatttacgaatcaatggaattgccactcaccatatcgaaagtaggagcagaaggagcctctgttgattcttccagaaaggaagattcttttgtcgtcctcggccatagctctagccagaaaaagtaggacacaagcatgatttgtctttttatttttcataaattggtttgagttgatatttttttaaggaagattaaaacttattttaacttaacattattaaaaaccgcagcagaagcagtagtgctaatacttgttactacgaaggagaacgtcttacttggcttctccaatccattcaaaggttttatttctctctatttttttctttctcttttgagtttttctcaacaacgttatgtgtgtacggattaactctgcagaaagatagagttggtcagagctgatgcttctttacctgagaagatatggttcaaggttagcttcattcattcgtctctctctgtggttctatcgctctcttgttatgtttgtctttgagtttcttatcaatttggtttggcagcaacaattctcaattggggtcaatgaagttctcgtgtccttgaacgcatggccatgcctcacaactctaccacaaagattcagcttcaggttcattgtctctttctttagtttagttttgtttaccagtcaattctagcgagtaataacacactaataaattagaatataggcattgcttgttgcttctgactccaaccccagatggcttaccaagcatctccctagcctggccttgtcaaggaaggtaccactattcattctcaaagacacaaacaag

SEQ ID NO: 187629 - DNA, 2173 bp, Cannabis indica
aaaataaaataaaaataattttattttttatataaaacacaccgaaatcaatgttagtgaatttcaaccttcttttttacgggaattaactctataatgatggtcttgagggccctgcttatgcaatagtattctgactcataaaaggccatgtttggaattttatggttacttggactgatgacaacggcagcgccacggggggtgttgatgatatcattagtaggactaggaatttggctgtcacacatgaggaagattaatgggaagaaaatacagaagaagttgtgaaatttggagagaaagtgttagttgggagagtgattgcccgaagggagatgaatgagcgactgtataaaagtatcttttctagaatgtggaaaaaggcaggtgattggaatgtgaagatttttggaatggatggggaacattcatttgtgaaaattaagttcgctgattggaaggacttgaaatggtgcttgaaaaacaaccatggcttttcaatggtgggattttaatactggaaaattggtctgaatcgggtcagtgggaagatgctcgtcttgatcaggttttctattgggtgtgaatgagaggcttccctctaaaaatctttaccaagaacaatgtacattgtataggggagcaagtaggggaagttttagagatacactggtctactactcaacaagttttctttgtgggacatgtccgtcttagaattggatttcctattaaggaaagtatctttgttgggatattcatccctgttgggggaaaaagaactggattcagataaagtttgatcgttttccattgttatgctacagttgtggtatctagggacatgaacaaggggtctttcatgtgacacaagaaatggaggcagatgaagaggttcatttagttccttgctgtggctcttggcttaatgaagatgacacaatcccaaactattttgttgctcaccaataataacaacttcatggttcactaaggcagaatctacctagaaccgagatgaattatcaacaagaggtcgagaaactagttgagagccatcgtcaaaactctgagttagagatacatggccgaagtgctcatgaactcacgacagtgaagctgactgctaaatcgaaaaccaccatctccggtgagatcatggaaatagttgaaccagagggcacggttgaaaaatcctccacgattgtggttgaaaacgtgggcatggaagttactaatgagttagtacacgggcccacaattaatacaagtgccaacatggatattgaggttctttaatttaggcccaaaatacccatcactgagaaacgcaccacgaaccagtcagggagtaatgagctagagggatggacaaaagttaagaaacaaaaatgtacccagggcattacgaaagcaagttgtagagatggtagtaattcaagggtgcttgatggtgctgtaatcgacatagcaaaccaaggtaaggttaaaaataatggtgttactggttttgctgtcggggttgaggggaatgatacccatactttgaataagagtaatggtcagaggaaacaagtctctctcaaatcaaaagctcggggccacaaaggaaatcaaatcaatgctgaaactgggtgtggcacgattgatagtcggaatggttcaaagaatggaagtttatctgtggttggttcttcttctgaggttggtatttctatttcactggatttattatctcaattatctaattttgaagcagcgagccgtgccgagcaacgccgccaagagcaatgaaaatccttagttagaatgtctaaggaattagaaatccttggacattgcaaacttttcaatcccatatttgggactttgcccgaatattgattttttagctgaaagtaagttaaccaagtttcaagctgagaggttgtgttctgtgttacagtttgagaatttatagagtgtggataggattggccttagtggtgggctattacttctttggcatgatattattcaggtgcaagtggactccagctcccttagacatatcatggctgtggtggctggggaatggttccctccctgaagtttgacttgttctatcctaacacttcacaaagagagttcttgtgggaattatgccgcaacattagagatgctattgttg

SEQ ID NO: 187630 - DNA, 1283 bp, Cannabis indica
tgaaactacaaagcttataaaaaatgcttctttgatggtgttgggtaaaaatggttttggtaagtctgtcttttttgttttgttgttcatttaccaagttttcttcaaattgaattgaatgcttttgtgtacatagtgccaaaccttttttttttacttttgttgaatctgaaactacaaagggttatataaaaagcttgtcttttttacttatcatgtgtatagaaaaatttcatgcccttttgagattttgatggtattgaacgaatggtttttgatctttcaatatgtgttatgtgtttgatgattgataatagtagtagagggaatgtgggattgtaaattatcatcataaagttgtgaactttgaggaacaatgaaactccaaagcttataaaaaaaatgcttcttgtttttgggtaagtctttagtttacctccttaaagagatgtttttggtagactttttatctattttggtatttagcagaattttttagtttaattttgtttttatgatcgtatacgttatagttatttaacattatttgtaaatttttaaatgtttaaggtttaagtattttgttatgtgcagtaagtaattgaactttattttagcaatgcaaattattcaaaaaaaaaattaaaaatttactgttgattctaaatacacacaatttatgcatcatgacaaaaaaaataaactaaatttctttctgaatgtccaaataaatagggatcaatcaaaacccaataaagatgggtgtattttaccttattacaagcaaaaagttatttcttcaaattcttggccttttgagattttgatggtattggttaaaaatggttttaggtattttagtctgtattttgtgtttgatggtggagcccaatcaaatgtgatgagcttctgaaatatcatcataaagatgaagactttgagataaatcccatgtgggggatctgagtaataacatgaatgaatccaatgggaattgatgaaagaaatagaaaagtattttcttagtctttcaatgtattggaaaaatctttatattacatctttttcatcaatgtctgcctaactaataatacaattttgtctcacaatgtaatataaaatattatttagatagttttactcaattttgatagggtcatttacattcatgtggatggtaatttcttccccttttcctttacattggtcaaagtttttgttggatctgttcaactctgattataaactggtttatgacattctgtcttctagatgtccatttc

SEQ ID NO: 187631 - DNA, 4555 bp, Cannabis indica
ttagaaagactgggtctggatgtaagatctccgcaaaattcttcatgtatttcatgcacaacaatgcttatctcagttccagctaagcaccttaagtatgacattgataatcctcttatgtacagcttttcatccataatcacatatctgggcgctaggtattggatcttctacgaagcggatctgtcttctgggagtgtgcttaattctagatacttgagtattggggccatccaaaaagttgagtgatcaatggctgacacccccagcatctttgtgcttggagtatgtagatgtgcgatggggactagtctgtatttctccacttttggatttgttatcaatttagctagcatgtctgcgaatgcatttttatccctgaggaattgcttcacgggatagtgcttaaaatgttgtaatagctccctagtttttgctacgtaactagccatcttttctcctttcatctagtgctctccagacacttggttgaaaaccagctgcaaatcactatactactcgatattcttggtgccaacctctttagcaattgcaagccaacaatcataacctcatgttcatcttcattgttggaggcttcaaattcaaatcgaagtgcactttagttgaagttgttgaggagaaattagaatgattccgtgacttcaaaaaggccttggacttcgtaataaagaacaccatgtgtagataggacttccacataaaatagtgtccgataatggaaagtagtttgacagtgatcaattcactaacttttgtgttaagcacgaaatcaccaaaaaaatttagttgtggctagactttaagcaaatggacaagtggaagttgtaaacaagattttgaagacaaccttaaaaaagaggcttcaagcttgccaagcaaactagtcgaaagaacttccaagggttctttgggcctacaaaataactaaaagaactttaacaggccatactccgtactctatgacatatggatgcgaagtagtaatcctagttgaatccatagtgccttcacactagagagaaacttacgagcctactcgaaaccatgctttacttcaagagtctttggacctaactgaagaacttcaagagcagtcacaagttcaactccaaatgtaccaaaacaagatcgcaagaaacttcaattccaaagtcaaaagtaggagatttggaattggtgatctagttttgagaagggtatttccagcctctcaggagccaggagtgggggccttaggaccaaactcggaaggtccatatgaagttcaagataaaatatgtgatggcacctatcacttgggaaggcatactaggagacatgaaatgtacatcggtatatagcaaaaggaagaaaacgagaggtgaaatccaagaaaataagaaaccctgacttgttgtattaaagtccaagttgagtgtgggaactctcttcagtgggaagccataagtgtagaaccagtagtctcgtaagtcatgtgtatacttcgtggaactaatggggcaggctacactcttggaatggcgcttcggcctatagaaacccaccttttccgtatgacccctcatgggcagggatttaatcttgtagaagtacaagatctcctctggcgttggtacaaatttattgtgctaagaacaaaggacacaccatcctgacaaagaccgtatacctgagggatgaattagaatggtgccactttggctgtggcacagaaattggtaaagtaacacctcaatggaaggtgtgcgcccatctccacatggccctagctctggaagtcgaagcccccatccgcgcacttacttagcctctccccgtgaatggagagtctattctagtacactcctggaacacttttgagccctcgtttggtctcatacttccttaagttattataaattttaaacttattgatgtgttggtccatctctcatggactatcattaagaaccaattttggagcatcctcttgctctagaacatcctcttctatttcaacctcatcttgttggatcctcttagacatagtctctataaaaaggagaaaaaaccaagcattcagctacccaaactacctaatatagaaaaggagcaaggaagtcctcccccataaactgcttagagaggtcccaattaaacttaccatccagactaaaaaaccttcatgggtcattcattccagatggaaagtcaggaacaatgaaaagagggaatggaataaaaatcaataaaatgcccaaaaccagaaggattttgggcatgggaaagttttaccaaaacttctgctacaaaatggataataccataaattcctaacaaggaaacctaaaagcaaaacaacttacaatgcctaaatctaccaatgatatcaaatcacacaatcagaaaatcctaatttcattcagagcagaacatgcgaatacaatgtataacagtaaacccagttaaaaaacaagaaaatgaatcgatacataccttatagtggaagcgaaggcgccaagatgatcgtcgttgagtttggttaagggagttgagcacacctttagcgaagacaacgggcaagggtgatcaacgaatcaatctctgtgttgaaatctcgaattgtaactttttcttgcgtgatattttccttcactgggggttcaaaatctagaaattattgagccctaatccttaacagatgttagatgcaaaagttgacatcacggtccagatcaatttaatttgttgggctcttggttcagttttaactcccaaaggatgtagagtaaactcaaagttttaaaagtttaaagatttgaaattggggaaaaagtggtaactgaagtttgtaaagggtatttatacccaatatggcaatccatgtgaggaggagggaatgatccatgatcctatctccaaaagcacaactatatccaacagttggggacttcaacagtcaaagcatatcaccacagttaatgctctctggaatcaaggtgcagatcaatgatgaagatgttattctttaatttttgcaccaaaaagtgaatagtcatcaaaataaaagctttcctagaaagtaactattcgataaacgtgcttctaccactagacgactgccacatagacatatcacgtccaaagatagaagtcaccttccatgatcgaccaacaccttgagagttatatacaatattacttcttaccctccacatgtccacactaatagaatgaaacaagcttccaccatacacaacattttggaagcttagaggtaaatgttattagtgattctagcaagggacatgtggaacctaggtcagcatcaaagtcccaccagtggatcccaaggaagacaatttgggccaaccccaagttatatacaaaggaccttccaggaacgtacattatttctgtgatcagatgatcttccgctagtgacaatctgtatatggaaaaatctatagtagcatgatgtcgaaagagagacagtgggttcttgaaagactaatctattattcctttttatacatgtgcatatataaggaaataaaagcttcccagatctcaataaaagatcgtatcaagctaaaaggagacacctcctaaacaagatcaagcaattaattcacgattaattgcccataattataagacacaactttatctatttcaactatatctaattttcctagttagcagatcatctccttcgtgggctggatttcacaagacaacctaagttatgtaattcaatgtaaactccccaatagaaaaaaaaaaaaaaaaactaaatgtaattctcttaaataaatacccaatatccttcgagggttgaactctcttgcaatattgctacaagaaaacttgagagcctaggctcattgtattcccagagtactttctagcttaagttacataataatattgactcgtggactaaggctcgttaacgcccaaccacgtaaaaattatttgtattgttcttactttttctcttttagttatttattacttcaattctaattatttataattagttttctaaaaattttagtaaacaaggattaattactagtgaggttaaactattaatgattttgccgcaattaactctatatatttttgaaacataaaaagtaatcagttaccttttactttgatttttagaagtattataattttaataagattcttctattttaaccattcccccttatgactactaaagtcacttttggtgtcggttcgagagtcacttaattttaaaaacttaaaaccaaagatcaacctatctctttagtgttggttataaactgacaccaaaaagtacttaatagtgtcagttagtagagcgacacaaaaagaataaccgacagtccaaataaaaaataaaaaataaaaaataaaattaacaacttctttgatgtcatttctaaattgacacttaaccgaaatttcaaaggttagaaaatcttttaagtgtcagtttagaactgacactgaaaaggttcaaaatttacttcaaatatatacatatacacataca

SEQ ID NO: 187632 - DNA, 4297 bp, Cannabis indica
ggccaatttaagcaaaaacaattcatgtttctttaaattactaacaaatcagattggatttaaaaattaaatacaatctgcttgccacaaaataaataaatacaatctgctatttgataaaaacatttaacatatttatttaataaaagtactctatatttatatataaaatgtattctatattaacaaaagttgttgaagatcaccaaatacaactactatttcacctagctcttgaaaaatgagacattttgatagattatatgccaaatatgaacgttgataaaaagttaggagctaaaatatatttcaagggcaagactcgtcttatttctttttctatattaatttatatcagataaaatgatacccaaaaaaaaaaaaaaaatgaaagtgtcgaagtataaatatcttgaagttaagggttcaaaatgaaattagagcaataacctaattacataacctatatagccaactttcttgtcccaccaagtactccataaattttggaaaatacgctcactgctccaagcttggaagcaaactcttcttctccttccagaaaagtaacgttctcgaaccttaggcttttcaaaatcatattttagttttctaattctcttgtttctcttggtcaatcaaaaaaaccaatttatgttagtgcagttctctttcatgccatttaaattttgtctatctgaaactctatagatagtattacttcttctttcttagtattcatattcattattaataagatccgttgattttgaggcttgtttcaaataaacttggtgtcaagctatatcaaaatacatatcattttcaacttgtaagaatcaaataaagttaaaacttgtgagtttcatcattttcatttgttttacagaactttacgaagtgttttctctttgtatctgccactggtttatgagcataatgaagttatatgcttttgtttttttcttgtcgattattctttgaaaggaccgtgtttgttttgtaattgcaaatatatttatatacatatttggacttattagtttcctattgtgctttttggttacctataaaaaactctgatcatttttgcaatgttctgtactcttataggtgaaggtgcaaatcattatcaatagcttgaactaatctgatttaagttcgaaatataaggttggattgatcatggtatccagtcttgtttcaaaaactaaacctctgagcatggcattggctagaatgagtagaagtagcctaagaagatcagaaggtgcaattcaaaacatgttcaatgaggaacaacataaacaaaagtattccttacctttcattccaaatgccaccgcacaaggaaaattctcatacttttctagcattaaaagggaaaatcatatgagcttgtggagtaggggaataagggtcaccccatattaccaaaatcctacagcagagagaattgtagaggaatcagattcagagtatgaggcaacaacaacaacaacaaccaagtatccaggactcgaagcaacaaggccaagcgaaaagccgagggtggttgtccttggcactggttgggcggcttgtcgattcctcaaaggactggacacaaatatttatgatgtcgtttgcatatcacctagaaatcacatggttttcactcctttgcttgcttcaacatgtgttggaacattggaatttcgctcggttgctgaacctgttagtcgaattcagtctgcattggcctccaatccaaattcttatttttacttggcttcttgcagtggcgttgatacagaaaaacatgaggtgagttgagtgagtgttatttcaaactatgtatcataaattgagatggagatcatgtcatgtatgataaagatcaaaagggttgatggagttgtgtgttgaaggtgtattgtgagacggttagcaacggtggattgtcaaatgagccttatcgtttcaaagtggcttatgacaagctcgtcattgcttcaggagctgcgcccttgacatttggtatcaatggtgtggaggaacatgcttttttccttcgtgaagtaaatcatgctcaagaaattaggaagaagctcctcttgaaccttatgctttctgaaaatccaggtgagctgtcatctctacataataatttaaaagtttttgtttttgttctgttctagcatcagaagctcttttctttctattaaaaacataattaatgtattgcaggaatatctgaagaggaaaagaaaagacttcttcactgtgttgtgattggtggtggtcctacgggggtggaatttagtggtgaattgagtgattttataatgagagatgttcgagagaggtatagccatgttaaggacgacgtcaaagtaacccttattgaggtacttaacaatgttcatgacttctttcttttatattttataaactagtatatatactataagagcaggaaatgtgaggtccttgacttatactccttccacaggcaaatgaaatactatcgtcctttgatgtggggctaagacaatatgcaacgaaccacttgaccaaagttagtttgaattaccttgatatctttcttgatcatatttctttgaatttagtatgatgacatttggaatatttctttcttttcagtctggtgttcgcctaatgcgtggtgtggtgaaagaagtacatcagaaaaagatagttctcaacgatggaactgatgttccttatgggctcttggtgtggtcaacaggcgttggaccatcaaactttgtgaaatcacttcatcttcccaactcccctggtggaaggtactaatatataccataaatcctcttgtagttgttacaatcaatatgttaagtatgttactaactctttgttgattcttaaaggattggtgtggaccagtggttgagggtgccttcagcggaagatgtgtttgcaatgggagactgtgctggtttccttgaacagacgggaaggccagtacttccagctttagcccaggttaggattcttcttgtctccagtcccactctgaaaatactgtaatttggccttttggtttggatattttggaaaaatgatcactaaaaaatactgcaaagtgagaggtgttttgagatggatacttatgtatcattgtaagaccaactttgaagaatcattatacaacaatccaagccttagatttaaccagattcacattgttttcatctgaacaggttgcagaacgacaggggaaatttcttgtggagttgtttaacaaaattgggaagcagaatggtgggaaggccttctctgctaatgacattccatttggggacccttttgtgtatagacaccttggaagtatggccacagttggaagatataaggctctggttgatctacgacagtctaaggtaatatcattattagaaatccaatcttcatagagtttatgtacgatgtcatttggagagggttttggccttaatttgatttgcctttgttggcaggatgcaaagggtatctcccttgctggcttccttagctggtttatttggcgctctgcctatcttacacgtgtcatcagctggaggaacaggctttacgtggcagtgaactgggctaccacgctagtgtttggcagagacaactccagaatcggttaaacgagctttgtacatagtaatagtagtatactacttgtaattgtattgtattgaattctgaatcaagttatgtggttcatgaattttgatatcttaatcacgcaaactcatttctcttgtcctggaaatttacttatctagatgtggaaagttttttagcaaaattagtcagcgcagtgtagttgaaatgttgaattaaatttgaatgacgaagttataaacaaagtactaagtttataccttaaaacactttaaaaaagctaatacaggattgcagcacaaaagatatgatatttataacctcaattgaattagttcaaatggtctaaaggcacaaagatcaaatattacaagacttattaatacacattaattatttaagattcatacaatctcaaaccaagttatgaaaactaacacaaattaacaatcatctaaattttgtaactttttaaaaagtaaataaaacccagaaggcagatttcttgtgattcattcaaatttcaaacaaaccgaatttggattcacatatgttacactataacaagaaaaggggtcacagatctggatataacattaagaacacaacacacacaatttcatcactaacaattagaaaaagatgaaactttagaagg

SEQ ID NO: 187633 - DNA, 1592 bp, Cannabis indica
catttattagttaacgaaaaattagctttaacagttttgtgcttttattgagagccttgtattaaaaaaaacacacctcccactagggatgttcgcggtgcgggtggtgcaatttttgactatttttttaaatcaacctgcacatgcggttttttttaatttctcaaaccgcacccgcaccgcgaaaccaaaaaaactgcaaaaactgtaccgccaaaaatggtacggtacggtgtgatgcagtttatgcgatttgtgtgatttggactatcactaaataattaaaatatcacaaatacaacaaagcttgagcaacacttataaaaaatacaataagattatttgaaaataaatatgaaaaaaaaaagtttcaagtttacacaatacaataattagtgggtttaggttgagccttcacatattggacctaaataaatataaaaattggtatttttatattatgcggtgcggtgcattttgaaccgcatattaacaattcaaaactgcaaaccgcaccgcaacgcgcggtttaagaaaaattcaaaccgcaactgcaccgtaaagaatttcaaaccacattttttttgcagtgtggtgcgatgtgagcggtttgagcgatttgaacagtttgatgaacactcctacctcccacagataacattcaagtcttttcttttttccatccatggaaactacttctcaagaggacaacaatcaaccaatggaaataactcagcgtcttggaagaaccgtgaggaacccagggaacgaacactattgagatcccacattcagagagaagaaatattgaatagggatttaaacgaactaatgatgagatccccaaaaggcaaagccaggatgcatacaattcgatgagatatgtacttttaagggaattgcaaaatagacaacttcgacagagattggcaaaatcaaatcgaaaaaatgttgaattggaatgtgaggtcgctgctataagagcagcacgtgatatgccttagagtcaaccaaatacatccacaaggtagcctcgaggaaggcccagaggatcgagaaccagaagaactaaggaagcccctgctaaagaaaatgtccaagaaaatctcacaaaaccatggattacaaagaatattctagctaatggacaaagaatatccacaggatcctagaaatactaagaccaggaaaacttgacctgacgatcgagagccctctcgtggtaacatgaatcataataattcatgatctgatgatccaaagtcatcttgcgaatacatatgccagacaagtgcgacatgatagctagagattcactcacagaattccgagtaatccaagggaacaacatgggtcaagacgacctctaagacatccatggggtccaaatcaaattgaaagggatagtatgtatacctacatgagaagagatcgtgtctcaaatctatttcagaggtgcaggcctacccaagaagatcctcaagagacagaatcaagtactatccgaagtgggtctaggacatgggttcaaagtagatcaagcaggtcacaagccaaggtgcggaaaaaataaagggaaggaactaattgac

SEQ ID NO: 187634 - DNA, 1073 bp, Cannabis indica
ggaagttgataaacttactctcttgaaagtttctggccttttcctctggattcgtgttcttattgacgtatctaaatctattactcgaggtatccttgtggacttcaaaagtattcatcgtgagaagtggctaaatttcaaatatgaaaactttcccaatatctgctatcattgtggaatgttcgatcacacacttactaagtgtatcacctatcttaagaaatgtgatgatcattctttcccatcatctcttccctacaaaattcctcttaaggcttctgccaagtcaaccttcaaaaggaaccctttcgatctgtccaactcttttccctttgatgaacttacttctcatcaggaaaatgtggaccaatcccttgctgcagccgttagccaatttcttactactgaagagattggtaccgggtcttttgttgctgtttcttttggaaccacggctgagtttgatcatgggcctatttccttgaatgctccttaaaattcctctccatccaactaggctacttttatctatggtggtgaaatccgttctgctgtcctctgtgacttgcctgtcacgactcctcagcatgctgctattattactagtgagtgaagtaatgagggtgctactacagagggccttctcccccgaatttctgaaaaggccaaaggtaaggttgttgctggtgctaagagagctgcctttcttcctctaactacggtggttggtgactctcttcggaatattctcaaacgtgctcgagctggacccactattgctaaagtttcttctgctttcaacaattcattggaacaggcgggtgttgcggagcaaccccgcccagaaaaatgaattttttgagttggaatgctcaaggtttggggagttctcgagcattccgtaacctctccctttttgtgaaaaactataggcctaattttctttttttatggagaccaaatgtgctgttggccgtggagaaagtttgtgtcgcagtcttccttttgatcatgtttttgaggtcccaagaataggcttaggtgggggtcttttggttttatggacttcggat

SEQ ID NO: 187635 - DNA, 5476 bp, Cannabis indica
tgacccagataaccaaccaaatattaatttcaacaatatcaatatgaatgggcagagtgagaggccgaacacgacggacggcgtcgaccatggcagtggagataagcaacccaataatggtaatacaaatggggaattgatatctgttcctaggggcggacctctttacattcccaatttggtgagtccactcaccagtgttcgtcactttcagtcttgtcttctccttgaacttcaggtacatgttttcaccactgtctttgttctgtataatataatgggttcaattaattttaagggtttcttcttcttcttcttttgttaatcctttttctagaatttagaggccgagctcagtttggatgcaacatcagttgaagaagatatttcgtatgtttccattctcattcttgtgtttttttttcctttttttaaagagtaagtattgattgaattgctttattggccatttcactgtgcagagtggatgaacttaaaattttcactgatgaagagttagtggatatggcaatgaaggaagcatttaaggttcgttacaaattattttgttcttcctcctaaagctctgaaaaaactatttttatgttttctcagtttcccaattcagagtttggtaacttttatggtggtgaatgatttgtaggaaggtgaagatgtggaaaagccttcaacagtagtagccagggtctccaacaaagagttagtcacctaataccataatatcttttttatgttcataactcgtgtagacctgcacaagatatacttctttaagttactaactaattgtgaattctgaaattgaaaagatgttacgttagtttgtggatttcaagttctatggatgaaaattaaagtcctgtatttcctaattctggctcatgtgctacagtttcgttatctgatttgttcattatgcaacatgatcagtttggttcaaatttttaatctttattctaccatgttaaattggtaggtttagtctgagtaatttagtatatgtttttggcttttatccagaaaagaagatgatcaggaaatttttaaaggaaaaaatgggtcctttgaaaattctgtaaacaatacagctaataccgcggagaatgagatgatggacgaaaggagcttaaggaaaagcaaaaggataatggcaaacaatcacgcaaacgaggcacagttctgtacaaatgataaaaatgggtgttcagaagtttctgtgattgataccactgaagatgattgcaatggggtaacgggtggaaggagcttaaggaaaagagaaggaaagacaacacaagatcatgtggataaggtacagttagaacaagaagatgatcacccacggcccaacagtgagataataagcaaaaggaaaataacaaaaagaaaaagaagcatggcaaagaatcgcgctgataaggtacactttccttataatttattggtatggtatttattcttcctgatttatggcattgcctggtaaaatttgaaatcagccattggtcttaataaactagtctctctaattttattttcatttctaaacttggtgtctgagcgacatccttgtctataaaggtgatcacactggtcatcctgttatttttttaaaatatgtttgtgtgttcttgaagctacagctttcttaaatttaaagatataacagttttttttccttcagtcttattaaagaaagaataattattcaaattagctccccacccctatttctcactcagaggaggaaaaattgtttttcagtcatatgattcagaatcctgtgtgttatgattgattaccttatgggtatttctgtttatatataaataattattataatcagatttactaacttcaccgtcaccttgtcaggaggtgtacattgctaaggtacaagaacttgcaaaaataaaacagaagcaggatgaagataaagcatcagtgaggctgcactcattcaagttcgtagtatgactttaaaattcatttaattatttcttactttactttactaataaaattcatttgtttttctctagtcacaattgcagaccaattgacgtctaccactccttcctttgagaaatctgaaaggctgaagcccctcaggtctgcagctgcaggaactaggtttgctcttacgagtttttgtttatttgctctttctgttcaaattttggttgtttcatttttgcaatatttactcaggtcccaccgacacccttctgaatcatacatttagaatcccctgtagcaggatcccacatggaccaagtatgagattagttagtagtatacaactacttgggcactctcctctcttaggctagctgttgggagtgagttctacccacccggttgtatcaccaaatttactcccatgatcattaactatctatttaattaatgatagattttttttttgcttaattaatgatagattatataaagctggatttatatttggcaccttaagtaattgaattttgtggctgagctgaaagaactgaattctaatagatttttcattagtacttcaaaataattatggattctgatgaaaatcacctggctgttgatattttaatattctttgtagtttacagtatttgcttctagtaaattcgattgtgcctcaatttatggatttttttcttttaaaaaaaaatcttttgtgcaagttcctgcttgaattcttcttttaccttcaccattttgaatgggagttatccccatatatggacgtggttggcttgatcattctaactctgcttctgtgttgaaagtctctttccttaccatgaatgttaaccctgtaatttgattgaaattacctcttggactattctgaccattgaaagttcttagttctcatacttttctatgccttaatgcaaagcaggtgaggtcatcgggttatcatgaatatgttcatttgggtcatccagaaattgttctttccattgaggtataccataacaaaaaaagatggataaaggtatatcattttttcaacccacgacctcagtcaaaatgaattctggaaaatcaatacacaaagcttttgcttgtagtacacgtatattttatatttcttttacaatgatctttttcattgaaaatgtagaaaggtttttgcttctatagcagtgaaaatatgaatgagatatgctcacgaacaatttattttgtattataccatgtgtgtttttgttttttttttttatcattagcacagttggtgctcttgctgtttatccttgtaactctttccccaaacttgctgagcctgatattgctgtgaaattgtgtgaagacccaggaattcttggtcgtaggacagcaagctttgactgaactgagagataaaatctactgcgtaacagaccatgttatgcaaaaggcggggcagtatgatccttcaggatattttctcatagaggtaaactctgtgtattccattcttttttcatgaagctgttttatttgatcactaaacctaacaaaatacttctgtttgcaggatgttttctgcaatgatttgagggatccatttgcaatagattatagcgaacccgtatttgattggctaagaaacaatgaggaagaagttaacaaaaaatgggattgcatcattactggagagttgcaacaaaagcagaaggcagttattggcaatgttactgtctcgcaactcccccatttcaaagcagtagacatgcaaaagacacgtttttgtgatttaaaatttcgggttggcaacggatatctgtactgccatcaggtaaatatcactttgagttgtggtttttaatatcaaattttttgacatctctcctctctcaacatctatgcttggtttcttattagactgctctcgcatttatgtctactgaaatctattcggtttggcgattttggtttgtgcagggagactgcaagcatacaatagtcatacgagacatgaggcttcttcatcaggaggacgtgcaaaaccaggcagcttatccaattgtcatatttcaactcaaacctcgtgtgcaaaaatgctttgtttgtaatatttatagagctacaaaggtgactgcagatgacaaatgggctcaagggaatccttgctatttttgtgagaattgttattaccttctgcactacaaggatggttctctgatgtatagtgacttctcagtatatgattatctgcatgactaattactttgtcaaatagaatcacaatgtaggagattattttgggaactggcatcattaagacaatttttaagttaatgttgttgcaaagaatatgaaaggcataaaatattgcttggtcaaggtaatgttcattaaacttatgtatcagcctgcttaaaaaaaaaaagaagccatgtcaaagcactagagtttttgaattaattgccttattaagatggtaagtattctccgaaatatgattgattcatacaaaaccattacagctgtagcaatggtatccacttctacatctaattaattacctcatacaagatgataacctctaacttcttctaaccctcagctacaaacataaatttgtgggaaagtaaaatgacagaaagggaaaaaaacattgttactctatgatacaaaaaacacttggcttattagatccactcctttgggttgatgcatgcatccaataatttccactcttcacttccttcttctggtttctgtaaatcagaaaacaaagcctcttttaacttggagactcaaaaatatactataatttgaagtgagaatacaatttgcttacatgatcatattcccaccgagctgtgagaggaagagaaacaagaatactctctatcctacctcctgtcttcagtccaaatgttgtgccacgatcatagaccttcgatttgaaaaagaacatataaataggacctcaattaaacatatttgtatataatacttttatcatcctcaaaagctcttttccataccaaattgaattcaacatagcggcccctccgcaattgttgccatgccttgtgcttatcattaaatggtgtatcctttcttttttctatgatgggtatgtatgcaggaataacagagttcgcacattctgcaaagttcaggaaaaagtgcacgaaaggaagttatacagaattagtacatgcttttttaagaatgcaaaatgttcaacaaatgtagatcaattaccagttgcaaatgaaagaagcatctcttgatcataatcatttagatcatcgaaaaatattcctccaagaccacgcctctcacctcgatgctgcacacagaaatgaacataaaatatacggctaagcaatgatcataatttttaacatttcaaattatagatggtagaaagccagttaatttggactacgaaactgttttttttcaatacaagagaaaaagaaagcaactatattcctactcgttcctt

SEQ ID NO: 187636 - DNA, 3671 bp, Cannabis indica
taggtagttaattacaattttttaatatttttcaataaaaagctctagtgtgctgtaagttatgttaaatttaatagatattaaaaatgagattaaattgtgctaaatttcacacacagtaaatactactttttaattatacttttgtcattaatgaaatactttaatacatacatttattgataatattgtcattagtaatttttttaaatatttaatttattgttggtcattaatgatattttttttaaaactaatttacctttaaaatgttattgtgcattggagcaacataataaatattgtgctaaatataaagtttgtccattttttgtgccaaatttagcacaatatttacattttgcattggagatggtcttataatattagtgattttaagcccattccttattttaatgtggtctgtaaaactatcactaaaattctttgtggctggttataagctccattcttccaagtcttattgcaaaaattaagggggtttttttcatggtcaatgcattggccataacatactcatttgtcaagatttggttaaacattacggtaaattcttctttttgcatgattaaaatgaatcttaaaaagcttataatacggtagattgggagttcataaaagaaatgatggtggctcttaagtttttggattcgttaattcaccttgtgatggagtgtctgatcacacctcggttctctctattttttaatggtattctttagtctttttgttgctaagagagaacttagacaaagaaatcctttgtcccccctctttatcgttattggaaaggagtatttatctcgtttaatctcaaaaatgactaataggaaaggctttggctaccacttgagatgtaagtctaccaacttaatcacctttcttttactgatgttcttctcttctcaaaggtggacatttagtcggttatgttgttgctaagagtctttaagcgcctctcagatacttcaggcttgcaagctaatagaagtaaaacaaccatttattgctcccgtatgtctaattttgatgtgcaattcataattgatagctttggtttcattcttatcagtgtattaggtgtatcgatttttgcatctcgaatttctaaagcagagtaagatttaataattgaaaaaatggtagctcgaatcagaatttggagttcaaagcatatttcttatgcgagcagatggatcttgataaactatatatgttttaatggctattcacatatattgggcacaaattataattttgtctaaacatattcttggaaaaattaatagtatttgcaggtcttttcttggggaaggtgatgctaattttttagggccaagacatcttgcttggaaatatatttgccaacctaaaaatgaaggtggacttggctttagagacattgagcgatggaatgtgggttctctacaaaccattagaaaagataatctttaagttcgttggttgcattctgtgtacattaaaactcaagattgatgctctacaaacctctaactggtattgaaaaaaaattgtgatgataaagaatttgattaaaagcaaaatagctttaaaggagttcactagcttgcaatttagcatcacagacatttggtattgtatgtaatagaataaaacttttattattttgaccaaattactttttactctttactcttcaataatattatttgttagggaaggtttgatagggcaaagtgaacttttgttagtatgaaattagcttttaagtcttttatggcaaacaagtaaattcttagtttagataaattgtaattcatttggaatgatctttgaagttataacaaacaaaccgtacttgattggatctcttaaagaataacaaatctattctaatacattgatcatgtgacccaaaacaccacctaaagttaaacaaaaaataccacctaagaaaactgtaatatcactaaatattcgaattaatattgcccctaatactctcatcataactattaattaaccattcttagatggtaataaagactaaagatgttataattagtggcacaaacgcatggtaataaaaagtgatacatgaaaagtggactggtttgtcgtttgaattgactaggatatcacaaaaatattttgtgataatgatgatgatgaactaatcatggagtcaactatagtacatttttattttttagataagggaaatgtccatgcgccacaaaagaaagaagaggtgtgataatcccactaataaatataagctagagttagtaagttttgatccacaaacaaagtaatagtgtacttttaatataaaatactaaaaaaaaggaacaatattagtgtgatgatatgactatgagttaataaataaataattaagaagcaggtaattgggtggggtgagggtgttggagagcaccaaatggataaaaacagaaaaaggtggggttgtggaataattgatgttcattcactcatcccactaaattggttttttgtggttgatttcaaaagaaaaataaaaatggtgtttggttttgcggaagcaaataaatatggcatagcattacataacaacttattatctatcaatcaaactccatctttaatttatagctcttttgtttgtattacgctgcttggcttcacctgcccactccttcatatttctctttaactatacctcacacactctagttttctcattacaacctcagtttttgtaaatttggccgacactcttttttttttttttaactgctctaacccatgccactaaatattaaagggctctttgttttaatagtttgggtaggtgcgaataagaatgttgagttttttttttcttggttatttggcacctacatgcttcttttagtatgttttcactattccttgtacacttgagtttcaaataaataaaatagtaaatattgtattttgtaacaattattaattgaattttttattttgttaaatgataaaatagactctatattttccaaaatgataaaaataagaccctagattcatttttcaataattttattttttgatataaccaattttaagataatttttaacacgaacagatacaaaaaaatgtaactagttttgtcataacatctctagatcagtttattattaagtttaattttgacaaaaaattaatttaatatcatatttgtacaattttttttaaaaaaaaacatggtctattttgtcatttaacaaaacagataatctaattaataatttttataaaatacagtatccaaaatgatattttgattgaatgaagtaaatcacttgtagaccgccatctagtgattttctttctcttttcttccccaaataaattgcattattttatttttaaaaaaatatatttcacattttgatgtaattgtcaaaaatgacttgataaaatattaataacatttttttttagtatgtttcaatattttatgtgcatgcatttatctctttcatcattctctttcattttgttattttttaaaataatttatggccaggttgttattcggttattctaaaaaatatatcattattatctagtatttaatgtgaacatcttaagatgtgtaaaacatataatttttcgttatttttagaaaaaaaaaaaa

SEQ ID NO: 187637 - DNA, 4984 bp, Cannabis indica
atctttgagtcttttcttgcttcattgattgaatcggtttacattgttccaattcaattagagttgattacagctgaatcttgtttcatttctattatccatgtgtgtggaattagttttatattgtggggagattgatattttagcattatcattagttttgagattttcagtagtggaggtttagcctattgtggacttttgcaacatttcttgtgtggttgtgtaccagattcgaatagattgtttaataatttagaacttggtggtagttagtctgactttaatcttttacaacaattgtatgtttaaagtttaatgattttgttgaattgatttgagaatttgaagtagtgttgttccaattcaattagagttgattacagctgaattttgttcgatttccattattcatgtatgtggaattatttcatattgtggggagattattttttagtattatcattagtgtgatattgtggcaacactatttgtgtggttgtgtaccagatttgaatagattgtttaatgatcagatagtctgactttaatcttttacgataattgtatgcttaaagttaatgattttgttgaattgatttgacaatttcaaggatttttgttgataagttatgcccacgatgatgtgcttaatgttctttaagttttgattatgatgttttttgttgtactctttacaggtctgatactctcttctctttagcattttaataatttgtgctgatatatttcggtaaagaagttgtgggacgacaaggttaactggtggctttggctggtgtttttcacaaattatgtctttgtgaaatgtgattttattgtttagtacttaagaggtactgaatattatttttaactgaggaactgggaacctgcgtaaatgatgagaggacgatctgatggaacgcaaaagaagcgtttaattacttctctttgcgtagtggcaatctttctttgtttcctatatgcatattatggatccatctttggctctcaaagtcatggtgcatctgcaatagaatatggtagcagatctttgagaaaacttggatacttgggtggggatgatggctctgatgacaagcaggaatcattagtaaaagtttttgatggagatgatcgtattacaccaaagagttaccctgtaagctctctcctccaaaacccatcttatttttgtagaaatcgagatttaacctgaaagattttaagtttttgtgctgacaaattttgctttgcctactttaaggtttgtgatggtcgacattcggaattaatcccatgcttagatagaaatctcatataccagatgagattgaagctggatctgtctttgatggagcactatgaacggcattgccctcctccagagcggaagttcaattgcttgattcctcctccaccagggtacaaggtaatgatgtagtaaagttaagttgtaggtcttctgtgaaaaaaatgttaagatggagtaaatatctaatgttcaatacttttcttgctgtttagatcccaatcaagtggccaaaaagcagagaccaagtgtggaaagcaaacatacctcacactcaccttgctcatgagaaatcagaccaaaactggatggttgtgaaaggtgaaaagatagagttcccgggtggaggcacacattttcactatggagctgataagtacattgcgttaattgcaaatgtaagactatcgatcgtttcttttatctacatatattacttaaggattgagtagctgtgttttacttagaatacatatgatttgaaattgcagatgctcaacttttcaaacaatgttttgaacaatggaggaagattaagaacagttcttgatgttggctgcggagttgcaagttttggagcataccttctttcatctgacatcattgcaatgtccttggcaccaaatgacgtgcatcaaaaccaaatccaatttgctctagagagaggaattcctgcttatcttggtgttttagggaccaagagacttccgtatccaagcagatcttttgagcttgcacattgttcccgttgtagaattgattggcttcaaagagatgggattcttcttctcgagctcgataggttgctgagacctggaggttattttgcctactcttctcccgaagcctatgcgcaagatgaagaggatctaaggatatggaaagagatgagtgatcttgtgggtcgcatgtgctggagaatagctgcaaagaagaatcaaactgtcatttggcaaaaaccactaacaaatgactgttataagcaacgggcacctggtactttgccgcctctatgcaaaactgatgaagatccagatgcaacttggggtgtctcgatggaagcttgcattacgccgtactcagaccgtgagtaatttctcctaattatttattcttgtctgtttctagttgtttgacatattttcaacaccaaaaataggtatgattgtattattcagagctacttgcaatcttattgtgattgttatgtttcgaaaattgaaatgataattgtcattttaatattttcatatctacttgatagttgatagtaccaatcagcttactcatcaacattcgggcatcggttttcattgcagttgtacaaccaccttgtgatagtgtatgaaatatgaatctctgtttgtcctttcagatgatgataaagttaagggcagtggattagctccttggccagcaagattgactgcccctcctccacgacttgctgattttggctattcaaatgatatgtttgaaaaggacacggtaaataaattgtgaatgttgcaacacatgttctagattattgtaatgcggttttaataaacacccttgtgttgtgtaggaaatttggcgacgaagagtggagagttattgggatttattgagtccaaagattgaatcaaacacactgaggaacataatggacatgaaagcaaacatggggtcgtttgcagctgctctcaaggctaaggatgtttgggtgatgaatgttgtccccgaagatggcccgaacacacttaagctcatatatgacagaggtcttataggctctatccataactggtatgccaattttagttgctaaaaaacataaactcataatgcaaaagaatcaacttctcattcatattcacattactgggttggttttatttttacaggtgtgaagcctactcaacataccctcgaacctacgatttgctccatgcttggactgtgttctctgacatggagaaaaaggattgcagtcccgaggatctgctgattgagatcgatcgtatactcaggccaactggtttcttaatcatccgagacaaacaatcggtggtagattttgtgaagaagcatctaacagcactacattgggaagcagtggcaacgggtgattctagttcagattcggagcaagacgtaggagacgaggctgtttttgttatccaaaagaaaatatggctgaccagtgaaagtgtcagggatacagaataagaataacaagaaagaatacaaaccaacaaaactaccctcaattgctttgctttcttacaaaaacaatgtcaattccattttgtagcattaaaaggatgtttttttttcccttctatttcattgttataatgattttttattacttgaaagctatatagaccagtactatactactctactaccatcatcatcagcatcatctataggttattcttcagattttcagttttagacatgttttgaagttaatgtaagctactcagtctatgaaatatgaatttaatcattcaaaaatatatacatctatatgtgtgttgctgaattgctgaattagttatataagaagcataggaaatcttgtaatgtcagaactcattaaagagactgttattattaatgaatacaatctatcgtgatatcgaaaacaaactaatttgaaatccccattgtgtaaatttttacttttgtaataatactaataagatctcaaatcttcaatcttataaaaagaaaaagaaacccaaagatcaaatttttaaaaacaagagaattgagatgtgttaatgatactaattatagtaatttgttccaaccaaattgaatagaggagattctacaaaatccatatttcctaatgaaatggttggtttgttattagaaagagagaaagaaaaacataaatttgagaaaaaaagagagatttttataagaaaggtgtaagaaaaaaggttggatttttgggagaaaatgaagtaccgttacgcgatggtgtgttcgtcgaaccagaatcgaagcatggaggctcacgccctcctcaaaaggcaaggcttcgacgtctgttcttacggtaccggtgcccatgtcaagctcccgggtccttccctccgagaacccaatgtctacgatttcggaactccatacaagcagatgtacgacgatcttcgccgcaaagatcccgaattgtaataaatatccattctttctttctttcccctaattattttccctaaatctttttaggtttttttttctttgtttgtaatttcttcttcttgtattcaggtataagcgtaatgggattttgccaatgcttaagagaaacgcaggtgtcaaaacggcaccccagagatggcagaacaacgctgctgatggctgctttgatgtcgttttctcctttgaggaaaaggtttttgatatggtcattgaaggtattgtatttgctatgaattgggatgttgttcatttttttttaccaattgccattgttatgattccttttccaagtttctattttgagctagtttgatgataatgtagacctttagtttagagtttaggctgtgtataagatcttagtgtgtttagttctatggagttagccatcattacctgttggtatcgtctagaacttaataatacattgtcttggacgcgagatagctcaaatggtcaggcatg

SEQ ID NO: 187638 - DNA, 4252 bp, Cannabis indica
gtgaattttcattagcttaccaaagttcatgtagtagtacaggtaaaggtctagcatttagtttagtggaaaataggagtagactcagagtcagagggagcttatttttttttttttttggttctgacatgatcatgcttgtctttataagtgaactgttttaatctattacatattatgaaataaaatgctagacccgattttatttctttcatttattttctattgcagtatttggagtgataaacttagttgaacacgtgcttatattaaactgatttggcaagtattagcgaatattgataatgttatgtaccccaaaagtaattgaaatggaaaagtagttggttcaccattttcatgatatggcttctctcttttaatatccatgctgcttgacaaatgtaattttctctttaatcttgttggatttattgggttcatttatgaattgtggatcttagctgggaagttgaagatgagaactgttcgagcactgcctgacaaggctttgttgaattacactgtaattactattttagacaagacattattttattgatgttctagtaagtaattcgagattttactcttatctgtgttgtgtgagctttggtagtatctctatttagctttcaaaggttttgagattgatacatcaaaggatggtaatttggatgacaataatgatgttcctatggaagaaaatcaggtgaacggtcgtgcatttgttcgtttattctttccacttcttagtaaaatttaataatgcagttttctttcaagtagaaccttgcatgaagtgcctttttattcattaggcctaacattcacttgaattttcactactctcaggacacaaattaggtagtaggccaggatctgaatgaaagtactttggatctgagcttgggattgaatgctcacgacagcaatcacaattcaaaagctgatcacatagattgctagttgaaagagtgaagtttactgtattgtacctaatggagattggaagccttgcctcattttttgatcatttagattagttgcccatagatttcttctgccccacttatatgccgagtatcatttgtagtttctattgctgagtcatttgtcatacattactcattctttagcactgaacaatcgatttttttagcttcttgaaattagctggtactgctggacgtactggactttacatgagtgtaatgacattaactattaatttactattcacatatctttgttaatatatattatgaatcaacaatggctctgccatttacgcaccgttttgtgctgaaaatgtaccaagaaaaccatatcaaggcacttacgaagttttctgcatgtaaaatatgctcccaaaacaaatattttattagatatgaggaggctcttgaatattcaaattgccacaaaattctcaatagtttaattttaaacagcagaaagaagtgtaaggaatgaaacgtaggtaatatcaaatatttaacacccttccccattccaacaatgggatatacgaagttaaaaattacaaacaaaagaagcgacttgttacccctatatcatagttcggcatatttatcgtcatcattcttttgcaataacagcttctggttcagaggagtaatcatgcctgcattaccaccaaaaaaaaaattcattgtgaattatatggccacatttcaggtcatgttcaggtaaaatatacatcaactcgataaatcgcgctattacacaactcagtaaccataacattcggaagagataggcaccaatgtttaatcattaataaacttttaatctcgtcagctcttcacataggcctgactggttcacaattgacgaatcatatacttaaaactatgtataagtggtgagacaaacccaacaaaggaaacagtataacctcttcaagttttatacaaaaacaaaatgaacttactgcactttgcgataaagttggtagagtcctgtcccagccattgcaacgtttacactaaaaagattccagtttttctgcattccaaagattaccaaaattcgaagtattaagtaaatatcagtccataaaattttccataacaaacataatcctgaagaagaaacagaaataacaaacttaatatttgtgttcgatatgattgatgctagaaagagaagggatgctggggactataacatttaagcactctaaaagaaaataactgttctgttccctcaaccaagtgcagtgtgtaattagtagctactttcattcgtccacataacatataaatagcttacaggtttacaaaaaaagctcatttaagaaaactcaagatggtccaaaacagaaaagaacaaactgacatgtgattccagcataaatatccaatttcttcagagtgacttgctaataatttttcttttttaaattgttcacaatattcccaagtcaatgacaatccaacaaaataacagtttgtttagcaaaggcgtgcttagtaacataagatgtagaaatataaccaccctcttttatttgcttactaaagtcttacttattataatatgtagaatggtattggattggactaagaaaaataattcatactaattataaatttaacaatattagcttatgaggaattaagttggatacaaaatcataaatcttttgtctaacaatgtatatgaagatgagaaaatgggtagaatagaattattccaaatttattgatcgacagaattatctcatagtagaagttttttgagattttacttatcccctccaattacataactgaatcacaaaagaaaaatcatcctatctaatactacttccgaaatatgacctaagaagtttaatgaaatactcaaacaaaggtcaaactaacagtatgtcctctaaaataaccaacacaaagaaatcaaacttaccggggtgatgacagtgctgtaacgtgaccagacgattccagtgcaagcaaccgctagaaaacaaagagagtgaaaacttactctgttacaccattgtagcatcatatgaagatttgaaaacttaaatcagtaaatggaaatcagttttctcggccacccacatatgtgtctgcaagtgctttatcagcatcggattgaaacaatctataagcaactgagtaagaacatacctatctgttggggataagaaagcttttcaggtggtttagagaagtcagcaacattagctatgctgattccccatttaaatgtcggtgcccaaaagtgaactgcattgagcaagcaatcaatcaatacataaatcaccacaactttgtcattcaatacatatgacaccacatcttgttgtcataatatgagtatacaatcttgtaaactacttagacgattgaatttttcactatatgccaggcttgccaactgagtctattgtacaaaaaccattcaaatggacaacattctcacatattatgaaaaattccaaccacatattgaatattcaattaaaaaaaattaattttgcgatcaagcagtgaaagctagtccaatcaatcaattcatacaaaagtaaaaaactaatattatttctttccatttttttggaagaacacaacctactttgcataataattacccaaaaaagcaacatgtttgtgaggtggggttccttgttaaatatatcatcccaaagaacaatttggggttaaaatttgaccattttccccaaacccacaaggatttccccacccccactaaaaattaggcgagtattaaacctaactttccagtgccactgcgaatgagatccgtgtcaggagaaaatcataagtaattcggtagaaatatatttcaagagtgaatattccaaatcaataattgattgaatgaaaacatagataataaagaatattcgaactcactagttttagggccagcggggtggttccagagcgcttggagcttcgaagtcgccatgaatactaactcgcctttgccctttcttcgcaaaccccaacttcctctacttgctcacaattcctacctactctcttcccccaattgaaatttgccacgtcgcctataacagcgctactacagcttttctcatcatgatgtcgtttgtcccaattaatgtcgctttttacgaatgtcgttcccaaaaatttgtccatgaaaattcccaagacacatatatctttgaaattcttttaggtgaagtctttttcgaaactttggtcaaaaaaaaaaaaaaaaaaaa

SEQ ID NO: 187639 - DNA, 3263 bp, Cannabis indica
ctgtctcttgcttctgagtaagatggagggctgtttataatgctgggtttttcggaagtggcttgtacacttccaccattagtgttatgcagatgaatgtcttgttgtggaatttccgaaatagatacagcatgattttgtttggtaggccttggagggccttgagaaccatttgaaagaaaagcagaaacaacttctgagttgccaactgaagtcccatcagtcagcaaattttgggggtcacgcaagaggcctgctacactttttcccccttgctcacttgtttggttagcaaggctctttaaaagatgtgataacagatcctgctccgtactttggtcaggtttattggctgcacaaagttaaagtcactcagctcaacatgaatttagaaaaccaaagaaagcagaatataaagtatcaaaggatcaagtgaattcatagtgttggagaaaaagttaaaaaagtcttctttgacaacatgattagttcatccttcgtttgatcaaacatcactcataccttagaccaattaagactgctaatctcttattcataaattttaattcacttaaaggtcatcatatgagtcttatctagaagatttgatatttgagagcaaaatcacaattcacaaggcaaaaaaaaaaaacgactgggtcaatttatatacaatgactaagcagaacaaatgagtagtgtagctgggacattaattcattggaacctactatcatgcttccacattgcaaacaagataagtgcgaggagatatcaaccacacaaacaaacaaacaaatcccacagtgaatcacatcctcgtaattggttggggtgggtggtgcgtaaagtctacattttgggggttttgataagaaagtctacttacagtgcatgttagacaatatcctcagtagacttattaacagatagccactagtttgatcatcacttagtgaatttccattagcagcagtatcaggatttgtcttccttctccgtttgttgtgaccagctaatcgtctacgacaacttctcttcccttcatcgaactcttgaagggcatgaaacctggcaaaagattgattgtttatatgatattcagaacacaaacaatcaaagtaatcaataaagaaagaagaagaagaaactcaccgactacactgttgacaaaatcgctgcataacgttccccacaagcgccttaacagccttggaatgcatttcacaaaccttgtgtcttctatggtagtccttggcattagtcagatcagctccgcaatcctccacctgacaaatcgcacgacttgaagtaccaccgacgaacttggtcttcttaccactgtttccttcccaattcaccatctccctttcagaagcctgctgatgaagatgatgaccacgtcctccgagcattagcgttagattacccgttccatcgttcaaattctcgtcttccaccgtattatcccttctccgcttctccaattccctcttccctttctcaatcaccagattcccctcgtcagagcaagaagaagaagtgttggagttgcaggaacctccggccgggaaaaactgcctacccataccctccgacggcaccgccggattgacggaactagcaataaaaaggtccccatcccatttccattgattcaaatcccactccatggtcctcttccttacagtagtcaaatccgcagagctcatcccgaagaaatgacgaggctcgcccccaaatctagcctccatggatgaaaaccacaagtaaaccaaaaagatccaaatccaacaattgaaattccactcaagaatattagaagagctaaagaacaacacagatcggagctgagagaggcctgtgcaacaaaaatcaaggactaaataggcctaatcagcttcggttcttccccaaaagtagagaaagtgtatagcaacgcaaccatgattccaattaaggtcgacacacatagaagaatctcaactcagctcagctcagctcagctagtagaacaacaacatagacacaattagacgaaacctcgtcctgttcagctctaaaacatagcaaaatacacatcaaattggcacagtaataagcacctaaatctgaattcgagagagagagagagagagagagagcagtaccagatgatgagaaagagaaaatcgatggccgccggaagaaggtgacagtttccgatgttgatgatgatgatgatgatgatgattatgacagtgacagtggtgatgatgggaaatgtgaattgtggtggtgcgtgtcgtgggtgtggttgtgtgtgtggttgagtttgggatgtatgtatgggtatgtaatgtaatgtaactatgtactatatgatatctaacatccattcactccaatcatcctcctcccctctacttactcaccctgtaatctattacgtatattctacagtaaataaaattacaatataatttattcattcaatacaataaaaataaataattacaatataacgaagccgtcgtcagctcatacaaacagcgcagctcaaactctaactcactctcggctccaccccacccaactcaaaattaaattaaattaaattggtaaagtaatataagagtaattctctattataggactgtttttttgttacgctctgattcagtcttgaaaaaagaaataaaattcaaatatttttttgttacactagtttttgccaattattcaaatatgtatttgtaagtaattatataattatattttattttaaaatataaactgttgttaaaaatagcacattttacaattttatatattttatattaattaattacaaaatatgtaaaaaaaaaaaaattattactattttttcatacattttttatacggttaaaaaaatagcattttttttataaaatatatatggtaataattatttaccacaataccttgcctctattagattctacaattttagccatagtaatataatcatatattttagtttgtttcttttttttttttttttttttagttaatattaacttcattgaataattagtcattctgaatacaaaaaatataagagttcaccagaaatagaaatatcagagatgctacaatcagattgataccgagaatgtctagcaacataatgtgctactggtttgctgatcgtctaatgaaaaataaattaacagttcggagggtaaaagtaacaaagttagtagtctttgattaaaaggccgaaagtggacttcattgct

SEQ ID NO: 187640 - DNA, 2717 bp, Cannabis indica
aaaaaagaacagaattataaaaaatttataattattattgaaattcaaattgaaactatgtgcataatattattgaaattcaattatatatgcgcatattatagtctatgaaagaaaaaattattgacattattacctccgatcaatagctaccattggtgttttggggcccttacagttttgaagcttctcaagcaagacctttcttcttctaccaccgccaacctcgatgaaatgagatgttttggtcatatgggtcagttgtgttcgtggagaaaaattggataagaattaatggaacaccattaatggaactgaggcagttggggtttaagaattgagccagcgggagatatgaatgctccattaaagagagcttatttggctatcagtaggaaacaatacccctttggaagacatttcctgaatgaggatggaagcattctcatcatcacccttattataaaatcctgacagaagagctctataagttactaaatcaggttccacaccactttcagccatttcatgaaaaactgcagtagcctccttaagattacccatcttacaatttgtgtcgatcaaaatcgtgtaacatatcacatcgggttctatccctttacttttcatatcatgtaagagatcataagcttccctgatacaattgaccttgcagtagctgtttatcatcattgtatagaaatttacatcaggagttaaccctttcttaatcaagccatcaaaaagcaatcgagccttttccatttctcccttagtacagtaacccgaaagaagagctgtataggtaactatatcaggttctaatcctttcgcagtcatttcatcaaaaactgcaaaagcttcatgaagatgttctgccttgcaatgcaagcctatcaaaacattgtaacaagtcacatcaggttcaatgcctttccttttcatataatggaagagatcataggcttttgataagcaatttatcttgcagtagttacttatcatcattgtgtagaatgcaacatcaggggttaatccacttttctccttcatttcatccatcagattcaaaccatcctcgattttaccttggagataatatccattgatcagagtggtataatgaaagatatccaaaaccatcttcttggccttcatctcctcgaccaagttaacggcttgttccactttccctagtttgcataaagcatccattacaatgttgtaacaaacttcatcgagatagatccccgaatccttgtgatctgtaaactgattcaccacttcagaatgcattcccatcttgcacaagcattgaagaatcgaactgatgatcaaactatttgcttttacaccatttgacatcatataactacagagagataaagctttctgtaattgaccgctgttgcaatagccatgaatcaatgcaatgtacacatgtgaattgggaactaatccctgtgtttccatatccagaaaagctttttcggcttcttcaattttcatctccttgcataacccgtgtataacagctgcataagcatgtttaccaacaggcctgctcgctccttggcatgcttggagcacatgataacctaaggctgacctttggttggtacaaagaccttcaatgtacgctcgatatgcaacagttgagtgggctacaccagcttcctcgatttctaagaacacatcgagtgtttcttccagtcttcccttcttgcaaagcatcttcataataattgcataagtgtaaccattaggacgtaccccgatccttttaagttgcttgaatgcagccatagccatatccactttgtcttgcttaatcaagcactgaataagataattgcaagcagagatatgaggggcaaatccacatctattcatgtaaaatacaagatcaatggcttcatcaaacataccgacactagcataagccttgatcaaggcatcataagctcgaaccaatgattgatcaaactcaacttcttctgtgagagtctgtaacaactcagagatttgcaagcattggtgttctttacaggtgaccacgagatccaagaagagctcatccaacttttgaaagcccgaatggcataaattagtgataagggcagaatatgtatagacattatgttggaaaccaacttccttcaattgggaaaagaaagagaaagcaagtttggtgtcctttttcatattattaaggatttcgacaatcctgaaggtatcaatgtcgggggtgcaactatcggcattgttgctgttgcagctattgctaacacttacgatagtggaagattgttgttcacaatcatcactggaatgagaagagctgcagttcaactgcccgaatgctaattgggagaacgaaagtgccccgttgaaataagctgtaccacccttgaacacacaataagtggcagttggttgaagaacccttctagagtaacccaatactaaagatgaaaattgcatcacaatataacttattcaagacctgagaagaatacacattcaagagttagagttgcacagtctactatattgtgaatggaataaaaaaaaccagtcaatgctgtaaaaaaaaatagtaagacaaaagaaaaggagaatcaaagaactttcacaagttccaacatttaaacaacattgaccataaaaaatgaaataatcagatcttgctgaatctttcttttcccagttgaagg

SEQ ID NO: 187641 - DNA, 5448 bp, Cannabis indica
aaaaaaaaaaaaaataagttacttgggtatttttaaaagatttccaaaattgtttatgcttggagagaaagaaaaacaaagtcaattaattggaaattaggaagaaagacaccatttttgtgaaaaaccaaaacccaaaacccaaaaacccttcgatttgaatcaaattcaaaactaccaaaaacccagaactgaacaacaaccaatcaagatgagtagtctatggaagaccaactcctttagaagaactctcaaatacgccattgataccaataccaagacctccattcgagctctctccacttcttcaccctccattttccacttcctcttctttccaacagatcttcttcttcgccttattcgctcaccgttcgatatctccgtaccggtcgcgatggatcaggtaacattagtagttttgttttcttgggttttggtttgttatgtgtttgatgaaatgtgtgagtgagtgagtgattccaatttgtgttttttaatgtttagaatctatgagattacgcctcctgttaattggggtgttcggattgtgcctgaaaagaaggcctttgtggttgagcggtttggaaagtatgtcaagactcttccttctggaatccatttcttgattccctttgttgatcggattgcttatgttcattccttgaaagaagaggccattcccattcctgaccagtctgcaattactaaggacaatgtcagcattttgattgatggggttctttatgtcaaggtttgttattgggatttcttctcttaattacttattgggttaagaaatattcaattttttggtttagttggttattgggatttcttctttttaagaaatggggtttcttttgtttaattggttattgggttatgaaatattcaattttttggtttagttggttattggggttttgaaagttctcatttttttcatgtgggttttgattgatacagattgtggatcctaaattggcttcttatggagttgagaatcccatatatgcggttattcagcttgcacaaactacaatgcgtagtgagcttgggaaaatcactcttgataagacatttgaggaaagagatactcttaatgaaaagatagtagtaagttttctttatctgagaatctgaatatatcatctgttagtactgagtagcatagatttgaatataaacaaaatgctggcagtattgcaaggtatctgttgaagctttgttgtttactaagacagaatttaataattaaaattgaaattagttatcatgaagaaaagaactaattgttaacaggtgtttcacttgttttgtcgttccatttcttttttccttcacatttttcatcagtccttttcattctcattcatgtgaatggtaatgacataaaatcatgcggatcacagattgtttgtttcatttttgtgtctttttgctgctgagaacatttgatgatcgacttaaagaacgtagtataagttttttgagagtcatttttcgtttatgtcggtaatttgtgaatcatgttatacttggttttgtatgaattcaatcttgtgagtagtttaagttaaaggtgtttactaaaatttctcatacccttgataatcgaggaccactgaatgactgttgcatggcatcttgtgcaggagtccattaacaaggctgcaaaagaatggggccttgagtgcctccgttatgagataagtaagtcacctttaatgttctatgatggactttctttgtttatgttcccaatatttcttttataaactttctactatctatccttgttttaggggatatatctcctcctcgtggagtaagggctgctatggagatgcaagcagaagctgaacgtaaaaagcgagcccaagttctcgagtcagaaggtaatagaaattagtttatatcagttatatctataaggaaatttgatgtggccatggcagagaagtacctcttaatctgaaaccttgtattcataataatgatatttaggattttatgactattgatttgttaaaaaaaaatctgtttaatctttacaggagaaaggcaggcccatatcaatatcgcagacggtaaaaagagttctgtgatcttagaatcagaagctgcaaggataaatcaagtcaacagagcacagggcaagttatattctagttatcctaaatttatttaattgttgagttgtactctatttatcctaattttgtttaattctgaaaatgcaagtaatataaagttgtactttgtgagtcacaaaatatattttcttacttaggatctctaaatgaagtcttactagtctttacttgtgtatcatttagcatgctctactctgctgtaccaagttcttaatgtacaagtaatgtatgatgctcttaatgggttgttgcttgcttgaatctttagcgaaattgggtttagaggatacatgtgggacaaataaattacccaagctcttaccaagggggtagagttaggggtattgattctccttgacctattgattaatcatatttcatctacattattatggtttattctgatgttgatgctctcttctcattcttaacatatgattacttctacaggagaagcggaagccattcttgccaaagcaaaagcaactgctgaaggtcttgccgttgtgtcaaagactctcaaggaaaatgggggagttgaggtatggtttttcaatcccttagattggatgttgatggtctgctcgtaataaaatgctcaattttttacttgtttgtcgtatctttgctgagctcctgttcggattgcagcagacaattttattttgtgttatattttgttaaattgtgtccattcttgatgactggttgacctctattctgcaccaagattttccatgagatggatacgagtccacatgttttatttatatatatatataatatgggcatttacatggaggaaaccattggttccattattagattgtcatcatttaccaaaagagaaatcttactgtttgggggacaagcttttgctttatatttattgttttcgtctctcattttaggcacccgatctttagggcgaacgaaatgaaaatataacaaatactattttaagtgttcgagacgggcttgaacttcaaactttataatatgttcggccggatgagttactgtaggtccgtaactactgaaagtatattgagttgctaaccttatgatgtcatttgcaggcagcaagtttgagaattgctgaacaatatattcaagccttcagtaatattgctaaggaggtgaaaaacatatattttcttaacattctgtggacttatgtctttgcttcaattatttattttccccataaatttaacattttgttaccagggcacaacaatgttgctaccgagctcagcttcgaatcctgccaacatgatggctcaagctctcaccatgtacaaaagcctagttagcaataatacttccagtaatggggttcataaaacacctggcgagacaatagccaaggtagaggatgagggtgacgatgctccatacgagagcgcctatacttcaagaacaccgaaaattgctccacgcgaagaagaaaagcctgggttttcactccaaagtcccaagaattaagaatagagttttgattccaccaaacaattgtgccaacaaaatataatttgattgatgagcttttgacattttgtaatttgatgtatgattccataatggtttctctaaagaggaggttggtagtatctttaggatgctcatacaaattacttcattttccggcaaagagtaaaacttgtccatcttatatgatgagcaattattaggggccttattcaataatgagattaaacagatgttattgtcatgttatggaattggaaatttttcacaatagaccacttttcatttttgttcatatattcatttttttattgccaagccagaggcaaaaagagtccttcaaaagttggagggcttaaatgtcaataattgctatagtttttctttgtcatttctctctaatgccagttcacatgtttcatcagaaagccagcaaaaccaacctggatttaaattactaatcaattatgtataatttattcaaacaaaaccattgtttttcttcagaatcttcttcaaatggtatgaagtaattctaccaccatcaaattgtgtctattattattttatttaatcatttgagctacacttgttgggtattgataactattattatattctttcaaaaaatccatttacataacttgaaactcaaattcacccaatttgcaatagaattaacaaaaatgtcacaattttttttaaacaattcaattcaattttgtctatcatgaaatgaacaattcaatccgaattatccaaattctaatcctgagaaacatgttggttcgaaattgagttcattctcattagaacattcaacaacttgtaaattgctaatatatatttatatatatacatatttacatataaatataaatataaaacaatgcaaaaattggaatcaatgtgaatatatgtgataacattaaatacagaagaaaaaaaaatccctcttttacatatacatcaatacacaaatatctccggctctttcaatacacaatgatcaaagagcaaagaattttcaaacgaaatgaagaaccctaatatctgatcttagagaagaataagaaataagaagaagaatcaatcaattatattcagtaataatatatataaaaaaaaatggattagaaaagaccgaacaagactgagaatccaagaacaatgagccaaactatgtgtaccaaaagcagagcctgagctgagagaggagcagaacctccattaccgacctcacaaaaccctaatttggcaactttcacaccgttacatcgtgcttcggcgcatccacaccaatacgtaacaccgtcgaccccacaaacggggtcggttcgaaagcaggtgacggggcaggaagagggtttctccagtgattggccgcatggatcttgatgggtagcgtcggaaggtaatcggatggcggaggagaattgggggtcggatcggacggtggggacggaggcgaggcagaagaggaaggtggagatgaggaggacgagaggaatcggattgaatcgattcatgattgggaaagatgcgagctttctttgacagaaagctcggtggtgcatgaaattggggattttgagaaatttctagggttttgtggaatttgggggaaaattgaagaagaaagtctttttttttttttttttatatattttgaaaattgaaaaagaaaagtgttaattgaaaatggtattggaacgtttggttggttttaggtgtagagtagggtccaatcatctattgtcttctttaacaaatattcttgtggtttttcattatatta

SEQ ID NO: 187642 - DNA, 1116 bp, Cannabis indica
aataaaggactatgaatatagtatacattattactttttatttaatggaagatatataaaaatactaattaatcataaagtcttgtgtattcattaaaattagggtggcttattaatgttattgttattgctttaataatataacaataataaattacatttttataaatacttaaattattatttttcaacaattaataccctcttcataaaaccattttttttaatatatcaaacaaagattctaactctatttgtctccctaacaaccatttttatataatattatactatatataaatatatagaatcgaatcgtacttataataaaaaaaaataataaactaaatattatcattagttttctctaaatataataaggatagtacacattaattgtacaaaggaaaaaaatagagaaagatcaatacatttaaagtcaaaccaacatgaataattatttttctcatccaataaaaataaattcaaagaagattaaataaaagtaataatgaattttaatggattgaaattgttactaatattttgttctctaactatttgctcttttaatttaggcaagacatcagtgaatttgcctgcacgtttttaaaaaagacatgcttgatttgcttgagatgctagaggagacttattagcacgaattcaaggactagttgatgattccatggagacaaaaaaactacaatatagaacaactcgataagtcatttatgcaagattctatcgatactacgagttctattttacataatattgcgagtcactttcaatggtgcaaattttctgtacttgaagttcgacattcttgtgggggaagagaaatttatcccaacaacaaaattttttatgatgttgctttgtttagtttagtttttatttttgatatatatttggtttcatttgtttcccttgtggattttttcttgttgagaatttgagacgaattgcctcttagactaaaaagaaatagaataaagaaatacctatctatttactagattatttcttcttattcaactccttcaatcctcttcatccttcgaaaatcgttattactttatattttacctcatcttaatattttattttatt

SEQ ID NO: 187643 - DNA, 1913 bp, Cannabis indica
atccactgcagcattcatatttccacccccaaacttaggattgctactcatactcagggtagccaaggtcttgggatcaatttcaccatgtggagaagccttcattcccatgttctgattttgctgacctttcttcccatgaggattattattaccattgttgttaatctttccagtgttttgagcagaggccatagcagcagtagcagcaacttgagagttcttttcacttcatttgcttccattgcttgctgcctaagaaaaccaagttggtttactttctctctgaaaaacctaatatcatcttcttcatcctcttcttcatcatcaaagtcatcatcaccatcaccatagttgaaagaagcaaacttttgttgttgctggtttttgaaggcctgaagaccctttatcaagtttggtttgttgtggtgattccctttgttgttgttattttcatctttgatacagttgttgttgttgttcttttgcttctggttttggttgcctttctgggttcaaagctcagcatgcttaccagctcgaactagtttatttatcaaacttgcagagtctacactccctgatactgttactttttgctgctctgaatcaatgtttacttggtaaacacctacaagaaagagaaaaaaaaaatactatttttattccttgcatattcatataaagatactctttttatactcggataagaacatttgatcagtcaatattaagttattataccattataacaatttttaaagggattgtattttttttttcatatatcccattacatatatatatggaaaaaatgagtaaaatttacatgaaaatttgtaaatagaacacttcactaaagattaaattttgttatcattttctcactggaactaaacaaacaagcaatgtgacatgaagattgggaatatggtaattaaaaaaaaaaaaaagtgactgctgagaagaagacaagagaatggcaaaacttaaaaagatgagaagaaaagtgatgatgaagaccttcaattctttgtaagagtttcttcattttctgcttgcacccatcacaatgtatgttcactcgaagaacacacgtttgtagatgaaaatttaaattaaattattaccccaaaataaaaagggaaaggtataaaagcaaacatgaaaacaagaatatggaagatgtgttagaggaaaagaccaatgcctaactttgttgtttgtaaaaggaagagaaaaatacacaagattaaaaaagactcaaggaaagaaaaatttgggttttaagattagaatgacctggatcttgaggagcttaaagtcttcttctttagtcatttcttcactgctgttttttttgggcacaatagctttatctccctcaatcaacacactccttttatattttctaggaaaagagcctagtaaaagctagttagagaaaaaatgtaaataagaaaatagattttattttgcttaagttttcttctacacaactatagctatagtagaatctttttccctaagtaccagtgtaccactaattcactcctttcacttctcaaaatattttatatgcatgtgtaaacagtgttaaatgggtgttgattgttgaactattcaagatgatactattataataataaaaagaaataacaagaacccaaatgccaagacaaatataaacaaagaccaaagggagaagaaaacaaagtgaaaggaaaacggtgctgaaaagtcagagaggacataaacaatatttttttgcatggagaattaaatgaggatgtctatatgaaacttttcaaaggttactgtccaaaaggaaatttaccaacaaatgcaatttacaaactcaccaaaagcttgtatggtcttctactccagattcaatcacatgcctcaccctc

SEQ ID NO: 187644 - DNA, 2725 bp, Cannabis indica
atttttattaagggattatttttacaaatatacaataataaaaaaaaaattacaaaaatacaaatttaaatatttttaagatttttttgattttatttatataaaatatagtatattaatgtatttttatgttatgcttttattaatttgtagttaatttttttgttatttgtatgtcattttttgttttttttttttttagtttttttgatattgtttagttgttattttcctatttttcttatataattttcttattttttttgttttgtgttgttttatataacaccgtaaaaatatatatataaaaaaattaaacgtaaaatataacctttttttaaaaaaaaaatagtgtatgcaattttttatgtaagcacaattatatttaattaatttaaataagtgaagatattgaaatttacaggcctctcacttggcaaattttgaaacgacttaaagacactgctccgttgatgcataacttgttatgggcgatttcaatgaaataaaatctcactcaaataagcttgggggacaattacgttgtgatacacaaatagatagttttcgcaatgcaattgactactatggcttacatgatttgcccttttctgggtctcaattcgcttggcataaccatagtgcaaatgggatgaatattaaggagagacttgactatgcctttatcaacaatgcatggcttaacttgtttggggctactgaagttacacattaggatttcttcaaatttgatcatcgtgctttactagtaccattaaccttgttggcacaagttccatgcacaaagtacaaattaagattccattttgaaaaaatctggctgaatgaagatgaaacacttgacattatcaacaagaattggaccaatacagttgctgatccaatcttgcagattactaataatctttcttcctgctcctttcaccttcaatcatggcacagaagtaaatttggtgaactaccaaggaacgtcaacataacgcaagacaaattttttgcacttcaaagctcaaacaacactacttttgaacattttgagaagctcaaacattgtgaaaatattctggatgaactcttggcaagaagacgattattgaaaataaaggtcacatattaaatagctcaaatcgggtgactcaaatacgaagttttttcatcaaaaagctaatagtcgaaagaaaaacaatactattagcaaattgattgatgaacaaggtgttgagcatacatcaaaatttgctgttgtcaatgtagtacaaaccttatttttgtggaatatacactactgaaggtgtagatgttgaggcaatgcaatatgtcatgtccaaagttccatgttcaatctctgctgtagataacaaagctcttacacgcccttataatgctgctgatgtttatgaagccttatctactatgaattcaaagggtagtcctggacttgatggcatgtcaatcatgttctattccaactattggcacattgtaggtgatttggtcactagatcagtgttgaaagtgctcaacgggggtggagatccttcaagtttcaatcagaatttaataacacttattccaaaagttaaaaagtcaatcaacatgtcacagctgagacctataagcctttgcaatgtcctgtataagctagtgtcaaaatcgattgttttacgattgaagtcgtatcccccacaagtcatttctgaatcataaagtgcgttcttatcctcacagctcataactgataatgtattggtaggcatttgaattaattcattctctaaaacatttgagaagaggtaaagagggatatgcagctataaagcttggcatgagtaaagctttcgacagagtagagtagcactttattcaaggaatgctgcctgctatgggtttcaatcatgcaatcgtggagcttattttttgatgcttatccagtgtatcctattcttttcttatcaacggttcaacacgaggtgacttggtttcaagtcgagatatacgtctaggcgatccattatcactatatttgtttataatatgtgttgaaggactctcaagattgtttcaatttgaagaaattaatggcaatctcactgatttgtgtgtttcgtgtgatgcaccagtaatttctcacttgtttttttgcagacgacagcctggttctttataaagccaatacacgttctgatgaagctattcgaagatcacttaacctatactgttgtgcatcaagacaggagctataaatgcagaaaaatcgatactttctttctcatcaaacactacattgccagttcaatctaatctacaatagattttagaaatgtcgatccaaccatgccatgaaagatacttaggtctgccatcatactctggaagggataaaaaaaatcatgtttgctgatattaaagataagttgtggaaatttttatcttcttggcaagaacaacttttttctattagaggaaaagaggtgctcttaaaagcagtagcacaatcaatcccaacatatgccatgagttgtttttgcctctcaaattctctcattaatcaaatagaaattatgatgaataagttctagtggggctctaattcttcaggaactggtatcaattggaagacttgaaaagctctatgtcaagccaaagttgaaggtggtataggtttcaaaagtttcgttcacttcaatcaagctttactcgctaa

SEQ ID NO: 187645 - DNA, 5862 bp, Cannabis indica
agcaccgtgagtttggtgcggagttcctgaaagcgagaagtagtgagtggttttgtgagacaatcagcaacttggtcttcggagggagtgtagcaaagttggagaagcccgttctttactcgttcacgaacaaagtgatagtcaatttcaacatgcttggtacgagcatgtaaaacaggattggaggcgagatgtagtgtactgatgttgtcacaatgcatagtaggcggtgcagcaagagggaagccgagttcactaagaagtgattgaagccaagaaacctcggaagcgccatttgcaagagcgcgatattcagattctgtactggaccgtgagacaactttctgtttagccgaagaccatgagatgaggtttaatccaaagtatatacaataagcactagtgctgcggcggtcatcaagacatgaagcccaatttacattagtgaagcaatgaagttctcttgtaggatcaggttgaaggaggatgccaaggtgagccgtgccattcaggtaacggagaactcgttttgcaacttggtaatggatggtagtgggggcatggagaaactggcagagtttgttgacggtgaaatatcaggccgtgtgagtgtacagtattgcaaggctccaacaagactgcgataaggagtaccatcggtaaggggctcaccatcatagagagataaagagttaaaatccatgggtgtagggaccggtttggtgtcaactaaacatgttttagtgaggagatccctgatatacttcgtttgggacaagtgaaaaccggcgggagagcgatgaacttgaaccccgagaaaaaaatggagaggcccgagatctttgactacaaaccgagtagagagatatgtaagaagggcaacaatagtagaggaagatgagccagccacaataatatcatccacataaattaagagcactatgatgacagaatcggatctgtatatgaagagagatgtgtcggcttgagaagcaacaaatccccattgtagaatggcagtgctaagcttgaaaaaccaggcccgtggtgattgtttgagaccgtagagagacttagttaacttgcaaatatggtgtggatgaacgggatcaacaaagccctcgggttgagtcatgtacacagtctcggtgaggtcaccatgaagaaaggaattttgaacatctagttgcttcacaatccaattgaaagacacggccaaggagaggaccaaccgaatggaattcggcttaaccacgagactaaaagtttcatgatagtcaagcccttgagtttgatgaaagcccttggcaactaagcgagctttgtagcgttccacggacccatccgcatttagtttgatgcgatacacccacttgcaaccaattactttaaaaccggagggtggaggaacaagaatccatgtgccttgagattttaagtcaaccacttcagtatccatggccgcaagccatttgggatctttgctagcttctcgaaagtttgatggctcaaccggtgtacctgcggcaacactaaaaaacaaacgaggctttgtgatgcccgatttagctctagtaatcatggggtgtacattagtatgggcaatgggaagagcacatgggtcttgcaaatctactatcatagggatgatgggtggggaggccgtggaagatgatgaagaagatgtatgtgaggagggtgtatgaacgggaggactaataggagtaacatgagatgtagagggggaagtgggaaatggttgagttcgggtcgatggaggagaaggggaatgatgagaagagatgtgtgtggatggattaaggggagatggatgagttggggtaacattgggaatatttgtggtggtgggaaccgagagaggtaaggctgtaatgacggagtgaggagcatgagagggtggtaaagtggccgagggagtggcaaagggaaaacatgactcattaaagatgacatgacgagtgataaagagacgtccagaggtgggatgaaggcaaagatagcctttgtgtttgctgctatagctaaggaaagtgcaaggagaggagcgaaactcaagtttatgagtgttataaggcctaagaaaggggaaacattggcagccaaaaactcagagtaatgaatagtttggagctttgttgtaaagtaagtaataagggctgtcataatgaagaacacgagtaggaaggcgattgattaaataaacagcagtggagaaggtgtaaggccaaaaaagaagaggaagatgggcatgagctaacaaagtgaggccggtttcaacaacatgacgatttttgcgctctacgcggccattttgttgaggtgtatgaggacatgagagataatggcgaatgccatgttgagtgaagaaccgagacaaagagcggtattcaccaccccaatcggttcgaaccgattgaatggtgctttgaaattgagtggaaacaagatttttaaaggtaagaaatgtagtgaatgcttcatcttttgtattgagaagataaaaccaagtgaaacgtgtgtaatcatcaataaataagagaaaatatttaacaccagtgatggaagtaaccggggccggaccccaaatgtcagaatgtattaatttaaagggttttgaagcccgagatacaaagttgttaaaactaagtctatgagatttgcctaattggcaagtagtacaaaaagttaggcaatctcttcttggaaaagaaaaattacaagtagatgaaatgcgagagacaatctcagcggctggatgacccaagcgagactaccataagtcaatagaattcttggaagtgtagaggagttgtggggaggcaacaagtgttgaggcaggggctgggtgaacacggtagatgccttgatcaagaaggcctttaagaatgacttgatgattggcctgatttttgataagaaagaaagtggggtgaaactcaacataggcattattatccaaacaaagttgggatacactaagcagatttttggacaatgaaggtgaatgataagtgcgattgagtttaataataggaaaggatgatgatggtagacatgcagtacccacatgagaaattgaagaaaacttaccattgcccatagtaatgcggtcattaccatgatacatagtggcgaattcaaggagattcaaatcgggagtgaagtggtgagaagctccggagtccatataccaagcgggatcggtgagagcacccgtggatgaaggagtgggaagtaatggttgagtgttggctggtgaaggaggcaatggtggggaaggggtttgtggttgttgttgactgaaataggcattaaatggacgttgtggtggaggttgtaagctgagattggttctgtggtgacacatgaatgccgtatgccctgttttgaaacatatttggcatctcagtggtcttaaagggggacggggagaactagagggaagccacggtgttggagatcgaggaggggtgggatagtggttgcgaggtcgatgaaatgaaggtagattgggtgggcgttttgctgagggtgtgacgagaagcgcagttgagaagaggcttgtggagaagaggatttaggtctctgtttgggaaacgagaggttggcaaagttggcttgaagggagctcagtgaggcagcagcggtttagcgttctaaacgagcttcgtagctgagaagaagggcgtgtacctcttcaatggtgggtttgaccgatcaagctaagatgggaataacaaaggcattatactctggtccaaggccattaaggaggtaagttaaatgttcttgagaagagatgggttctccaacggaagcaagggtgttgcagagagtttttagcttttggagataagctgatgcactgactctgtctttcttaaagttctgcagcgccgtgcgaaagtcggagctccgtgcaaacgaggcggcggagtatgtgcgttcaagagaaacccagatttcttctgcagtagtgaagcccacgatctggccgagcatggagtcggagagtgaggcatatagccagctcattaacaaccggttgtacctgtgccaagccgtgaaggatgggttgacttggctcaatgtttcgtcgataaattggggtggacggaacactgtgccgtcgatttagccttcaagtccattggctatgattatgttttgcatttgcattctctaaactaggtaatttgtgtcatctaacttgactgaaattgtttggttgaaggaaggaaaatttggggttaaggttggggaagaagacgaggccgagaggggtgtggcggctgtagtgttagggttttgtgtgttagtgatagtagggtttggaagggggttttgggtattttcattttccatttgtgggattgagctggtacactctattgatgccatggagagccttttggctctgataccatgtcagaaggaatgaaaaagatgtattgctattcctcaaaatacaagagtacacagtacaacatatttataataaagtggagacctaaggagggacacatgtcaccatacaataaaagcaagtaaataatacaataaaataacactatggtttaacacctctcgatcaatggtgacacttcgatcgcagtcgaacttgtcagagatggactcatagagctgggagagttgtttgaccgtggttatctcactctacaactactctgacagatggccaaagtgatgattggagataggtactccccgagagattcacaagatcacttcacccattctagatctgtttagatctgcactttcattcagcaaaatcagatttggtcgctcaccccgtttgcccgttcttcatcttcaactgccaaccattcacgagttctgtttgttcgttcgctaaatgagattaacatcttagatttgtgcttcatccatttggtattgtagagaaaaatttccaaacttgaattgttcgattgagatttttttaggtattatttttgttgtgctttttaggtgttaattagatctgtgaagagagaaatatagtgtggtggcatcgatagttgattgtggttatggttgtggtgactgtggtgtggtagcatcggtggtcgattggttatggttgtggtggttgtggtgtgggcgtagtggcaggatggtggtggttgtagtggttgttgtgggtgttagtggttgtggtaatgtaatgtgatggtagtggttatggaaaatacatgtagcatgtttacttgaagggaatgtgaattattggtatggtattgattcctatacaatcgtttactaaattttagaaagggagaaatagtgggacacactcaaattagggagaaaataaaaagaaaggttatcttccccccatttttataggggatacctttctctttcttaatttattttattttaattttaattttattaattaaaaatgaaaaagataaatatgccctttaaaaatctataaaaaataaataattacatgctctaacaatttcaattttatcaaattaaagcatttagattacctttcccagttataataaataaaataatctgattttagttttctttccgtacattttaataaacagcataatgaaatattttttctgattattttctattttaagccttttcatttcttctattgattattttgatttcagttacagtttagtaaacgcaccaatagagttaggaagaagaagattgaagaaaagagaaaacgatgggaaaaaaactaatttattaattttttaatattattttaattttcctattcttttaattattttattactttttaatatattttaaactaattttaataaaaatggg

SEQ ID NO: 187646 - DNA, 6265 bp, Cannabis indica
tcaataggaatttacatacattggataacaatagatcaaaaactatttagtatggtgttttgagtttcatgattgttggaataagtaagttttggtagtttttaaaagttttttttatatatgattcatttgttattataatattcaacttgatcgatgaccccttaaaaaataattaatgcaatattattagtggatagatctactatatagaaaagtatatatgtaaattagcattaattggaaagtaagcaatcacatcatgatagataagttcttatgtaaaattaagaagaaattaattttatgagtaattttttatttgaattttctacaccaaaagcaaaattattatatattaaaagtgcaaagaatttgtgatccatacaatatatacaagcaaagcaatacatacttgactcatcactctcgatcattatcctaataattatgtaatcaccacatattaatatgtaatataaataataacagaaataaaattgtcaaaaaaaaattattcggatccaaaaaatttgttcagcaaaagcgaaaaaaattaaaaagagaatgtaaaaataataaggaaaaattaatttagcaaaaaaaaatgtatagatcatattatccagacatggagaaaataaacattccacgtggcgtataaaatataattaattaattaaattcttgattatagttaaataaaaatataattataaattatatatatgtaactacattgatcaaataaacactgaaaaatttctaatcttttttagtggatagatactccacatataaactaaactaatgaaatattgatccttatagctgatttataaaacagaaattagtgttaattaattaaaagaaaatattttaacctacatagacattaaatcaaaatataaacatatcattgatgggtatgagggtattaagaattagggaacttataaaaatattatttatttaattaatattttattaataattttatgacaaagaacaattttaaaattataaaaagacaattttttaaaaaaacaacaaaaaatcaatcttacaataactataaacaaactataaaacaacaaaaaataactaaaaaaataatttcatgagaactataaataaactacaaaacaatcgaatgtaaattgactaaaccaattggctcacatcccaattgtagaaaaattgaatacatctaatattatataattataattataaatttttttttttttttttgtagaaactgatttgtaacattaaaggatgagaaaaaagagtttagttacaagatcagatgaaaaaggaattgaaactattacaattccagataagatctctatccgttcctagtgccatttgtgctaaagtgtgtgcagttacattgtggttgcgagagacatgtgaaattttagcactaggaaaagttgataaagagtcaatgattttccagactaggtcagatgtgggtgatctatctttggagcgcttgttgattttgttcaccagttccaaacagtcagaatgaattgaatgtagaggaaggtcaactgtgatacaccactgaatagcttgaagaagagcatgagcctcagccaaagttggagatagagcacctatttcagaagtactaatagcagcaatggtatgaccagtggagtcttgaatcacggcaccgaaacccattgttgaacttgatgttgaaatagctgcatcagagtataaggtgtacatgcccgatgggggaggtggaggttgagatccagcagctgatggagttggaatcggaatggcaagatgttgctggctatttgtgtactccttcaagtaattgacatcatatccttcaacatcatctaggggaggggatttggattggaagagagtctggttgcgcctgttccaaatggtccacagcaaggtaaaacagagagacaactggtcctttgggagattttcataacctgaaaggagaaaatttttaatgtcctgagattgatgagcgttaaaaaaaccagctagacttgtttttttccaaattttcctagctctggaacatcctaggagagaatgggtgacagtgtcttggccatgagaacagaaagagcaatgaggggagggaataacttttctgcagaaaaggttagaagaagtgggaagaatgtggtgataagcacgccaaataagatgtttaattttaggagggatggagagatgccagagggttttccaccaatttttgagaagatcccgattggaagttgagggagcagaattagtgaaagaggcagaagaaacagcaaggtgataggcagtgttaactgtgagatttcctgaagggtgagagctccaaatcagggtatcaggttgagagaggtcaatagggatagtgagaatggccttgataatgtcatgagagaagtaagtgtgcagctttggaatatcccaactcctagagtcagtgataaagaaggatacagttgagataggggggaaacatgggttttgtaagtaagagatttgaatccaggaacccagtagtgatggagtgtgtcagtggaaacaccatttctaattttggaaatgagacctttaggaagaaggtcccgacccataaaaggctagtccaagtgtaggagggagagtgacctttggaagcagagaggaaatcattgttcttgaagtatttggcttttagaagtctagaaatcaaggaatgagaatttgtgaagatacgccaagcttgtttagcaaggagagcttgattatggaggacaaagttacggaagcctaatcctccatgaaattttgaagcacaaacggaggaccagtttttccaatgcatcttattgcggttgccagaagaaccccaccaatactgagcagtgagtctgtcaagggttttgcaaattgataggggaatgcgaaaacaagacattgcgtaagaaggaattgcctggacgactgcctttataagagtttccttacccgctttggagaagaatttgttactccagagctgaagtttggcactggctttttggatgatgtaatggaaggaggatcgcttggaatggccaaaacattgaggaacgcccaagtatttagtgacaaaaggtttattatcaagttgaagagtgttgaagaaaaattccctatcagaaggagaagtgttaggggagaacagaatggaggacttagagaagttgacagattggccagtggctttgtgataaagagctagaatatccttgattgaccggcaattattttgggaagtggttgtgaagagaaggctatcatcggcaaacaagaggtgagaaatggaaggggctgccctacaaatagaaatgaaattgaaattggaacgggaggcatgaacacgaatggcagctgaaagaccctcagacactaaaaggaaaaggtaaggggagagagggtccccttgcctgattcctctggtaggagagaaaggagggaggaggttattgttaatagatattgtgaaggtgacagtggataaacaccgagtgattaaggaaatgaaagaaggaggaaaaccaaaatgagtgagaatagactgtatgaaaccccactccacacgatcaaaagctttctccatatcgagttttaaggcaacccagccaacctttccagctttgcgattattgatggcattaatgatctcattagcaataagcacattgtcaaaaataattcgatcacaaagaaaggcactttgattgtgggaaataagatcactgaggactaacttgagcctattggcaatagcctttgaaattattttataaattgtagtgcaaaggctaataggcctgaagtctttaagagaggaggcattctttcttttagggatgagaaccaaagtagtgttgttgatcgaagagaagtcagattggttattaaggacgtcaaggacagcctcagtgagggattggccaattgtggaccagttcttctggtagaattgtgcatttagaccatcaggaccaggagctttgtctccagaaagttggaacaaagcagaatgaacttcatcaggggtgaaaggttgactgagaagaaggtattggctagaggtgaaggtatgagaaattccaaggagaatagaattgattgcagttgaatccgtgccctgggaagtgaagagggaggcacagaagtttctgaaattgatggcaaatgttattaaaatcatggatagtagtaccattatccagagtaatgtgagaaatattattatgtctacgacgagaagaagcacgttgatggaaaaatttggtgtttttgtcgccagccttgagccaggaagcatgagcacgttgtttccaaaagatttcctctttatagagtgcacaatcaagatcattttgaatggccttggctcgttgaatgtcagcgtcagtgagaataggggagaaatagatgttgtccaaagagttttgtaaatgttaaatattatgtttgaaatgacgcttatttttaccccactctttgagcttattgacacaatgggactgagtggctaggaaagaagagagataattactgctattggaatgaggagataagtgccagttggaatggataacattgaaaaaatccggttctgagagccaagaattttcaaagcgaaagcccgagtaatggtgcagggattgactaggatcagaaaataaaactttgagacacctatggtccgagccaaagtaagggaggtgagttagagaggctttgggaaaaaggtcaaaccagttcgtattaaccacaacccaatcaagtctttcgagagttttaccatgcttaaaggtgaaccggtttcctttgaaaggcataggagtgagagaatacttagtgataaaagtctagaagtgaatcatggcattggaaggaggcatagtactggtagacttatcaattagagcaagataatcattaaaatcacctatgattagccaaggagaagttggagcaacatcatataaacggttgagcaaagtataacattctaatttaccagaactataaggggaaccataataacaagaaagatgaaaattaatattatcagtcatttgtacaaaacagtctatatgactacaagagtaggataaaatattaagattaacaacatcattccaaaaaagaaaaaggcccccacctagacccctcttaggaacttcaaaacaaaaatcaaaagaaagttgagtcttgaaccgatctatagaaccagccctgagcttggtttccattacaaaaagaagttgaggttgatgttgtttaaccaaaagggagaggttacggaatgctcgggaactccccaaaccacgagcattccagctcaaaagactcatttttctgggcggggttgcgaagcaacacccgcctgatcatcagaggtttcaagtgaaggaaccacagcaacatcttcatcctccgaggcagctctggcacgtttcagcatcttcctaacagagttgccaaactgaacattctatcttgtgaaagaatgcttagcaccagacagagttaacggaggaggagagaggataattataaaaaaaaagttgaatctcatcaattaattagattaattggtcacttatatatgttataatccaatctctatataagatcgattcaactatataaattccaaataatgatcaaaacattgaagattaattaattaaagctggaatattaatttgtcaatggaatagtgaagaaaacaacaactagcaactagagaagggatcaattttttttttatttttttatttttttttttttttgaatgaagggatcaattttttaatatttaataaaaacgacatataaaatacagaaaaatatatacgtcgttttcaaagcaacataaaaagactttcatgacacggaatatattaatgtcactacttaatcaattgcaatattttcaaagtcgtgtattcttttatttgatttttattaaaagtaatttagaaataaataagaccaagtatataatatagtagtgataattcgattgaaattatatcactaagtcactagtcacctttaatatgtaatagttattattatatttttgtttttttttttctacttcaaaaatttataaatatacttaattttaataattttattttatataaatatatcttaattatattagtttttttaaattttttattttctaaatctatatttttaaaagtatatatctgtc

SEQ ID NO: 187647 - DNA, 2630 bp, Cannabis indica
aatcatagaaattaaaaattcatatcttgtgactcaaaaaaaaaaaatcatgtcttggattttgaaataacctttaactaaaaataaactactctaaactcgacattataataggaatcataataaaaagcatgagtttagggagaagaaaaagaacaatgatataaaacaattggtgccgcaatctccttcttcttctttctctctcaaaaagcgtaattcaaaggtactaaaatttgaaccctaaatggcctataaatacccctaagaatatctcagtttaaagaaaagaaaaaaaattgaaaaagcccaagaatcgcgccctcaccgcagccacacttgaggctcgccacgatgatagtgtctttgctgcgaccacacatcctcctcgtcgtggcgacacttccctaccagggagcttttatttgctcatggcaacgaacctctagccctcattgcagtgacaaaccatgagtttcgggtcttcatggatttttaaaactcaaggaacacattattttggtaggtcttttcatcctccaacatcacctactcataaaaacaacaaatccattaatttttactcataaaatttaatttacttccaaaacctaaaaaattcataaaacgatgaaaaatactaaaaatatcaagaaacaccctttaaatatgaagaaatcaacaattttagagcctaaaaggctctcatcaactcttgcagaacaacacctccgagtagcagattatgaacttaagaaaaactaggggaaaacttaaaaagatttgtccaaagccctaatgaccttagatgagaagacccagtgcctaatccgattcaaaacttatttacacaaacaggagttatcaaactaacatacccagaaaaatagcatgcattggcagttcaataggcctataattatcggataacccaagaattacctatttaattctcttagtatttgcatgcaaatagtggtttctcaaatcgatactcgaatctaaatttctatcacaatgtagaattaaaaagttcaaaggtttagagaaacttacttgtaatacgacacgaggattaaggaaggtgaaggtggttggtcttgaacttaagagcccaacaaagaacttggtcgcagcctgcctaaatgtcaatatttttggacgactgggggtggctcacaataggattcaagggtggcgctcctcaaaactccctcgctcagattcacaataagaggtggataagaacgtcaaagagctcattcattcaccaaatgatgaaaactcgagatttctaagattcctcaaaggtcttttcttctctagtaaaaaaagagatttttgctcaaattcgaagatgaaagctcaaaggttcaaaaatacaaaagtggtaaaattagttcccttgcttctatatataagcaaagatggagatccatgtgctttgagataaagggccaagatctccaagatctccctaaaaaaaacacaaattacgatccaataaataggtaactaagggggcaacattaaattcctttattagaatcgagacatttttacatcattaatactcacctaggggtcgaggctgacattaaatagctgtcatcccatcattttgcacaaattacgccttcataaagcgtgtggcaaccatgaacccaataagtgggaacacgtaggtggtgtcaattgtttaccaagccaatttttgaatcttcaactgtcaagtttcgaaaagagaaagatgcttcattttctttcagaagtgcccacgtgcctaaaactccaaggtcatccagaaagaaagctacaagcttctgccactcttaagtcccaaaagcttgggagtaaatgttatccatattttcaaaagatagacacgtgccataaccagaaggtaatcatcatttaaaattaggcctaaggcttctagcttgtggaagcccaagccagacttggaatgggcccaagcctaacaaagactaagggctctacctctagggcatagcattcttccaagacccagtaggcacctagtattccgagacacggaaggaacaaagaccttcgaatgatgatcacgacacaaccagaggtgagtatcagatgtctacctagaatggtgtgtccacatatttgacacaagatcagatacggtcccatgcgtcaaagcatggtaatgtgtgcaccactgtataccccttttgtctgatggctcccctgacaactttgcctactaggcgtgctctccgagcaacatgtgtcctgcaccaaacggttccctcatcagtaaagaacctttgccccacgagctgaatatccttagtggtcctcatagttatgtatttgtgtattttaccccattagtgggcttactttgacaaaaaacccaaatgggcacgagtatgctcgggcctgaactctaccctatataaaccatactccttcatgcagagggggaggggattttagccgaagctttgctggttttattctaagctttctacttctctaagagaaacctagagaaataactttatagcaagggttagcgttccttattgtaaagctcatttgtaatatatttcaaagcttaaaagaccaatacactgactcgtgaacta

SEQ ID NO: 187648 - DNA, 3761 bp, Cannabis indica
ggttctgttgtcgttttgaggtttttgttgccgttttgaggtttttttgtgtcgttttgggtttggataacggtgaccgttagttgggtgtcgttttgaggttttttgttgtcgtttttagggttcggatttgttgtcatttgaggtatttgttgtcgttttttagttgggataacggtgacagttagttgtcgttttgaggtatttcttgtcgttttttgggtttggatttgttgtcgtttgaaatttatgttgtcattttggggtttggatacagctggttggttgtcgttttgatgaatttgttgtcgtttttggtgtttggatttgttgtcgtttggaatttatgttgtcgtttttgggtttggaaactgtgacagttggttggttgtcgttttggggtttggataacggtgaagtttaggatattctgttatggaggatgagtttgagtccgacaaaatgggttttaaagagccggacatattttccactaattacacaattagtcctcctttttattttatatttgcacaaaaggtattgtatttctatataattacacttattttattttatttattttcatcaaagacaataaataataataataaatatttttagaaatttatgtaacggttgttttgttggattttttatctgtttcggtatctacatgactacgtacagtgacggacctaggatttttactttgtgggggcttatttatcataaaaaaatatttatagctacattataatcactcttactaaatttatctaatttagtaggggcttttctactattttgacctataattattaaattaaaaaatttacatttaattttttaaaaggcaatatttttgttcgtgggggctatagcccccacatcactcttaatgggtccgtccctgactacgtatattgtaattatttaagatcatttttaaatgtttaaaaaattctaaatagcttacaatactaaaaataaagtttaaataactacttaatatgtgtatattaaaaagattgagagtacagcaaaatatataaattttattttcggtattgtaaattactcggaattctcttaaaatttataaatggtcttaaataactataacatacacggtcataataaaaaaaaaaaattagactaaaaacttcttttaggtactgaaatacttctttagataatgtactgtagacttatccaatattattttagagagttctattagtttttttcttttttgtattggcacgatataattttatttaattgcttaaattaattataattataattatttgtgatgtttaatgtatttatagcatatttttttgtaaatatttatataatttatagtgtcaaatttaaaagtatgatataatgtataaatatttattttttatatataggttgtaaagaaaaaattgaatctagtttggtatcctaaattatattgaatttttttataaaaaaaaaaattattaatgagacttaatacaaagaagagaagcagttatttgtatgttcataaatttgttagagaagtaatgttaattttctattacaatcttttaattaattttcatatttgaatttgctttaaaaaaaaaaaaatcatgacaatttatgcttacaatattatttcttcaaaattttaaaaaaaattaaataatttataatattaaaagtacatttgaaattttttaacacgcataataaaaatatcaagaagtttatttttaaacgataaattatttaaaatttttaaaaattgtaattacaataaatattgttataaaaaaaaatatttcgacttatattttcgtgactcgagattgtaattactaattagctcaacttaactttttattaaaacaacttaaaaaaaatatataaaaatgccacaaaatattttccctaaatattaattttgttgttgtatatttatatatcttatcttagttggagaggtgagtttgggttttggcaccaaaaaccctaaaaccctttcctttgaattgaatggataatccaggacagagccaacagcagcagatgaagaagaagaagccattgccgtcggcaaagcagctgatatcccactacgaatcgcagggtctggacacccaagaagcatcggtgaaggtgatagaggatctccaggccaccctcttcagagtcatcacctccggccgagccaagaaggacaagctcttagccgaagccaaccggaagctcgactcggcaaactcacgcctcgcccttatcgactccaagctcgattctaagcccggatatggagcaagcttggcaattggaatggcttctggtcttgccttgaatggactcggaactgttcttccccatctttcccagatttggagctctgttaggtctgttagtaaagattctccccaatgaattttattattgaattatgctctgtttctttctgggttttgtggattttttaaggtagtcaaacaaaaatgagttattattattattattattgcattattaaacctatatcagactcagagaaaatgaaacaaaatatactctaatattatcataaacatgacacataaaatccaaattctagacagaaatatcaataatttttaaattcaaaacaaaattcgtattaacaaaattaaaaaaaaaaaaattataattgtatatacattaaatatttttgacgctaaaagaaattattaaatttataccgcttataaactcaaaattttaaatacttataccacaatttaccgtttaaataaatcagaaacagaattacacttttacaaagttccgagcacttttaacaaccgttgacaattttcaaaggcaaagtagcagttagtgtccattatcattacaagcaatcagaaatctcgaaagctcattttcgggtccacatacttcccgccaccacgccctcgtcccctacctcgacttgctcccttacctcttcctctcgagctcaaacgcctgaaaaacgatttcccatgtttcatctccaaaagtgaatgaagaaactcgtcacaaagaatgcaaccagcatacaacgtggttccatcttccaatggcgtcgtctttttattaaagtccacttctatgattgtagagttacaatcgagacacttatcttgagtagtggaaattcggtgagcaccttggggaagaaaaataagacagttacaagaattgcaatggagtcgccacttgggagcactgacagggtctaggactagtgttccgctacattcgggacaagcacatactccttgggttatcatggaatgttgacaagtcgggtgagggcagagaaagcaaggcatcccagctcccttacccaacttgttggaaccgccagtttttgcagcaccgaagagtgtagttataccttcgaatggaggactgttgtagcagtacgggcagagtgggaatgacttgccttcgggaccaggcatcgagcaaagtagaagctcaaaattgtctaaaggacaagtaagttccttgtaaagctgcaaatattagacacttttgttaagaaattttcaaaaatgactttttttattgttttatgggaaaaattcaaaaaaaaataatgagaaaatagtttaggttaaccaggtagccttaaagtaacgagatgggtaaccggtaacctccttaagttaatcagttaacttatgttatttttccttttttgcgcacattatataaaaatccataaaatt

SEQ ID NO: 187649 - DNA, 1649 bp, Cannabis indica
atgggacagaggcacattgggcgtttgagaacaatgtctccttttgtattaagcttttaactgctgtaattttatgtatgtcagtagaacttgtaattttgttgcccataatgtggctaattgggcttttacccacaagttgtacggatctattccgacctcgtctgttccggaagatctcttatgtaatgaccggaaggtctaacgttttttaatcgaatgcatgaatacgcttattttcaagaaaacaaaatacctataaatttgagtgtggtgcttatttttcgataaatataaaagtagataacaaataaatgacaattacaatatcttgtacttatgttgatcaaattaagattagggtgttaatagattttgatatagctgttaggtatttatgttttgtcctttttttttgcattatgatgtgtgcatatcttagtttgcaatttctcaacaattatggttgtggaaaaatcaatcaatgttgaaagtgcctcctcaaataataaataataattcatattttgaagcaaattatgtaaattgtttttgataaggaggcaactcatgttattatgtcaagaaacctcttcacattgtttttagttggtagttgttagtcttggtcatctttaaatgtatgtatgtatatgtgtatgtataactctctataattgtatatcatactaattctttgacaagtaaactaataatgtgaaaattgatgatatttatctaactattcctattactttagatgagctttattgttttattgtcacatcacatcccataaactttattatcatatttgggtataatattttagtacattatattattattttttattattataattaattgcaaagttacatgttattaagtggggatagtcacccgcctaaaattaaaatcagtcataagttattttgagtgtaggtataaataatttttttttaggtatttatatttatatattttcctggtcaaataataataagtaacgttgtttagtagtaatgtgttttgtaaaaaattatcaatttgactttttgttttgtaaaataataaattggaccttgtattttcaaaatagtaccttgtgcttaattttcgatgattttatatatatatatatataactaacttgaaaataatttttaacacaaacagatacagaaaatatacttagttttgtcattacaactttagattttgtcattattaacttttattttgacaaaaaattagttcagatactattttaaaaaaatacagggtgtctaatttgtcatttaacaaaacagaaagttcaatcgataaattttataaaacataaagtctaaaataatatttacttttatatcaaaggtaattgcataaaaagttacttcaatacaattatatattattttacattttacatgttataatatcctgtaacgtccccgctttaagcttactcggtatttccccttactactcggtatttccccttacggatcacgagactactgactgtcacatatccaatcttatattttttatattaaaattttaaaatcttcacataatataaaaatatataatcactccattttaattttatttacaaagcttcgccttctataatagcaatagtt

SEQ ID NO: 187650 - DNA, 3385 bp, Cannabis indica
ttttattttacatgccatcagcgggttcaacaccccatacacaaacagtcagattaattttttacgtgatcagtgggtagattacgtgaaagtaaaggtgatttgctaagaactatgagtatttttctcaaacattaaatattttttgattaagttttttacaaacattattattttcatgtctatatgaaattgtataaatctaaaaaattaatacagagaaaatatgtatgaaatttaccttttttttttccaatgtttcgtcagaaaaaaaactatcggtgaagaatatatttttagattttaacccgtagctcatactataagctacggtttaaaattatagcctataatactatatgcgacgattttaaatagtgacctatattgcacactatatacgacagttttatacagtcgagaaaatttttgcagagaattttcaactattacttattttattcatattatgacagttaaataagcaacaattaattataaagaccaatgacaatattttatcatactctttaaaatagtccaaaaaaacaaatttttttagtagtgaaaggcatgtacacatgtatatatatttactgtatacacataacaaaactttttgaagcggaaaaaaacaaaacaaaatctagttatattcactcgatatattcagcatgcacgcactgtacatattaaccatttattttaatttctaatattatatatatataattttctattattaatcatgcactacatattatatataattaaaatcttgcaaaagaccgatatagctaagtaggacatatttttaaggctaaaaatagttctagggttataatttatttattgcttgggaactttttttacgaaattacaacaaaatattataaaaacaggctagacagttaaaataatctgatataaaactgcaatatatcataattttatataatatttttcttcattgactcattcatctccctttggggtaatcagttatctcggagaacacagtcccagacatccttttcctagaatcgtcgtcgctgctactactgatcagtttagtagtggcactgctttttgactcggtcgtctctgcccagctactagtaaatgtcccatcatcatcaccaatgtcaattttattgccataagttttcaagagagtaacctcatcctcagcatccttcgtctttagttccccaccatcaacactgtcgtaattattagaatcccaataattctgtaattgaagtgcaaactccaggctccacacaatgtccttcatcgaaggtctctctgtcccattatccaacatacattgcataattaactcaccgtatttcttcaagcactctggtgcaatcttacccgttagatacgggtccataatctcatgaagcgtttcgttctgatagctattttgtacccattcagcaagggagacttgtcccttctgtgctgtccttagtataggtggcctaccacaaagaacctcacacaaaacaacaccaaatgagtaaacgtccgacttttcagttagctgttggcgcctatagtattcagggtccaaatacccaatactacccttgacaactgtggtgaggtgggcattggacatgctagtgggcccagtttttgataaaccgaaatcagaaaccttggccacccaattttcatccagaaggatatttgtagttttaacatcacggtggatgattgtatactttgtccctgtatgtagataatgtaagccattagctgctcccatacaaatctggaggcgttgtgtccacgtcagaggtgggttgtcagttttgtaaagatggtcacggagggtcccattggacatgtaatcgtagacgaggatcatttcggggtcttcgttgcaatagccaatgagagagacaaggtgtcggtggcggagatgggagagcaattcgatctcatttttgaactcttggatcccttgagatgactcagtctttagtcgtttgattgcaactggtatggtcccattgtctatgtatcctttgtaaacgttgccgaaacctccgaccccaataatgaaaatattttcgaagttatttgtggcagctatgatctcaaccaatgagaagtcgcgacagcgatcagacggcaatgatgatgatccgcccgctttgcttgacttggtcgtagcaaaggatttgggggcccacctaattcctttgctggaggccgagtctttgatttttcttcctcgccggacgacaaaaaatgcaagagttgaggcgataactagaatagaaacgacaccgcagactataacgataattagtcgattgtccattttccgagatgaataagatattagctgaacatttaggcttcgaatcaggattgggaccggcaagattattgttcaagctcattttgaagatctccactccattcaagattgcgtcgacgtaagtagatttccaatctttttcatttccttgcagggcaatagagaggttcattctcttctcttcattgttgttaaacattgggactaggtattccctaacatatggaatgtatttaccaccagcccataaaataacatccgctgcatcctctgctgtttgattggctatgtatatataaaacaaccgatcaccagtcttgttcatttcaaatacaatctcgcaaaagtgcaaccttaccctgtagttaaattgagaatccacggggtattcccatgtgagcttgaagcgcttcatcatttctctatcttcaatacctaatgttctggcagttcggtagagatcagttggtgctgtgtaattggggagcttatttgagaattctatagtagcggaagtgttgatgggcataagactatgtcccggatttgttaggtacggaccgtcaagatcccaattcctgaaaaatcccgtgtcacgattgggtgtaataggtataccgccaccaatattcattcgatacacagtctccatagcggtgtcgtttttgaactgcgtgacggccctattaagattcaagttaagtagaccatgttcagggtacgcgttattatatagatctgccggcaacggtaccacttcgattccattgattagagcaaaggcacctgaaattaaattactaggagtgaactttatgctcatcgaattcgaactctccacgtttacgtagtattctttcacaacgactttttctccaaaaaactcagcattgagagaaacactgaagttgcttaggagagtgtatttatcgactttaactgagaaaaaagcttttgaaatactgaagttttggtatgtatccgagtaaaaagtgcaaccgaacgaactttggccctgcggttaccggtatggtgtaagtgaat

SEQ ID NO: 187651 - DNA, 5805 bp, Cannabis indica
agctttgaatgtagtggcgtcgcggttgagcagggccgagccaccacttggccgggaagtggttgagtacatgcttgatcatgattctcatatgtggagcatgaggagaagcaaagccaacttctttcgcctaatgaatgtcgtgtctggactcattgacatggctcgtggggccgaggcaatgaggaattggcaaaagccggtgtattcagctctctttgttgctgtgtttctcatgttggtgacatttcctgagcttattatcccaactgtgttattctacatggcctttattggcctgtggaggtataggtcaaggccacgccaccctcctcatatggacattcgtttgtctcatgctgagagtgtttaccccgatgaactcgatgaagagtttgattctttcccaactagccgaagtgctgatcttgttaggatgaggtatgataggttgaggagtgtggcgggaaggattcaaaccgtcgttggagacatggcttcacaaggcgaacggttccaagcgctgatcagctggagagacccgagggcgagcttcttgtttgtgatcttttgcttgattgcagctgttggtctgtatgctgtgccaatcagagttgtggttgctttgtggggtttgtatgtgcttaggccgccgaggttcaggagcaagctgccttctcgcgctttgagtttcttcagaagattgccatcaagggcagatagcttgttgtagaaatcttgttatggggtgtttttagatttggtaaaaggatatgattagattaaggaaagggaaagacttttggttctgttttggtatcatttccctattgtcttagtgtttatttattagtaactagtaaccatattgtgtatccatccatctagctaataccattattgttattattaattatgttcttcactgtttcatttcaattctccttcaatgttaaattccaagttagaatgtgatgtgttatatgcaagttctattactttttatgcagtaacaaagggaaagatatcacaaaaacatgattgtagcttagatttgaattttatgattgaaaaagtcatcctattagaatgaatccattctaaaaatgaaattgattcttttccattccatttcataaaatactaaagaccaagcaaagtatattattagagagctgaaccactataaattatgttataacaaatactaagataagagtaagggatgatcaatactaacattgacattgttcaagtacatacaatatcaagttatgtactatactcaatatggaattgatggtacattggttttatgtgaaaagcagagttgtttcattaaggctataagcatcatcagctgaagcagcatttgctcagataggtcgcctttcagtccaccgttcttggcttatgacaaatttgactcattttccgagtttcttatttacttaaccaacgagggattggtttgtcgatccaactcaaaaaacggagagaggcatggattggttcgatgaggaagcccagttcgagctcccaacgctctacagcaggctcccgcctggaaattaagcatataggaaaaataggtgaatgtgaatgtgaatgtgaatgtgttagctaagaattattctatcatcaagggtactaatgagtaaacttaccactagagcagcaaaaggcaacattttctccactggcattttggcacaaagagctaacaaaagaaatttagaataattatcattgaggatgatcaatcgaaatttcactacggcctcagtttgatcaagagtgctaattacaaccttctattacaattctttttcttaatttttgtatacgaaaacacatgctagaatatttttttttaacaaaaaaaatttataatttcgttatagttacaacatcatcattcttataaattttttgaaaaatttctaatagtttacagggttcaacaagcgtgataaactggaatattaagaactctgttatcgatactgtaaattattcgaaatttttaaaaaatttacagaaatgatgttataactataacgaacattaccgtgaaaaagaagaaaaaaaatattttagcatgtgttttttgatgcagaagttgagaaaatagttgtaataagaggttgtattaggaactcgtcaaaaatcaatatctaagacagaagaaaaacttggatggggtgttggcttggcaaaaaaatgaagaaagtgttccagtgaaacacaaatttatgaaactagaaagttcattgggtaccataaagaactgctccgatgaatgaatcaccagcgccggttgaatcaatgagttccgaagggggtatcttctcagcagtgcccaagatcaacctcccagaaattgttcctatcccattagctcttatattctccacagactgaggtttcacacaaaaaagtattagaagctaacaaaacataaagccattgtagttgcagttaccaaaaacattataaaaagtttaatacaagccatatacattatcagaacaataacaaaaaaaccgttaagattctgagcttttcgacacacttggatatctccccaagtaaattttactcttaacagtactattagcatagctcacttaaatgttaaaaacatttcatttcagccgctaagaatttgacaactcggcctttatagagatggtgatattgtaactataacgaaatcataatattctggaaaaaatttcgaaagagtccctaattggggttaacgaaattgatttaccgatgaaacgcacgtgggaaacgttgtagtaccatcctttttttgctttagagattccaataagctctctacatcaacttctttgctgggagtctctgtcaaaatcagaatattatatcaatattcacatcttctaactcttcaaaccatattcctacattaaaaagattgaactaagatctaccatttacacttctctccagcattatacacccctcttcacctaaagtcactatcacaaatttcaattttggcaatttcaaaagcatggaaaccattgcatttggaaccgattgggctcccgaccatgcctgttacaaacgagttactacatcaaatctgtagatacagaaaaccatgatggaatagatatgttttaacttgaaagaaatcatttgataatgatcaacttacctttggaaattttacagagcatacaacataagtagacaagtctagaagttcatccaacccttctcttactctttctgcatcaactaaaatagggatatttttgcgagctgcctgcactagaaatcgttatgccaacaccgaaacaaattacacattgaccgttatacaacaacttcaccgttatgattacctcttgtgccacaagccaagcactttcgtggagacggccatcaaaataggcgattcttgcaccttccactaaagattgcacacttgattgggaaagctcgtcgggtttcatggaaggatatcccggggtatgaatacaagtacgagttttcctacagtatcactttagattaatgaaatgagcaaaaggagaagaaataaatgattgcaaaacaggtttatcatctccaaacttattgcaaacaattcaaatataagtgagtgataaaagaggagaaagtagggcctcactcacgtttgatcatcaacaataatataggtaaatggtgaattaccatcctttgcaacctggaaaagtaagccttaatgagtcaaaaagtgcaggcgaaatgcttctaactgtcatttttctctttccattctcgaaagaaatgaataatttattgaaaatttgaaaatattggcgtaaacatcttaaagaaaatatgaaaaatcatctagcaaaaataagttgtttatcccacgaaagagcatgcacaactaatccatacaaagtcacattagcagttcaacgaacatggattagagacactcctaaaaatctcggtgacaaacttgctaaatcctcaaagatccaagataaaacgagtcgcttagcgaaagcagacacagctgctaaactacagtagtttatatctacttcaacgaaaatatgtgagtctatctatacatgcaatttgtaaatgattcaagtaaaagacattaaaaacttatcataacttacaacaaaaaaagaagtatctacaccatcagattctagctcctccagtatagccttgccttgagaatcattagcaacctattatatcaccaaaatcaataaccaaaaatcctctaaagagaacacaaaaaaaattgaaagattgttcattttttttacataaataaagctgagaggaatatgtgagacaacaaatttaaaaaccttggaaactagccttggatttaagcccaaccgagctgcacaagtcaaagcgttcgcggcgtttccaccaccttgaacctaaagaaacaaagcagtgaatgtaacacttttattttgggcttacattaacgttttaattatttcttgtttaatgtatagttaacgagcttaacatatctgtgaaatctagttgaagcagaagtgtggatttttctaattaactgaacttgagaggctcgattctccctaactctataaataatctttattatttctcaattattgctatgattcatcacatatgtttttctatattcttcaattaaacaatgttctaaattgtattgtcctgggattttataaatttctaaaagtggaagcaccaaatttaactcttcatttccaatttccaatctataaatgtctataaagctttaatgggcaaagtattaaacatcctagttactgagtcaactcaatgacacacacacccaaatcataaaaatcaaacctttaagcttgtgcttctgattttatcatctggtttaggaaaagaagacactgtagccaagaaatccactccagctgaaccaagaccaacctgttaaacaaaacccaaaattcaaattcagttaaaaatcccaaaaacaaaacaaagacttgacatttagacacaatgggttacttacaacaatacggtttctgggattggaagggaattagaagatgacattttgagcctggaaaatttcccaagttaaaaaaaaaaaccaaatgaaaagaaaagaacaaaatgaaagggaagaaaagttcaaaggagaaaccttgttgagtgaggtagagttatggagagagaagaagaagagagtgtagagcgaaaaggactggcattgggtgttgttgttgtatttaaggagagcattttttgttaaggtgaaaaagcttggctatggttatggcttggctctgccactcatggaagctgattaatcatttggtttttcagttgacagagaagagtgtttgggaccggtaatatagttattcttagccggaattggattaacactattccatgatggaattaactatactcataagtcaaagaccaaggccatatttgtttctgaataaaaataaaaaataaaaaaataaaatattatatgttaaacttatgtcatgtgtatacatttatagataataaaatattaatgattcttaattttatctataattcttaaagagtagtagattcacttatataagaaaagaatatcgaatctctccacgataaaagtgacaaaaataaaaacaataatacatataatttgttaaataaatatatattttttaattgaattcaatatcctgagctatgtggtcatacgagattggtcggagaatttttgtaaattttcaactaatctcgtgtggccac

SEQ ID NO: 187652 - DNA, 6033 bp, Cannabis indica
taaaaaaaaaaaaacaattattacaacattacaattaaaaaacaaaagtgttaaagtccctcactaattattgtaattaaaaattatatatttattacagacaaatttggtacagtttttagaacaaaagattctctgcaaaagttggaaatttttttattattttttaaaaaaataaaaatgatcaaagaagacctttgtaactgtttaagtcaccccacacagtgtgctcaacttcttcccaggattttgcttcttttagtccgtcccatatactaaatatagctcccaatatattatcttcatgaacaatacaatagcacctacagtggatgatgacacataaaaaacgttagttgataataaagttgacactgtgtagcgtatgcagtgctgtagaaaattataaatagaacaatgaaaaaatccaaacttaaagtcattattgggatcaataaaaaagatttagacatagttgctatgcaactttattattgtggtcatcacagaaactttgtttattcaccgggaaaatataagttgttcaataattaagctccgctctgtgaataggtaattcaataaaaatgaatacatttccattttactcctttgtttggttgaaatttaggtgacatttagttggaggtaataaaatagaatgaaataaaaataattttcattctatttctttatttagttgcattttaaagtattagaatgtcatttcaattgaacgtcttttctatcattttggtaatatgactattctattttgaaatagaaaaaagactattccaatgtaacatgagaaaaaatttagtaatttttttatcaattttattttatacattttaaattttattttattccaattcccattctcattcatattcttatgtttttatttctctcaaccaaacgccacctagtataggaatgtcattccaagacttttccgaaatgactatttctttccaaaaagggtccaatatcaagtcaaacatggggtcacctatagcctttttctcctcccaacaaaatgtaatctaggaggaaatgcggaaactaatcaaaatgagtgcaattatcagatatagatgatataatacaatccgcatagcccttttcttctccaacaacagtagtcacaagatccaacaaattgtggtacacgtcatattatttgatatttatataccttttaaataccacaatttttctaggttcaaactcattccaactttcttcaaatgatgcacatccaattatcagatatagatgatagatatgcagtgtgtttaccaaaatatctaacatattatattgcacgtaattcaaggaaatatagagagataagatgaacgagcaaacatatacgaagactaggtgaatatcacttacatagcatggtatgataatcgttcgtacttgtgaccaccctcccctgacttgggctgatatgaacttttcactaatggaagtttataactttctaataactgcttcaggaggcgggggttacctctaaaaacatccaagtataagggtatcaagtcgaaaatggggtcacctacacaacaaagggaaaagaaataaaagactaaagtattgataaagaaagtagtaaattggtaccgcagcacaaagaaagtaatacattgtttcatatttcaaattatgtacgtatagttttacggaaaaaagaaattatgtatgtataaatacttcagtttccatctatccatatcacgcatgagaatttactcagatcataattgaaatatacagtaaactagcacataaacatcaataaatggaccagtaattttcaaatggaagaactaaccgacagacagatcactgaaatcaagaaggtgactaggatgccatgatttttccattgaagtgtcatcacagccattcatggagctattacatggggaactagcttctttcaaagcttcactcaatttagaattcttattaccatgttccatgtgaatattgtcgtccataatatccgagtgtatccaggagaggggtttagaaactttgcttttgtcattttcaacctgaaacaaaaagaaaaaaaaaggaagggtcaagatatatagaaacatatagacagtggatcattctgacaaagtgatcttgacatgattaagcatgtggatggatgagtaagagacctcaaaagcaaatagcaattcagcaaaattatctgggatgtattcatcaactttcccaattagaaagctaggaatcggatcccccctgcagaatgtaactcaaacactttagtaaaagtttcacatcaacccaaagaaaatctatcaacaacaataggcaacgtagcaaaagcttcatagatgagtagcattcaagtacaaacttcagcatctttagtcccagatgagcatgtgatttgagcaaaaatgtataagagatacaggtttgtttaaaaagcatgaactcttaaaaagaaaaaaagatccctccctccaccccttcctccccccccctctctctcacagacacatatgcacacgcacacagacacatcattataaaacgggaattgtaatcctcttgagtgtgtacatatagtagtaccatgtagtcaagcggttagaggcatcctttttcttcttatttagagttttgacaaagatgtcccattcagctggcatgtttaattcatcaaaagcttccccataaccattagtatggttagattgtactgcactttcagtatctgataaatttgaattacgagatggaagtggcaacaaatgaaggtggcgtagctgctcaccgagaaaggaagctaaatttagctcctcttcccagtttagtttatctcttctgcaaaaggaaatatgagaaaaaagggctcaagtcagaattatgctacctacacacctacagataaatatcatcaaacgcgacttaaagaagcaccaactaaaataacttacaattgtgcaaatatttttccttcgcatctttttgttatcatgtatggccatatcctagtgcccccaactaaattgaatgacgtagtcgtcatcccagcttttctatagtcatattgttgcttactccatatgccaaaaggaaagctaccttctttcttcactgaaagaaaatcacacttggaaataacttcaggaactccacttccatcccaaggtacaatcttataagacccattttcaaggtaaagtatcccactgctcaaaacttcagggatatatttttgcagaggagagttgacttcactaagaaggctgtgaaattcaagctgtgaaatacacacaagtcaaaaacaaatatacgtacaaaagatgcacacacagaaatataataaacgtacgtatataaagaagaagaacaagaagaagatgaacctcagtgcctaaaccataaagtgaggtttccagtccttcttcaacaaaaattttcaccacacaattcggcatgagataaacctgttgccaatgacatgtcagattctttacttcaaacttcatttgcatatatattgatttgtatatcacaatagaagttataatcttgaatcatagtaaactaactcacaggattgctaccagtgccaacaggaagcctttcaaactctgtagggcgaggcaaattgtggaagacacatatttcagtcatgcattccaaccatctgcctgcatctagtgcgatacatgctccctgtaacattaaaagtaaggagactaacaacaggagaaaataagtatttcaaaaaaataaatttactaaggcctttaagagaagttctagttacagttttttatttttaataacaataataggggctaatatatactcagatgaacagacagggcaacgaaaagaataatgggtggttcgacaatagaaagaaattgagtaccttccatattagctctcgcatttctggtttacctacccaaagcctgtacaaccattccctcatttcccgttgtcccatgcaattacctgagctccaaggagaattatagtggtctctctctttatcaagaaacttagttaagaaatctatatcataagagaaaccatttttccacaatttgtaatttttggcaacaacatgatccatttttccatattttggattctctccaggttcaattaatgtccttgttacttcccttaaaaggtcagagcaattcaaatcgtcattatcataagagatgtttttgacaatattctcaaaaccatcatcatcaagtgcaagcaaaccagcacggcagactcccttatgacggtatccaggtgccatatccaaacaacaaattcaaagtttcgagaatttacaaaattctgtgtaacagcaatagttgtttctagatttaagacacaatgccaccatccacttggaacgtaaattgtctccccagggagttgagtacactcaattggtttatcttcatcggcaaggagtggataaaaatctaaccaccactgttcacatatataaaattcctcgagggtaaatttataaggcaaagaaagatacccaattacagaaagagctagagcatttgaatggtatacctgcagtgaagttggagaatcaatggcgacatcaccatcttcttcatttacatgaaccgttacacctaaaggaacttttccaggagggtacaatgcccatctgtataaaaaagattaccaagcgctttagatggataaacaggagaagattgtatagccgattgtggattatcacttgggatagtttatcaggctttggaagattgtttcagagaagccttggttgttaattaatcaaactagaaaaaaagccagtgtgcaaacattaacccaagtagaaaaaaagcctagtttcaaggagattatattttcaaacacttcacatgaccacattcaacaggacagggctaaaagtatactgcttttaagctgataatagaccttcaccttttacgaccgcataaaagggtattccaagcactggtaagagctggatcaacatgccaagaggcaccagacctctctggtccaataatgagccatctaaatggaggtcgctgatctctgtctaagatatcaaaaaagtcttcttcaaaaagatgaggcacattataatccttcaacaggcctggtgctacttccccaaactgcccaaaaattatactagctcaaaataaaataaaatagaacatactcacaaatgtatgtgcgtgtgtatatatatatacatagagagagagagagagaggaagaaagcatgccatatacaaatgcatgaccgtcaatgtaccttgtcgtcaaaaatatacaggggatcttcatcgtgctgcagtttcgtgtatgagacataatctttgaatttcatcgatattttattcgaacttctctgagaaatcttgaatgatgtatcgccatagctcatcaataactggtctgttgtccatgtatgctttgctggccaagtgtcagccaggccattaagcaaaatctgttaacatggttcaatcgctgacaatgtgaacattacttgaaaagaaagaaaaaaggactactaacgacaagaagtaaaaggccttctccataaataaggttctgttttattagtgttagtaaaaataaatttaaaaaagtcttcccactttaagaaaattgtgatgtatttcaatgaagtgttataatgtccgtgaaaaagcaaggtctctattttcaaggtgcaatgtatacccataacacttgtaaggaatagggaagaagctattctaccatctaaattcagtatactcttgcaaactcaaaaagtaaactgttatcaacataccggtttcttcccatcatactcgcaatagaactcttctaaagaaggattttcctttctatccacatttcccttgtcaaaatcaaaacccgccaatgtggtatagcacctgtatagtcttttatagaggaaccaagagttgaatcctgagacaaaagtaaacaggcaatggaaaaagcttattt

SEQ ID NO: 187653 - DNA, 2662 bp, Cannabis indica
gtaaagaaaagtgtacaaaaaaaaaattaattgtaataataataataataaaaaaggagagaacacaaaatatattataatttttttttaaaaaaattcttaaattttaaaaataattttaccatttttttttcactaaaactaaattataaaactattaaaaataagcgttactaaaggcatccaaaaatgtatattcataatcacttcgaatgtaatggccagtatacagcttgcacttaattttctcgttttctaatgcaatatttgggataacactaatttatatgaacaatatgaatttaattacaactccttaattaaaagaatataaggaatcaacatgtaaaaggaagctttgatcactacctataatcattaaatcatatagtctgttcactttcatctacattttgtttgtttgtcagtgtgttagcagtaatgtagctcaaatgaatcaaaatctcataattctctaatataaacctctcaaagttgaactttctgttggggttaggaatgtgtagatagaaaaaccgaaaaatgtaggtacgtatagagtgttcttaggtatcacttcttttgaaaagttatcatgcaaatgaaggcaagcacacggctaataacaccgatgaggatgagtactagtatgcatagaatccaatgatgaagatcatagtctgtctgttgaagaattgcacaccgagttatcagccagactccatagtgcctgcatttcgggtccagattttttcttatataggaataggatgtaaattgtagctaattctgtaatgttatgaaaagggttattgagttatgacatacctttcagcattaccaatcacaaatgcttctaaagcccacctagggtagcaaatcttagcaaaattcatgaccattttacttccacttgttcgtgatgagataagagtcagcacaactggaagaagtacagaccactgcaagaaataatagcttcattagaattagagaatgaaacgagaaaattcgaacaaataaatatattctctcttcttttcttttaccagttgagctgtgccttgatcgaagaagatggcaaacgcgtatgctataccagtaacacaataaacaagacagagaagaacagtatagttatctgtgaaagaagatcttggattggtgaggaaatagaatgttgagagatacaccacaggtttgaccactacattgaaaagatcaattgaatccttagctagaaaataagccaaactgctcatgccagaggaactttctctccagtagtgtaacttatccattgagaacgatctcagagccgaaattttgcacagaagagctgaaattagaatgaaaggcagtaaaagaagtcaatgccagaggaacttttcattgattgcttacagtataactatcaagtacaaaaaaattatggcgaaaaactttttctacttacaaactgcaataatggtataagtatatgcagctgcaccaaacttatcactcatattagcaagtgatcctaagcaagctccagcaagtaataaaatcaaataatcaacagcttgcgatttagcttctcgaagtctctgcttaccaaccctggaatgccattaacacaagatcagaagatgcaattttctagcaatatgggcagaactagttagatatcacagcttaaataaatacattttgttttccatagaagttgaatttttcaaaaaccttctaatatttgctaaaaatataataattcatgttgccttagatttttcttccaattcttacaaactggagaaaaggtttctactaaattatttcggtgtgtgcattgaagtggcgtgcgcattaaatggatccattccgtgacatgacatgatttatcagtaactcaacattggcaccgtataggatttgcaagatttactaataagattctcagtagcacatttagaaaacaagaaagataaaaaagaagaaggagaagcatttttacctcccaaggaagtatttatattgttggaatacatttggtgttcttcgtcttgataaatctttggtactcagaaaattgagccggatcttatcctggtgcagcaccacattatttttcacatcttgccataaatcttcggcaaatgactgttcttctgcctcagcatcagtaggatttggttcataagactccacagatgttgaggatgatgcaatatcaattgtattccgcctcaaatcagggggcactctgtaccctttatgaatcatccatctgacaggaagctctttataatctacttttgcacctttatctggaacaacaataccctctaagatgtcgatgaagtgatctggtggatttacacgatcagggataattatcccaagccctgcaaagtagtcttccactttcttcacgggtccatgatacacagtaagaccaccctttgccaggaggatcaaatcatcaaacatcttgaacaaggcatagctgggaatagaaaaacttctattagagacagtgagaatacaaaaagtgagagactcaaataaacttttggttttgaaggactgtcttccctagaccatagaaaagactgggagagtttcctgtactagaaagtttacattcttgttaaagattgctttcatttaaatgtatttt

SEQ ID NO: 187654 - DNA, 6306 bp, Cannabis indica
acaatattgtttttgctgttatcagataccttttattgctatgtatcgaaaagaggagtgtctaagcttgttgaaggatcctgatgatgacaatcaagatactgaaagaactcctagtctgaagtggcataaggtgaatgtgttcttggctaaaacaactgttaaatactgtgtgatcttagttttaaaaatcggtcgagctcgaggcgaattggtgaaaaaacgtatcgaggctatgcctcatcagctgtcattgaggtgtacttgaggcgcacacctcaacagtgggccttttttgtgtattagggctgttgttttgtgggctgatttgggcgttttttttttttttctaaaaaaaaaagcttttccaataactattttcagacttttaaatgactatgggatttagtttaggcctttttcaacagatttttaatagaaaaatacaactttaaaaaccccaagcctctcatacattatctccgatctctccgcagtcgagtccctccttcgtcagtcctcatctatctcacgcatgtatttattctttatatgttttggacttttaccatttttcatttgaaattgaaccttttatgaatttagttcatgattttaagacttaactagtatttttcatgaatattatgactttgttatggaattatgtgtttttttaatatgaattttatgacgtttttcttcttattgttgaggcatatgccttgcgagactaagggaaaatgcctcagtactcgatcctgttggtgaacaacagaacttaatgaataagtgtttgcgtgcttctttgcaggtgctctgggcaattcaggacctggacagaaagtggttgcttcttcagaaacgaaagagtgctctccaattatactacaataagcggtttgaggaggaatctcgacgtgtttatgatgagagaaagcttgccttcaatcagcccatttttgagtcaattatgaatgcacttaaagctgcagcatcagaaagagaagttgatgatgttgactcgaagtttaacttgcatttcccagctggtgaggttggtgccgatgaagggcaatataagcggcccaaaaggaaatcactgtatagtgtttgcagtaaggctggcttgtatgatgttgcaagcaagtttgggtacagctctgagcaatttggattgcagttatcattggaaaggatggtaagtttgtttcttggagttaccattctttttatgttggaactttgggtaaatgtgtgtatgtgtttatccaattcattgtagaggatggatgaattggaggatgccagggaaacaccagaggagatggcttctacatatacttgtgccatgtttgagtcacctcaagctgttctcaaaggagctaggcatatggtatgccttgattaactttgtattctctagtatttaagttttctttttgaggcttcatggtgttgttaatttgattttcctgacagttagttgtgctttgtctcaggcagctgttgagataagttgtgagccgtgtgtcaggaagtatgttagagccaattacttggataatgttgtgatatcaacttgcccaacagctgatggcaaagttgcaatagattcttttcatcagttttctggagttaagtggctgcgtgaaaagccactaactagttttaaggatgcacagtggctcctcatccagaaagctgaagaggaaaagcttcttcaagtgactattaagctgccagaggagaaactaaataagttgataaatgacttcaatgagtactatcttagtgatggtgttagtaagtctgctcaactgtggaatgagcagcgaaagttgatattgcaggatgctctttttacttttctcctcccttccatggagaaagaagcaagagccttgctgactagtagagccaagaactggttgctaatggaatatggaaagcttttgtggaacaaagtttcagtgggaccatatcaaaggaaggagaatgacatgaactctgatgatgaagctgcaccaagggtcatggcttgctgttggggtccaggaaaaccagccaccacatttgtgatgctcgattcagctggagaggtgctagacgttctgtatactggctccctcaccttacggtctcaaaatgtaactgatcagcaacggaagaaaaatgatcaagaacgggttttaaagtttatgacagaccatcaacctcatgttgttgttctaggggctgttaatttgtcttgtacccgcctgaaggatgatatttatgaggtgagcttctaactttgtagtgattgaaattgctgttggatacctttttatacaagtaactaaacttgcttattgcttatatatatattttgtttatacataattttatattgtatgactatagcaagctgaatcgtattatataatattatattattatatgacttacaaagctaatataaaatacattaatacaacgtgaaaggtgggtgtgctcttaggtcttacgcttggacctttcatttccttgccttttctttgacttcattttatgtcatgactgtagtagatcttccttcatatttggatctttggtcagtgaaatctgaatttaatcctatagttagtaactaagtttgcatgtatacatattttatttatacataatttttattgcatgactttagcaagctgaatcgtacattaatatatatttgacttacaaagctaatattaaacacattaatacaatgtggaaggtgcgttgctcttaggtcataagcttgaacctttcatttccttgctttttctttgacttcattttatatcatttttgtaatatagatcttccttcatatttggatatttggtcaatttaatctgaatttaatcctttagttagtaactaaacttgcttatatacatatttttttattgtatgactttagcaagctgaatcgtacaataatatatacttgacttacaaagctaacataaaacacattaatataatgtgaaaggtgggtgtgctcttagtaggtcttactcttaagcttggacctttcatttccatgcaatctgaatttaatcctttgtttttcatttttcattttaatcctgataaatttaatccgagtatagcttgggtgctatataaatatgtggctatcctgatatatgtttttcaatgccatttgattctggaagcacctcacacataaccttgtattacaaattatttttaacttttgaagatcaaatttcatgcttttgaggccttaataatgttgtgcataaaataattggattgaataaattacgaaatggttagagaaaacattcttcattttgacaaatggaatttacttttctcttgtttgtatcagattatctttaagatggtggaagaaaacccaagggatgttgggcatgacatggacggcctaagcattgtgtatggagatgaatccttgcctcgtttgtacgaaaattctcgggtttcatctgatcagctacctggacaatcaggcaagtattttgtcactaacatagatgttttaggagttattaaaaaaaagatgtaattggattgaatatgtatattcgttgatcttttcccttttattttgttaggcattgttaaacgggctgtagccctaggaagatttcttcaaaacccactggccatggtatccacactatgcggacctggaaaggaaattttgtcttggaaacttaatcccttggaaacctttcttaccactgatgagaaatacggaatggttgaacaggtcatggtagatgttacaaaccaggtgggccttgacataaatttagctataggccatgaatggttatttgctccgttgcaatttgtttctgggcttggacccaggaaggctgcatctcttcaaaggtctttggtaagagctgcgacaatattgactagaaaggactttttgacagcccatgggctcggtaaaaaggtgtttgtcaatgcagttggttttttgcgtgttcggtgcagcgggatggctagcagcagtcaattcattgatttgttagatgatacaagaatacatccagaatcctatgcccttgcacaagagttggctaaagatgtttatgatgaagatggtgcaaatgatgatgatgatgcaatggagatggcaatagagcatgttagacatcagcctactattttaaaaactctagcagttgaggaatatgctaaaagcaagaaccgggagaataagatagaaacattttatgatattaagagggaattaatgcacggctttcaggactggcgtaaacaatatgaagagccaagtcaggatgaagagttctatatgatctcaggtgaaacagaagatactcttgctgaggggagaattgttcaagccacaatccgtagggttcaagctcaaaaggctatctgtgttcttgattctgggttgactgggatgcttatgaaagaagattattcggatgacgggagagatatctctgagttatctgacagattgcatgaaggtgacattctcacttgcaagattaaatctattcagaagaataggtatcaggttttcctaatttctaaagagagtgaaatgagaaacaatcgatatcagaatgctggggaccttgatccatattaccatgaagatcgaagcaatctgcaaagtgagcaagaaaaagctcgtaaagaaaagaactagcaaagaagctttttaagcccagaatgattgttcatccacgttttcagaatataactgcagatgaagcaatgcaggtatgttttcaaattagtgcgtgcaattattatttatttttttgcatgatcgtggtgggtttgaattatgtgttgtgtagtaaatttatattttattttgtaagaaaagataaaccttttgtatgtatgcaatgtattaactctatagaacttttgaagaatgatctatttttcaattaaccataatgaattatagggttattttctgctttcttgattgatggcttttcctttggattcttattgttgactgcatatttggacttcaaatgataaatattcacatttggatttaaatggtttaagaatttttttccttttactttttctttttcaagaaaagagacaaaggtcacttgtcttagactgacctcctcccaagtttatttaggtaacctcacttatgtcagaggaaagttgtggtaataaaataacataagaaattaaggcataaaatacagcaatagcactttcagcactaaacctgatacattagagcctatgtctataaccccaaaccaagggactaatctaaaattgatacttgtgttatttttctctttattgtttgataaaagcttatattttttgtggttgttttttgatatttttatggtatcatttggagttgtatattttacccagttattgggattaagaagccttagtttactattgggaggaattatgaaggcaaatgtatggctgtttttataaatttattatgcactttgaacaatgtaaagacttggttgattgagcaactcttcatctctttttgtttcagtttttgtctgataaggatcctggtgaaagtgttatccgtcctagttcacgtggaccttcattcttaacattgactttgaaagtttatgatggagtttatgctcacaaagacattgttgaaggtggcaaggagcacaaggacatcaccagcttactccgtataggaaagacattgaaaattggggaggacaattttgaagatctggatgaggttagtttcctatacatgccctttcatataattgttggaccttctaagtctttgagtctaacctaatagttaataattcaatttaggtttcattgctcttaaaattgttgaatataatttttgttttctgtaactgattacccttactgactgttgaacttgttttggtctttctcgtgtacaaaaccgtaggaagctaacattagaattggttattttattctggagcttatcgaaattattacttggataattattgctccttagggctagttggtggtgttcatggatttttcctaactcatttttggataaaaatttcaccatctgacttacgtggacagtgggaaaccttgatgtagcatgtttttgagttttattttaatttttttgtcttgtgctatttttcattgttaccaccagttctcgtctgctacaagtgaggcttttcaataaattagagtgggggtcagtccaagacaagtggcctttttaaaaaaaataaaaattca

SEQ ID NO: 187655 - DNA, 2054 bp, Cannabis indica
tttttttttttttgaaatggtatcgaaataatatttaatctacatttttctaacatttgtttaaaaaaaataataaaaataaacttacgtccaacaaagtatacctttccaattgttaagcaaaaaattccaattcgaaacatttgacaaatctgaaaatgttatcatttatttgttgagattttgaaactaaagtacgaattttgaacaatataatttctctgccaaattgtgatctgccctctgtttctcacttttcccattctgaaaaccctaatcgccatggcagattctatgcctcctcgtcgcatttccgttcaccaagctctcggcggtggatatggtactctttcctttttcatatttatatatcttctgtttgatattatatacgcttcttcgtcattgacctcaatttcaaatcaatctattttcatttaattaaactgcagagaaaatctatttggcatccaatgacagttgataactaattactttacatttatgttcaattttgaatttaatttacgcatatttatgttacatatcgcgcttgatattggaacttgattgtactatttgtctactcctctgaattttcatttttctttcttttttggggttagtttctgatgtgctgctatggaagaaatggagcgtaggagttgcagtactactttcatcaacggcgttatggttcctatttgaacgagcaggctacaacccgttatcttttgtggctaatgttctattgttacttgtcgtcattctcttcttctgggcaaaatctgcatctcttctcaacaggtatttgttaagtgttttcaccttgattccattttcagttggttatctcttgtcttgtctgatttgtagtggttttggttatgggaatttttctttgagtaatttccttcaactgagaaaccatttattgacgaataatttatctatttatccaatttaaattgaaagactgaaaaatagagatggctgagtgaatgttaattgagcttgctataactagaagttctaagcgaaatcagagtgcattcaagttatataagaaccaatgcagattaagaaatgagtttcccttttgcgtggtttctgaaaaaaaaggtggatttaacagagatgagttatggctctactagattcgtgtaataagttacgggaatcttcgttctgtttgaagaaataagaagctactcgtattgattattgaatacatgtcttttaaaatgacattcgtcaatttacgtggtgtgaagttaaagttttcaagatggggtgatgatttattttgagatttagatgatgggaatcatcatttataagaagacataattacaaaatgtaattagttttagaagcttaggaaacttcaaaagtttccaggatggtgatgagttattttatacttataatctgtttgcagacctttgcctcctcttcctgatttagaaatttctgaaaactctgtcgtgattgccgccgatgtactgcgggtatgggttaatcaagcattattaattgcacgagacattgctattggtagaaatttgaaattgttcttccaggttaggtgttaccatcccagttgaatttttactccagcaaatttggtcaaattatacagaattttgctgttttatttgcttaactttctttttcaatattactatggatgggcaggttgctttagttttatgggtggcatcttatattggaagtttcttcaattttctcactcttgcctatgttggtgagatttctactgtgccaataaatgtttgtgattaagcgatttcacaaggccaaatatgttctcatcctttttgtttcttaattttataatgcaggggttcttcttagtttttcagttccagtgttgtatgataagtatcagcaccatattgatgataagctttgcgtaacacataagatgattcagacacagtacagaaaaattgatgaaaacgttctaaagaagattcctatgtcacttaataggaaaagaaggtgcagtggtaaaaatctctctctctctc

SEQ ID NO: 187656 - DNA, 1900 bp, Cannabis indica
atcagaaaagaggcaggtggaatatctttcagggcagtccagaaggaatttaaggctcgggtttcgcaaaactaccttgagatccatcttttatgggctggaaaaggaacttgttgcataccaaactatggtacttatggaccctccatttcagccatcagtgttataccaggtaacaacatgatctgataatttatttatagaagcaaatgcaggtggtttgatacttataagtgatatttatctaacaaatttaggagaaaacacaaagagatgaaaatgtactattttattgcattttgcaaattaagaagaatattactcttttacaatttttctcaataaacaacactataaaatcaaaaacccattttttgtgattacaacaatctaattcatcatccctccaaagttttcaagtattaatgttaatttaactttatacatattattgtttcaaaggttataaatctagcactaatattatttttcttttatataaagttcgttgcatgagattcatatcatattctctcatgtgggattggtttccccgtgtgtgggataccatagatttagctatttgcctactatttctaatagtttggcatttttcgacaaccatagcttggcgcgtgtgccattctttgctgatctattggcttttgtttgcgtttgctcgcctcattaaggggtattaatttgtcattttgccaaatcagatgaaattctaaaattgcaattcaaattaaatatcataaagctagtttgaagaaaaaatattgatttgatgtagtaatacaataaatcttgttgctatgtttaaactaatcacctaaacaaagctttgatatcaaaactaattgaagagaaaacaagaaagatatatgaagagaagaaaaggaaataagcaagttttgaaaatttggattaatacaatgataggactatcataacatgtatttgaatattagtattgttattttgatacagatttcacacctactgtgagtgacatttctccagctttaagcaaaaagaagaatcaaactagtatgattgtggggatcattgttggggctttcattttaagctttttgtctgctttagtggccttctatgttgttcaaagaagaaacaagtgtcaaatgtttgatgatgatggtaatcacttttcttttctctatgttgtttttcaaaaattacaaaaatgattttgtgttctcattttcaaaacacaattttgaaaacaagaaacaatgctaaacaaaccttaaatgaatgttattttatttacagagttcttggggatggatgttaagcctttcattttttattatgctgaactaaagatggccacaaatgattttgattcttctaataagttgggagaaggaggatttggacctgtctacaaggtattaatgtagctgcattaatcattatatacaaaaggaattcaaattccctttcactatacatttttgctttttgactcaactaataggggacacttaaagatggaagagttgttgcagtgaagcaattgtccttaacttctcaccaaggaaagagtcagtttgtggctgagattgccacaatatctgctgtgcaacatcgtaacctcgtcaaattatatggatgttgtattgagagacacaaacgacttcttgtttacgagtatatggagaacaagagtcttgatcaagcattatttggtataacaaaattttattgctgcttttatacaaataatagctatatcaaacatgattaataatatggttggtcacattatcaggtaagcaaagattaaatttgaattggtcaacgcgctttgacatttgcttgggcatagcaagaggtctaacttcctcacgagaatcgcgaattcgaattg

SEQ ID NO: 187657 - DNA, 3839 bp, Cannabis indica
ttatccatattctggccttatacttttctatactattttcatgattaaatataaataaataaaggcaagagcttgtacttctctatatataattattatattaaacaaagcgaaagaaagctgtttttctttaccattcaaggaaagcagctgaaaagggtctggtattgaatttcggattggttcctggttggggaagaattttattcttgtaattttagcataattcaagtggtttcaaggcgaatttgttggttattctgacaagtgacacctgaaagcaaaagggtatctggatttggacaatttcttgcggttactgatcggaatacaacagcttgacgatcaaaaggcctattaatttgaatctcaagctttgagctcaaaagggttctctcatagttgtgattgaagagtccaaagctgcaattttgtaaagatttttagctcttagaaaagagaaaaaagagagcttttttttttttttaaggatcatcaccaagcttttctgacggatccttcaattgaaaataggggttgtgattgtttggctggtctggagtgcatattaaatataatcagggccctgagaatggggtcctgcttatctgcagaaagcaggagccctcgtggcagttcaccgttgtctccctcacttggggtcaggaaaaggaagaactccaaaaagaaacctgggtctcgaaactcttccttcgactatcggagagaagagccactgcacaggattcctgggaggatgttcttaaatgggtcaagtgaagttgcatcactttttactcaacagggcaagaaagggaccaatcaggatgccatgcttgtttgggaggtaattatctttttctaaaaaaaatggtcatttctactcagattattattaatttatatgtttttagatattcatttcatgatatgcttgaatatattgaatttactttggtatgcttacagaatagtatgcaaaacagtgggctactaataaaccctcatctttcctgaattatagagtttgcacttgaattttcgtctgcaatttttaggttaaggatattaaagggatccgctagttttgtttttttttctttgtctgcatcttgtaattagtaccttactctttagccttttttttgaatatagatgtattctagtactgaatagaggggggaaaaaaggactactaatttgtaataattgactgcagtttgttccaggaaaccatgctttcatggtagcaaagtgaactcttcttttctttttatagtttggaaccattgaagtctttttatatttaagtacttacccccctttgttgtattaatgataggttttgtgttactaactaaagttcacgttcattgtttaaaaaaaactaaagttcatgtttgtgaatagtagcatccatttttgtttttgcttctttgtctttcataatcagtaactcttttcaatttgcatttcagaactttggttccagaacagatacaattttctgtggtgttttcgatggtcatggtccttatggtcatatggttgcgaaaagagtgagggattctcttcctctaaaattgagtgcacactgggaagtgaacataactagtggggatgttcttaaagagatcagcctcaatactgcaggaagcatgaatccagaagatacgacaactctagcatctgttgatgaagaaccgaggacccccattgatatgggggaagcagaaaagcaccctgagatctttcagacgctgaaagagtcatttttgaaggctttcaaagtcatggacagggaactgagaacacaagcaagtatagattgcttctgtagcggaactacagctgtaactcttgttaagcaggtgagctaatagccattataaaatcattttttgctactttgttgaccttttggaagattcctcttgatcaccatttagaatcacatttttggttactttgttgaccttttggaagattcctcttgatcgtgagctgattttctcctttgtagggccgggatattgtcattggaaatgtaggggactcgagagcaatactcgctacgagagacattgacaattccttgattccagttcagttgactgtggatctcaaaccaaatctcccaggtgattctcaccctgatttctggacatagaaatgaatgttgttccttgactaacatcaggagcagctactaacacagatttcacaattatgatgctaaagtattaacaatattaatagttatttgctctggtgctttcttgcttgaaaaaactcaatggtgcggcatttttttttaaataattagtattaaccgttaaatgccaatgatggatcagaaagtgtctttggttattattagcatacttgcctttctgttttttgaattgtaatactttctacttaaatatcatttcagttttgttcttttctttgctttgcagcggaagctgagaggattcgtaagtgtagagggcgtgtatttgctcttcaagatgaacctgaagttgctcgagtttggctgccaaacaacaattcacctggccttgccatggctcgtgcttttggtgatttctgcctaaaggattttggtctaatctctgtgcctgaaatatcctataggagaaccactgagaaagatgagtttattgtcttggctacagatggggtatgccattttttttaagaaaacttgcttcactggatgccatttcctatgcttccaatcttatccctacaaacttacttttctgttgttagatatgggatgtcctgacaaacaaagaagttgtagacataatagcttcagctccatctcgttccacagcagctcgagcattagttgagacagcagtgcgagcttggagacataaataccctacatcaaaagtagacgactgtgctgtagtttgcctcttccttgactcagacaccaacaatttgtctgttgctgcaaatactaggcctaaggaagatggggttaactgtgcagctgagaaagaagaagatatctcatgtactactggtttggaccggtcaggtactgtccgaacatgtgaagagattcatccagaagatgggtcagatgtaatgaattcagagccaggtaaggattggtctgctttggaaggagtttctcgtgtcaatacattattgactctgccaaggtttgtgcctggtgaagatgaaaccaaaccccaaaaataataatacaagggaagaagaagaagaacaagtcagttttaccttcttccctggattatttttttccttaaaatttttgtttcctttttcacattttctttttcaatttttattattttctatagatgggattcagaaaatatttgtagtgccttcaatgttagaacttggacaggagaagttggcccggctatattagcaatgtctggggaaagtgtcctctctcttgtgtgggtaggattggaattttgtaaaaccaactctcctttttttttattatttcaaattaatttatgtttcaaagtgtcatatgtgatatttgttattctgtaatgatgttaataataatgttgtgattatacattgtctttattttttggctggaagtttaatgaatattcttcttcatcttaatctctcttctttgacttttttgagtggtcagattctccatcttctgttatgtctttccaatacagaaaaaaaaaaaatgttgaagctttcttctgtggtttgaattgtttcaatgaaacatctttttctcataggtgctatccaagttgccaattggttatgacttcattgaataaaccaacttcaaacacttgtagaatgtg

SEQ ID NO: 187658 - DNA, 4099 bp, Cannabis indica
aaaggaaaaatgagcagtagtagtacacacactgatacattacatacacccatttttcacgccaccgttcttgttgtcctaaaccctaattcaattttcagaaaaccctccaaaactaaaacctcattttcttcaaattcgaagccctagaatcatgcccagttgccgcgattagggttttcttctgtttaattttcgccaaaaacaaagaacaacagaaaatgtcgtctgaagacatgggtttggttccgtcacagaggctcgaaaacggactcaactcccacctggtgttccaagaagactccttgcggttcaactgcggagccccgaatcagagacgggttggagacccgggcccgaaaaccagggatctcagtggcttcattgacgagcgatttttcgcgcctcaaggtgcagacttccggcggagcatgtttggcgatggacaggaccggcgggaggcaccggaggcacgaaattggaatggaaatgggaccacgacgacgccgagcgttgatggatcggatgaggatgatgacgacgacgacgaagaagacgatgttgacgaggacgatgatgttgatgacggagttgagggacttgtgggcgcagatggtaaccttgataagggcaattctagtaataacttgggcaacggggaggacaaaatgggaaatgggaaagctaagcatcatcaccattcttctcctttcggtaagaatctaaaacaagtttctgggtattttcatttgtatcagtttctgttttgtttctatgtacatgcataattttggagatttttggttgattttcaagtgttttattaggtgtgaacatgatggtaggatcaagtagagatgtcatagtgaaagaaggcggcattgtgcatcaaactgtgagtggcaacatcaaagccagtcctaatgataaccatcaccaccaccaccataatcatcatcatcatcagcaaggtagagttgggaattatcagaatgtggtcacagtggcggaccctgatggtgatggctattattctcagtattttcagggccctgaagggtctgcctcagggcaaaaggatttgacggttgaaaatggttgtgagtttagtggaagaaaagatgtgttgtattcgaacgagtcaggcgaatctttgaggacgattttatcagacccggtaacgtaagtttatatgaccatcatacaaatatgctgtattcatttttatttttctgtggatttaatgatcagaagttatgtattattttctttcatgttttcttagttttatgtcgtttttgtggaaatctaggggagctcttatggatgacgcgatgatattaccttgtgggcattcttttggagatggtggaatacagcatgttattagacttgtaagttgaagttcctatggaatcccatttctttattttcgttttaagatttggccatcattatactgttattgattttgttctgtttatggtcgtcggctataatttttttttttcttttctaatgattacagaaagcttgctatacttgttctcagtcaatttctgaaacatcgatttctccaaatctctgtaagtacatagttttccactgaggagaattgatattctttcaatttatcttttaatgtgtagtatatccttaaagtgatgcaacatgagttatcatgtcatggcaggcagcagtatataaaattatgaaatcccatcccatgtctaactaagttgcaagttgcttctttgtaaaaatcatgccaattatcttataggcctaagaaactttgttgagattcttggactatgtttctagtttgtaattaaatgcctaagatggtctattagtttataagaaattcaaattgttcatcttcgtatgtcttaacaatgttcacatataaatggcaagaattaagatcaaattataaagctgaattatggataagaaaatatattggacaaccaaatgatttattagggctttaaatgtgcagctcttagagctgctgtgcaggcattccgccgggaagaagaattacaatttcatcgttcatccaaaagaagaagggaaaggtttgaccaggtatttgattttccattctaattctagaagaggaagaaaagaaatgaaatggttagaattagagttagctacttataactccttgttccttcaatctatggttgtgcaaaccaaatttctctcagggctcatttcttactaaatctgacctctcattcaactactgcctttgtggttgtgctctctcatgggtgcagaagttttactggtttgaattgcttttaatacaatgttgacattcctttaagctttttcctttactctcatgcaggacaagggtgtttatggcgactgtactctcatggatctacctagaggcagaggtgtgcagtttccatttgctgtaacagaccgagtcatcataaaggttagaatagcctgaagcttagtatctatttgtattcgatgttacttatggtaatttacaatttatgtgtaaatggttccaggggaacaagaggacaccacagcgctttgtgggacgtgaggctgttgtaacgacacagtgcttaaatggatggttagtcatttgttctgttatgttgatgtttagttaactttaatcaaagatgctacttgtacctaacttaagattattattcattcattcttattccacttgaaaattgtgtgcacaactcccctttaatagtagatattaattctgaaccccagaccatggagctggacaaaagactaggaagaattttttcctcattactagtagacacttgacattgatttttttttttttttttttgtaaaaattatacaacaaatatgacgtagaagcttgtgtgaattatgcattagataaagaactcaagctcgtgtatgtacgtataccaatatatggagaaactgtaggcttattactggtattgtacaggtacgtggtaaaaacattggacaatgcagagagtgtgaaattacaatatcgctcattagctaaggtttcagatgaccccataccgaagcccatgtcaagcaagatggtacctaactggctctagacatacagcaaataacaatatggtaaagattagggctttcattcacactcagctgcaaatctgccatgtttaagttgcttttactaactgtatttgttttaggttcctatttttcctgttgtatttctcacaaagcaaacagggtgtattgtccaaggccttgtaaattatagaagccttgtcatatttgctttgaaggaacctagaaatgagaattagataggaagaaaatttgtaatctgttctgttttgaaacattcgagcagcgttatatttgagtatagctcctgtaaaaattgcataaagcttatgtaatcattttttggtttatacgatccagtggccggtgatgtttctgcccagttcgtttccttcaaatctatactcgtggcttttttttttttaagtgtcatatgttataatccttgagcttcaataaggtccactatgaacactcttacaagaagaggttctgctttttcccattcattttttaattgaataactatgaattctgtttttgaattattccttctctcaaatcgtgcttttgataacaaaaatttctaaatcattactattaaattgtgcttctgtgtttaagtctaaaatttatgagcatgttttggtagttgcatgacataatttggtagtggtagtaatttttggagaattttcaataagtacgcaattaaaggtaacagttttaaattggtaataggttggggtaaatttcttttttattagctgttattttttttgtttgtcataaggtgaacttaattttaacattgtagtatatgttatatcctatgggagagcatacgtaaatatattatttttcttatttagattgcgctaattataaaaggaaaatttgatttaactaaaattaattaagtgaaattaaaaagttgataaaattggtagggtgggtctatttttgggtatacttgaaattattcttagaatatattagctatattaattgt

SEQ ID NO: 187659 - DNA, 1972 bp, Cannabis indica
cctctatttattttttaatgtactaaatttgatatttacttaagaaaaatactacaattatatttttaaaatactatattttaaattttatcactgcatatataaaaaattataatttttttatattagaaaagttcaattaaatttttttatccaagaccccaattagtttgagacaggtccaatacacaccaacaataatatattaatgtttttttttattgagaatatattaatatgccaccttctaatatttagcacctttatttatcccttagaatttattatcattaattaagggttaagaaataaaagataagactttaatatgaattgtaggtgttggttttcatgataaagtttaataaagctatatggataagtatatactctagatctagaagattatatatttatatattcatagttgaaattaatatacataatatattattagtctacgttgacactatctatatagtaactatattgtattccatggataattaatttagtacttaaacgaggttggcacgattgaattgactatcaattatgtggccaattttaaaataaagccgactaataatgcattttctttcattaaaaaacatgttaattagttctttcaattgaaaaaatactaatacaatttgagactcggctaaagcaaaggacattattatatataaggatatttaaggtgaaactccgataatatttataattattacacatacaatttgatagtgttacatatatactagtgaatataataatatttttggcatattaaatgatcaaaacttgtatggtggctcaatattctgatactgtgagtgaggagctcatagtaatccctttgtttcagtcccttaaaaatgtctatgggggtcaattagcttttactatttactaagcattaaaatatgtatatctctattccatttgagcttgagaacaacttacaaatatacaaaggttactatatttatacaacttacaaaatcaagatcagaaatgttggttagtattataggagacgagacggcgaaaacaagtaaccaacttcctcctctgcatatttatctctaactttctaattgctttatcaacatttcataaacacaagaaataaattcttttgatttacagaaactacaccttaactactatggatgccacaaccctctttgacacgggtcagaatagtcaaacctaaattctcaaaatgaaggttcacttcctattatgataaacaaagagttttttaccttctcttgcttggttggttacttttttcagcaacttcggtaaaacagccatgaattacaacatcatcctctcatggaggcctcgaagcactaccatgcaattgtgaagatcttaaacgctggtcatcctacaatcagggttacaaaatttgttacaataaacaattttaaagtaactattggcatcaagaatagctgtaaaaactatttattgataaattaccggcggtaagctgtagctgaagctagtttgttgacgaaaatctagctgtgcctatatgatattaaactaaattagataacaattgcgacttatgtaataaaaacggccacttgctatgaattactccatgtaatgaaaaaatgcaataccagcccatgaatactttgttgagcgccataataaccatcatgaccaggtgttattgaatttagatgtccctacaagcagataagcaagaatgtcactgacttctaaacttcaaaacgttcttggctctctgattctaattttattgtaaattccaaatgggaatactaaattctaaagctaactttagcatgacataccagcccctgcatactcggcggattaacgtagtagctgtcattgggtggctccatcaaattcaactgcaccaaaagaacagcatcagcaacatatataatgtatctgtaagaaacagtaccttttacaa

SEQ ID NO: 187660 - DNA, 2972 bp, Cannabis indica
cccctacaatatgtcaatatttatcaaaaatttgcaccctaatatctaacttcacaagtacataaacaaaaaggggatgagttaaccttctcctgtgaagacaaagcagatccacataaaaccaacttattcaccgtatcaatatcacctcctggtaaaacaactttatttgctagctgacagctcctgtaaatataaatcatacagaaagttgagaaagaatatcgtataattcattattcacaccagtagaatagacttcaacatctataccaaagcttagaatacttaaattttaaaattatagtgtcgtaagtatataagagtgaagttttacactatagcaggcagcgggtgatcttcagggagagctttcttaagcttagattttgacctttcattagggaacttaatatgagagtgtgacggacagagcattaggtagttctcctacaagaaatcaaaaaacgaaccattgcccaagttagagaacaatacactacttagaaacagagctagtaaatattagatacagggacactgtttatacatgattccaacgacattttaagattttcattgcacaaggaacatgataactcctgcgacaggatttcacgtagcatcccaatgctgccccttttttcccacatgcagagcacttgagttttgcacccctcgccacttcctctttcaaattcttagctgtatcatcttcatagaaaacttgtggtgccctgcatcaccaaattctacaatataaatctctacggtcaagaaaattgaaccaccaggtattatcaaattcctccaaagtaattgaaccacacaagcacatgaaaatgaatttgaaagcaaagtaaaagaacttctcaagcatactaaagatccaaaaacaacataccaatcgatgcacactttgtgaacatgtatgacattagaaagtgttgcctcgtgacctcttaccaacttctctttataataatgtaacattgaccctgtttcctggtagattcattttaccaaaaagtaagggaaagtcgtgagaaaggcagatacgagtttatatgtcttagatatttatattattttacagcaaatgggataattaaaattaacacaactcagtggaaatatacctctgtaattttagaggaatggcagaacacacaagcaaatttattatcatccaaaatatttggttcctgtggttcaggctttgcatgagaaattggttggacgcgatcaacactgtcagtgtctaatggtactagctcacaattcgactgcttaagtctcttaacatccctggcatcattgtcgtttccaaaggacgaactgtaattcctaagcttgcctactatagcaccatcactttcctgagtttgtcttttcagcatggaattgtctgagctctgaaataaagaaacataacacagatttcaataaaaacagaaatgagctaacaataaaattgattagagtgaaaaatgatgcattgatcaaaaaatacaatcacagtaaaattaacaattgctttattttattcttctttttttaaactggactccttacctagcctacagtaattaaggaacaacaattatagcaattgttatgcaagcattaaaaagggacttgaattccaaagctatagaaacatacaccacaaaaagcaagaaatgttgctttcttacatgctcgctaccgtgaaaatagctatcattatctgaaaatttggcatcaccaaatgaaggagggctgtctggagctggttgcatcacagcatttgcatctacatcctgagatcgaggtgctgagttgggaatcacagcactgcaaaatccaatccctctaccattcatatctttgttattctttttcagttctactcgcgtgttaatagactgtccactatgcgacttgttctctttaccattctcagttactcctttactagttttacagtcaaacatgatattagttgaagtaggattttgaaatgaaactcccccaccttctgtagtaccaaccaatacaatttatacacaaattagcttacaataaaaagaagtaaataacagaaagacaaacaatcagcaattcatttcaaaagaaattagtctaaccagatttaacaggctgaaacaaattggtagaaaacgtggcgtccaagcatctatagattgttgccaggttctctatcaatggcaaatgcctcggatctataagtaaacataatcagaaatcattaaaaacacaacaaaacaaaaaaaaaaaacaactcgtgaaagatatgtgaaccagccaacaccgctaaataaaacttttccatctgaaaaaatgtgtaaaagcttttctttttttcatcaaaaacaagcaaagccctaataaccccattaaaattctgagccaaaagttccatttttttaatcacataataataaatgcacaacatttttacaccaaaaaggataaaactaagcacacccaaaaaatcaaactgctttacaatggaaggggaaacaagagtgaataccttgatcggaaaaaatgggcctgacatataggacacccaccgccaaactgagtcgaaccaggtatacacgatctagaataaatccaaaaaccaaaatcaaccaaagaaaataaattacaccaaataagtagaaaccctcaaaaaaataaaaagaaacacactggcagaaaacgtggttgcatggaagtaacatgggtcgattaagcaagttcaagctgcaaaaataaaaaggaaaacgataatcaacatcataaactcaaaaagagaaatcgtccatttatatataatttttaaaaaataatagagaaacgaaccagagagggcatttgagctcaagaccaagcttttgaaaattaagaacccatggattgagcaacctaccattcctgctatcacagagcgaagaagcttgagagccttccattaaagattt

SEQ ID NO: 187661 - DNA, 1633 bp, Cannabis indica
gtttatgttgatgtaatataaaatcaatttattaataggattttgccttttgggctgtcggattggagagagaagtgagatcagcagaagactcgcgatcctccatcttcccctttcttggaaccctttactatattatggtaatattggttgaacaaacaagagataaccattctacacttctacacgtacatgtaatataaggtttgaatgtatacattatattatatatctttaatttctttctaataatactgctctactctactcatttaaatattttaagaagtaaagctttaatcaagtgaaagtgagacggaggttggaattaaatctgtgatctttagttcttttacatcatcataatgttgacaaaatagccatactgatcagctgatgatctttagtgagaaaacacctttttcaagttgcatgtttgagttatgaatgtagtatataaaagtagttttaattattgctgtgtaatttttctccttcttttctggttttccttttaatgcagttcatgttctaagtagtcgaaaagggtacaagcaatagtggtcttacaaagaaaaaaagaagtaagacaacatccattgctaaaggtgaggacagattatctgagctacctcatatattaattcttgaacatcttctctcattaatttctccctactacaaacgatgtgggttcggacttgcatcctttcaaagcgttggaaattaatatggtattcacttcctaaactctctttctctgatactactatactactgatcctcaatttcaaaagttggaaaattatgttgacaattgtttggaacaccgcaagaaaggtatgtattttattgttgattcggctgtaattagtttcaagcttcagataaaatgctgtctaagaagcaaggctcgcagcctagataaatggttaagcttaatttgcagttaacaataagtcaagaaatatttgagtcttgacttaaaaccaggaaaatgtgagaattatgattcttactactactgcttaattacctaaaacagcattcaagttaagagctttgaccattttcgagttaggggaattaataagttgggttgttactcatttggttttccatccttgaaatcattatcattgcaagatgttcggctttcaaataaagtaattactgatcatatatatgctaaccaattaagtctttgatggattgcccttcccttgaaaaactggtgttaagttcatattctattcgtaatctgcaacatatcaatagagtcaaccaatttgttgaatggagaattcgtaatttctgatcatcatgacaaagataacacaaatttgtttatgagtatgctgagtttttttatgaatctcaatagctcttggaattttgtaacactgcgcctttcttccaataaggtatgaatgtcctctacctatatttgataatttccttttactctcttaatttgattatgttgctgtattttattttcatatattttgtttgttattgaattcatatgtagttgaaggggctgctcatgccagacaattgtaaaaggttatgtcgttctcctttagccaaatggaagtttgagggaattaggaaattaggattttttttt

SEQ ID NO: 187662 - DNA, 5633 bp, Cannabis indica
cactatgaagaaaactcatttttctcaatttatgaaagggtaattattcttttttttgtttgaacaaagaaataattccattataaaaagtagaaaactaaatagattttgcgaaaaattaaagtaagttgagcaaaaaattcgaccaccaaactcgataattaagttgcttaccataaaaatagaaatatgatagaatcacttccaaatataataaaatagcattcaaaataatatcatactcattataaatttgtatcttattagataatgaatttgccaaacacaaataactagagaacacacaaaaatgagaataccccaatctcttacgatgaaaaaaagcatgtaggaaggctaaagccttgccgccacatgaggttcaggcaagccatctgctaaagtatcagcaaaacaaagcacatcaccatcagaacaagctacaaccacctccgataccaaattgcctcctttcagtgcaaatactaatatccactaacaaattaaacttacccaaatttaattcacaactcgccccttgtgtgattaggattaaatttttttcattcaaattttgacatatatcaaatcatattttatgaatttttcagatcgttaaaattttttcttgaacagttgagattgttaaatttaaattttttttaattttatattttattatcgaaaacctgacgtgaattatatttcaggttggtacgatttgatacatattaaaatttgagggtatgatttgatacatattaaaatttgagagcacgatttactacttaaacaatcgccacattaataaaattaaataaaattacacaaaaatctttaaattcgacaatttcaaattctaaaaaaaatttatttaaagaacaaaaatgcatattaagataaaagggtctttatttttaacaattggttggttttatgattaaaaaagtatattgtaattagtaaggtaattatggataaattagaattgaagttatatgtaaaaaaggagtcatttttagtagaaagaaagaaactttgattagatttgatttgatcacataccaaaaccaaaaatcaaagctttgggaattggtggaaatgtccggagaagaagaagatttcagcgaagctacacggttgctcagatcatcttcacccacctccgatcatcttcatcatcatccagtatcggcattggcagtgataacaccatctactattgtcgatgatttggaatctcaagacccaatccccaattccaattcaacttcttccccttctcttctcaagggtcttttcactcgtcatttcgatccacctttctctcctcgccgactcagtttcaagcgcagagaacgcgaacgagattgggaacgagaacgagaacgagaacgagatcgactaactacttctacttcttcttcttcttcttctactcatacagattctgattcagtcgatactcttgctgattccgctcctcccgaatgggctttgctccttattggttgccttcttggactcgccaccggtctctttgtcgccgcttttaacaatggggtaatactaataatgatttcaatgattcaatttcattgtaaaaacttgttcttttgtgcttattactatacccattattgttatatatttgtttccttaataattggaacatgaacacattattctctgaaaccttgacaatgcatatggttgttgttcttgttcaatttagatctaggtagagactgtgacatgttaggccttaatgctagcctcattagtataattgattagaattttagaggctgagttgttggctttaagtgagctatcttatggttctaaggtgttaaaacagttaagggaaatttagtatgaatagagggctgatcatttgtaagaggggaggaattgttttgttacaaagtgagtaaaagattactcggggagataccaaactgtctcgaaaagtttggaactttgttctcttgatatcatgacattagactcactgtattggcaatgtaggtgcatgttattcatgaatgggcatgggctggtactccgaatgagggagctgcttggcttcgtgtgcagagacttgctgacacttggcatagaattcttttgataccagtcactgggggagttatagttggtatgatgcatggtttacttgaaatattagaacagataaggcagtctacttcttcgtctcaatcacctggaggacaaggatttagtttgctttctggggtttttcctaccataaaagcaatccaggctgctgtcactttaggtaccggctgttctttgggtcctgaaggtcctagtgttgatattggaaaatcatgtgcaaatggcttttctttgttaatggaaaacaatagagaaaggaagattgctcttgttgcagctggtgcagctgctggtatctcttcaggtatttcaattactttttcctctctttgaattgtttgccattttatgtgtcgtaattatgaaaaggtaacttgcttttgtcttatgttggccacaaacaaaacagcaatgataaactttttcttctttttttaatctattctcattgtgacagatcatgttagatgaaatcatgaaacgttgttgttcaatgtacgattcactaaatagcactaccatatgcaaaaaagaaaaactcatgatcctttttcttttgccttattggaaagtaaaatggcagtccagattatatgcttaagtgattaaaagcatgtactaagttgaattctgcatatatatatatatatatatatatatattaaagcatttcgttttacatttataatgtcttcataattgataattatttttgaaaaaaaaaacttctcaggttttaacgcggcagtagctggttgtttctttgctatcgaaactgtgttaaggcctcttcgagcagaaaactcacctccatttacaactgcaatgataatcttggcctctgttgtatcatcgaccgtgtcaaatgtttcaatgggaacacaatctgcttttacagtacctacatacgacctgaaatctgctgctggtaatgaaatttgctctccctctctctattgttgctgttgttgttgtttgtaagtgtgttaaacaaaaaagataactatctagggtattcaatgtttcacatataagcttatcttttatttacacagaactagagtatagattcgtgagtattgtttttcgactctaggtcaatcaaagctgctgttgaaagtgcatcatgggacaaaacttatatattatgtgctttaacaatctatggaacgaaatgtggtacaattgtttttggagttggctgtagcagtgtgaatatatgtgacccgatatgatttgaccttgcagagttacctttgtacctaatattgggcatgctatgtggtgttgtaagcgtagtcttcactcgtttggttacttggttcacaaagttctttgactatatcaaggaaaagttcggccttcctgccattgtttgccctgctttaggtggtttaggagctggcataattgctctcaagtatcctggaatactgtactggggtttcacaaatgttgaagaaatcctgcacactgggaaaactccttcggcccccggaatttggctattaacccaactatcattagccaaagttgttgccacagctctgtgtaagggttctgggcttgttggtggtctatatgccccgagtttgatgattggcgcagctgttggtgctgtttttggtggtgtagctgctgaagttatcaattctgcgattccggggaatgttgctgttgccgagccacaggcttatgcactggtaaaatgtcccctatcgtaacaactttcttttggatcgccatcaaaatatatcctcactcagctatgtaatttatttaagaaaacttcaacttgtgcaggttggaatggctgctactttagcttcagtttgttcagtgcctttgacatcagttttgctactctttgagctgaccagagattacagaatattgcttcccttgatggtatctcatgccttgctgcacttataaatatctcctttttgatgatcttgttttcattcttcaattttttttttgttttttggtggtttcaaatgttgtgtgtctcttgtagggggctgttggattggcaatctgggttccctccgtggcaaacgtgggaaaggatgctgaagcatctgataagccaactttgggaagaggatactcttctctttcgcctaatgaagacaaagatgaagctgggtggagacgaaataataatggagatgatcgagaactctctgttatagaaaaagctgcttattctgaagctgctaatgaagatattctcttagaagatctaaaggtttactatctattgcttctccactcattggtctttcgatttttatctctattctttgacttccctcaatcatgcattcgtctttgttggcaggtttcttatgtcatgtcaacaaactacctgaaggttcctctttctatgactttgaaagaggcaaaaaagcacatgcatgaaaaccagcagacgttcgtgctggttgtcgacgatgatgactttctggaaggaatattaacctacggtgatgttagacgttgtctatccaagaggtctagtgatatttccaagtccgactcaagatctctcgatgtaagtaattgcaattgcatgattaataggctttgtgcgccttttatttattcttccttccttagactcgtgtataaattcttatgttttgcttgcaggcaaatacatgccttgtttcttctgtttgtactcgagggattagctaccgagggcaagttcgtggactcttaacctgttatccggacactgagttagcgatcgcaaagcagcttatggaggccaagggtatcacacagttgccggtgattaagcgtggtagagattctataagagaacggaagaggaggattgttgctgttcttctctatgattcaatcttaaaatgtctcaggtttgcacgaaacaattaaaaaaaaaactggtttcactttcatcttgtgattatttattcattttatatcttttattgattctgtgtggttggtcccgaaattactgtttattcatttgattaaattgtttcatttcaaataaaagtcttgtaaagattgattggtgtattcaagagaatgtgcaaaatgattcaattgtttcatttcattatagccattgtgagtgaaagattacaagaatttcttgtgtggtaattccaagcaattgttggatgacaatgattacaaataagcagttagcagttacaggtaaagcaacagtgacagtttaccaactaataaaatcatgaaaatataaagttgaaagttatatatagagcttattgacacacacacaataggcctttctttggttgatataaagtaaaatatatcatcattctgagacatcatagggagacatgttaaattgaattgatgttttgctttaatcttctttttttctctgtgttatgtgcagagaagtgatagatcggcggaagttggagtacccacaaagaaaagaggcgaattcggaggaaatcattggaaatggccat

SEQ ID NO: 187663 - DNA, 2390 bp, Cannabis indica
ggaaatttctaaactagaagttagcatgaaactcaaaaatcacatttttttgagtcaagttattcttttgatcatctatttttccaatgatcaatgagctgtaatttttagtatgtttactgttttcttggtaaacaaatttgctcaattatgtaaaattttcattatttaagagattgaaattaaaaaaaaaaagaaagtattaatgatattagaaatggtagacatgattatagaatgagagaagaaaaactacaaagctgtattgtacctttttgctgctacatattatgatgataatagagaatcaaagatgaagcagagttggaagattagcaaagaaaaggtttacttaaagggccaagactttttgtaattacccaaccaagagactctagccggtattggaagaagcttatcaagctaagagagactatgtcacactctattctccaagttgttgtttacaatgggaaacttaaaagtaagttgtacaactccttactttgtaatgagaaaattgacaaggctagagtagggtggtgtagattctcagtcccaaacccaaaacataggtttattctttggtaaatggtgagcaccaacctcatgacaagggacaaacttcatcgacttcatcttcttgcttgtgtggttttattgtgtggcccatcagtttcttgggttggaaggtttagattgggaagctttggtttgggaatgcagaagcaggttatggctgcagttgtctattatatttggattaataggaatctttgtgtttttgaggacaagtcttactcagttagacatgtaaatgatttgattcatcatcatattaaggttaaatttggttgtattggtaagaggaagttggccacaagagaccaataacaattgtggtgaataatttgtaatgtttttcctctctaatttgtaaattcagtagattttcttccaatgctgaattttttttgtgaaatttatagccgaattgctaattacgttgcctttttttttacaaatatttagctgcattactcaaaatgcgcactacagtttatcaaccatgaagttcccaacatagaacaactactatatttttattggtttcactaaaaatttcctacatgtacaaacatttgctgaacttaaaaattagaacatttttaatgaagattgtttattaaagtggtcttaatgtagtttaatttttaagatcgattttatgtaaagtgttactcaatatggattatgatcacatgacattgttttttgtagagaaaaagttatttttatcaaaaataaattattaatttaatgtgatatgaaatcatagtagataatttttagagttacaaaaataaaaaaaataaaataaaaaatgttttaaatgttacgtggataagagaaaaaaataaaaaaaaaaataatttaaaatgatatttttagttttaataactatagatactatctccttatagatgccaaaacatagatttgtgacatttgtctatttcaagttttcaaccgaatgataatatatatagttttttttgttaaaagaaaaaaaaaagagtgaaaaatctctttcttaaaccacctgaggtgacagtcttaaaagagaaccgaaagtagtgtaaaaatagagccacatctgatgtgagtccattgtgtggcccagcccagcccagcccagccatggccagcgacacagacagagagggcttggttcagtaagatcttagctgtatttatgacttaaaacagagtgagctgtgtgtgaaatcttgaatgaatggtccaccactccaatacattacaaatacaaaccacatgcattcatccacctaatcccttcctttccttcctacacacttttatttttgaatttttcaccctctttttatctatatggtatggtccacaactcccaaagcaatgctgctgccaatgtttgtctttctcataacaatttcctttgtctcttattacttttttgtaaaagggaattggtttaatgaaaaagtagtaaataattaaaagattttgtatatatatattagagatagtgaattgggtattctttaattttattcaccgccaccagcttttgtgggggtgtgaagccgcgtacataatattattattaatattaattaatgaatgaaagtgttaagagtataaatattagcaaatttaaataatgtgcatgatgcctcatgtgggtgacgaaatatgcgctcaactccatctaaccattctataatgcaaaatcatgatcacacttatttattaacaaataaaatatatatactattatggtgtatatttttggaaattctaatgtagttgagtcataaatttcctaggacccacttagtttagga

SEQ ID NO: 187664 - DNA, 2710 bp, Cannabis indica
aaaaaaagagttacaatctcaataaatgaaataagacatctaattttctttcattaaagtcaatttttacaattcttcaaaacaactttccaaatttatatgaaggaattattatttaaattacaacaattttattatgcaataaatacaaatctcattaatagactcacatggtttaccattcaattgaaaaagaaatgtatattgcataatttattttttcctaacaaatcaaaattaaatataagaagccacttgtaaaaatcctcaccaaatccttattcaaaaaaatccataaacaaataaataataattggaaaaaaagagagagaaaaaaaaataaataaaaggaaagaaggaagaagatgaaacagatcgttattatggtttttgtttacctttgacatcgtacttatctatctaatgttacaatacatagagagagattcatattgaagccaaagttgaacgccattagttctaccaagaagaaaaaagagacctttcaacaactgattcaccaaactccattggtcaaattccctcttctttccctctctagggaacctcttttggaaggtagtgatggcggcagttacggcggtcacagcgggaggtggcgacgtatggaaggctcatgctgccatggcgctgattcagctcttcaatggaggttaccatgtaattaccaaagtagctctcaacgttggagtcaatcagctcgtcttctgcgtctaccgtgacctccttgctctttcgattctagctcccgtcgcctatttcagagaaaagtaacactttctttctttctttctcgttttggtttttgttttttttttaatttgttttctcgcttcagatagtgaatcaatctttcgattttgattagggtaaattcaattcaagattccctcttttgacgtttgattattggtcagtttggtaattgttttgtttattcattcactgtggatcggttttgtttctaattcgataaattggagccagaaatccatgtttcagatacgtatttttgtagacgttgattgtctttatgggtttattttggggatatttgctgaactagtttgaaatggctacattatagctatgttattgttgttttagatttgcttctgaagtgttcaatattgagcaaagtcatacatataaatatctatatatgtcaaagtccaaagtgatgaaataactttatagttaaatattccttggaatacaactactttaaacattttcctatttttttttgtggtgagattaggacagctttatgtgttagtgcactacttatagtgagacattgtttgtgaaatctctccgtggaatgtgttttgaaggattcatttaagttgctctcagtatgtgggatcatttccagccttctaccaatctatatttgcctaagtgactagtcttccagtctatattgcttgctagttgcttgtgcttggtagccaacgagatcaatgaagcgtgtcctgaagtgttttttaatagttcttccattccatgttaacattttgcaagtttcaaggtttcttactatattattttcattggtcaatttattccatgctgcatatgtaatagttcatgtctcctctgtgcaggcgtactcgaccaccattgaataaacatcttcttttgacattcttttttcttgggttgactgggtaagtcactgtattctaatctcatttcccgtgtttatctatagattctcacagcatgtattgcttcatatatgtggtactttatcgatccattattctgtttttctaattttgtttccctttaattcaaccaggatatttggaaaccagcttttatttctcattggtcttggatacacaaatcctacttatgctgctgccatacaacctaccattccagtgtttacattcatcttggcagtcctaatggggtcagtttgagattctactttttctaatctttattttatttagaatatgttcagattgtatctatctagaatgacaggagttactcgcacttgtgtttgaatgaatgctgtttaccttggtgtctaatagcataccatatgtaaatgttatttatgcagtacagaacgagtgaacttgctcaggactgaaggtcaggcgaagattggaggcacattcatttgtgtctctggtgctgtattaatgtgtttctaccgtggttgggctttgttaggaaatatggagcctgattattcagcacaaagtgaaataattgcgagaggtcaacctgagcctgttggatggctaatgtccagtttttcagagtttgggcttgaccattttcaccttggagttttgtgcttaattggaaactgcatgtgcatggctgcatttctggccattcaggtacatgactataacttattggttgaaattaagaaatgagacaaagtagttagtgttgaatttctaagtaaatctgaagtggaagggaatcctcttgtatgttctctgctaaagacttttgctgagaagtacttacttttttctcttctttctttaaagaggtaatgaagtatcttttgaaaagccaaaattaagcataattgtagtagcctagtagattttcacattataaatttgcagaacactctttgaaggttatgaaatcaagtgttaaatggtttttcattcatttgacacgtgcttgaaggttttggtagaaa

SEQ ID NO: 187665 - DNA, 505 bp, Cannabis indica
tttataagaaaatctcgaggtaaatgaggttagaaaatatcaaattaaaaccatgtggtgaattcatgtggactcacaggggatagtgtcgagcaatgggacaattaaacttccattaataatgggagattctctactgttgattactcagatgcaggaattctttgtggtggatttatcctcggtatacaatatgagcatgggccaccctacattaaccagaagggggaaggaagttctataaaacatatgtctatgaaattcccaactgaatctgaaattagtattgttaaaggagatcaattaacggcgaagcaatgttataacattgagttgagggaagtaaacatctcgactcagaggcgtgaattctacgatcagaataaaaaaaagagttgttacaaaaattgttagacctactcgaagaaaaatgggctgagtcacaaatgtgaaagttgcttatcaacaaaagatcacactacaaaaaaaaattatctttagtgat

SEQ ID NO: 187666 - DNA, 3123 bp, Cannabis indica
caaataattataatgaacttccatgaatgcaaattggaaactttaataattttattttcttcactttatgaatatcaagggaaaatcagacagaaactatgattatgaaatggaaggtgtgagtaacttcatatacaagaagctcatatcaaatgtacaattgcagaagagcaacactcacataagctgtcttttttgctttttcttacttttcaaataatttataatgtgtttaatatctcattcaccatcttatacactacaaaatcagtacttccttcacaatttgctctaatgaagatgctatatccgaaatgctaggacgttcattaacattttctctcacagccagttctgctacttcagcaagcttaagcaaaggttctacatttcttggaagagctacataccggtcaattattgcagccgccttcccttgtttgatcaaaggtaacgcccactcaactaggctcgaagggttgtaatctctgtcgtatgctttccttccactgagaatctctagcagaacaatcccgaagttgtaaacatcactccccaaatcttcaccactaagatctttgtcatttgaagtgatgaggccgaaatctgcaattcgagcactccattcagaatccaaaagaatgtttgatgtcttaacatctctatggataataggaggcacaaactccttgtgaagatactctagtccctttgcagcctgcattgagatcttcaatcgaagggtccaatttaagggagaaagaccaccatggagatggtcataaagggtgccatgaggcatatactcgtacaccaacaacctctcacccatctcagaacaataacccaataaattcacaatattacaatggcggattttgcaaaggacttccagctccatttcaaagtctctactgttagtatgaatgatagtagcagcattagctctcttcaccgcgacttgtcttccatcagggagcacagccttgtagacaaaaccatagcttcctctgccaagctcattaaactccttgaaaccattagtggcatcttttagctcagagagtctaaatacttgagctaaaccaggacaaggagtagaagatggaagtgagtgtatgtctccattgttatctgtttccaattcggagtttttggattgcttcttctttgtcccttcctcttgtttagaagcaatcaatctaggacaaaacaaccaccaagtaaaatcaatagaaggaccaaagcagaagatccaattatgatcacaagtctatgcaagtgatgccaaagccttttcatctcaggaggagagtgaacaccacaaatatcccaacacgaactgttttggcaaagagaacaagctgtacaaactctatcagaattctcagtacatgagctagacaagaagaaaccatcagaacagttcgatccacatggggagcatatcttaagatctttcctaacacacaagtttgtcaaatctgcctcatttagaatacttgcattgaaagtaaactctctttcactgcaaggaccaggactacagagccctggactacaaagctccaatggtggatcatataataaaggtggtgaatccgaagaagaagatgatgatgatgatggaacattataagcccaacaatcaagtactagatcgtcttctctaatcccacaagtggtgaaatcagaagaagcgatggccttaaacccagaagcctttggtatagaagatgagttaaaactgccccaacattcaactccatgattatcttctctaatcccacaaaaatgtctagaaccagctgctagagaaacaaaacgagacccatttggaggaccactataccaatcattatcatcacccaacatttgatttccattgatgtatccaagattccacagatagaaactttccctgaagctaaagctatgaaattttccttgacatcaaccacttccaaactcgatgagtttggcccccaacaaacgagtcctccttctctaatccccccacagctgaatccttcacccgaaactagattcttgaaaaccagattactaatactctgattgtaaaacagagtggactctttagaagtcaaactagtattgttcgatgtgattttggtaatatctatatcccagcagtcaacgttacccatgttgtgatccgagtagtacggtcctctgatagcacagacgtggttgacgccggcggcgacgttggaataagcagtggtcttgaatacggaaggtacgagatctataccgggtctgatggagctccagcagtatgcttgagaagtgttcgctaaaatgccacaaataaagcctttaccaccggagagcgcagccatgggaggaatatcactgtaataagcagaggaagaggaagaagatggagagggagatgatgatgatgatgaagaagagctgttctttcccaacagaccacgtcttgcttaccgctcgcgtctatggcacagaagaatccatcttggccgaacgaggccgagatgggtcccattgatccgaacccagatgcagaaatgaaccaaaatggtagaagaaggagaagagagagttgcagagctgtaaagaagacatgaatggcgaagtgggtttgcatggtttgggtgtagtttgtggtgttagatcaggtctgtcatggaggtactggtcataggaaatacgttgaggagaagaaggaaggaaggaaggtgacgatgaaagaagaagaggtacaacaagtgttgttgttgcgcgacatttttacggtttttgctctaataaccgttagaaaatcaaaagtactgaaaagtagttaccatttttaactgtcatccacggctggtatgatgagctgagtgagtgagtgagtgagtaagcgagggagaagtgagttcgatgatccaagctcgagttaaaataaatgtgtgatgtgttgtttgttattttggttttgtctttgacttcttggtcaaaataagtttgtttcatcatttaatatcagtgtcccattgtctcacacccaaaatgctttttacgaatgtgaaaaaaaatatatgaaaattcttttaggcaaaatatatcattctttatatctcttatatatat

SEQ ID NO: 187667 - DNA, 2920 bp, Cannabis indica
gtaaaaagaaatatttaattttttctttcatccatatttcttttgtttatttgtatttactaattttttttttttttttggtcttcgtgtttcttgctattgacttctaaattatatttcatcgaattaatattgctctaacagttacttaattgtaaggcttttgaaagatgaaacacttttctatcttgtggggttatgatcttttatctatgtttgttttcctttcctgtggttgagatttgttcattgttgtttttgcctcatcttttgtaataggcttgggtgtgccttatttgggttgttatgaaatttgtttctctactttcttccttctaaccaatgataaattaatttgttcccattcaaaaaagaaaaagagaaaaagggttgcatataaaagaaacacacaaatcacctaccctattaatcgaggacaattcactttcaattaggaagaatccgtgaaattacttatgagtgttgtattggtacttggtagcttggaggttactccaggtactgtcaaccttctaggaaggtcccatgtcacacatttctgccattattatgtaatgtaatgtaatgtcatcacttccattttcttaaggaatacaaagaatccaagtcaataataataataataataataataataatctgcaagtattcaaatgaagctttgattaacttattgataaataaaccatttacacatcagttataaactgcattcttgaatatggaattttcatccatcataaacaaaatgcaagcaacatccataatcaaaggaggaataagcattggcacaattatatacaattcatggtgaccattcaatggttaaacagtacttcaatcgtttctgtttggtaaataactttgatttatctacatcaatcaccattaaatataaagacaattgaaccattcttgctgtgaggagagttaaaagagtaaaatcaactgatacttctctgagaacaaatcacttcttcgctagtaacctctcattgggtgtggggggtttaaaaagtcagccatcatttctcgcaagaaatctttctactcccccgcacatcccatttgaacctcaaatcttcttaagctctgatagtcgttgcagcgtggtgagttgcgggagctcgcttcaatgccttcactccaaatgggttgttcatgctctgttcataacaaatatataatataagcaaacaattcaagataatagcacaaaaaaaaaatggcctaaagagtcaactttcacaaagcattagatgtttgcaacgaaggtgttgtctttcatggtgtctataaaacaaaaaagctctgtgaagaagttctgctcttaccacgcggcaagttccagcgttaagatcgcagactgggtagtcatgagggcagcagctgtagtgatcatcacagcaggttgcaccctcgagagggcagcatccccaagcgaagcagtattttccatactcgtagatgcagcagcaagtggttcccacagggcatgtgtagtagtcatcacaaacagttggtggcttaataggtggagttggtggagagggttcaggcttaggagggttatctccgttcttgatggggtatgagggctctatggcgattccacacttaccggtggaagcagaagccaaattacgctccaacttaatgtatccagcctctccccagctgtctccccaagagttcctcacaatccagtaatcttttccgttttctgtaccgtatccaactgcagccacaccatggtctagttgtgttccgcagagtccagtgaaaacaccctgaatgagtaaaccacatattagaaccacaaaacacaattgttaagataagatactaaaaaaagatacaactagttttatttccaatgcatgatgtctcatcaatgagtaccccaaataaaccatcaaattatggtctctaaacaatttgtgaataattttggtaagtttatctacaattgatcaaaagggtacaagaaagtacgcatatttaaagttgaggatcattaccgattggtacagttggaatgctctgccaccagcttcaatggcaacagcaataggctgatttgcaacagccttcatcaatgatttctcatcattgggaggaacatcttcataattatcgattgtcacaacatgggcgtttttctgcagagaatgaaagacaaaatataagtaatttcaaagactagaattaattaacccggctaacttggattggagcaagctatcttgataattcaataggaaaaacgagaaatgctataaatttaacacacaccctgtatgtatcacattgaccgtcacgagccttgtaagggtaatcctcatcagaatcaatgccaccattgttgataataaattcgaaggcgtagtccatgagaccaccattgcagccctcgttgtaagaagtatcacaatccaccaattcttgctcagacaaagagattagatcaccggttacaagcttgttaatcccttcaactgcagcaatagttgaaaaagcccagcagctcccttcaattcaaaccaatttatgacgttagtttagtgacactcaacaaagataataacttcatcaacaaattgcttctattcttttaaatgatcgtcatgatgactctattttggcagaaaataaaccctaattgttacagaaagacaaaattaaccaattacagtaaagactaataatcactccaataatatataattttttttagaaaaaaatcccttaaaatctgcaagtctaacatatcaaaagggtatttcccaattttccaggaaaacaactaacagacaatcaaaagtgaaagcttatcaatttcttttagggtgaaaatctccaaaaacaggtgacgaattccatccatgattataaaaaa

SEQ ID NO: 187668 - DNA, 3633 bp, Cannabis indica
atattagtgaatctccaccaaacccaagtcattttacagttctagttcgtgctattccttggtctgatgaagactcgtacagtaatagtgtgaaaagattctttatgaaatatcatgcatcaggctatttgtttcaccaaatggtatataaagctggtacgattcagaaattgatggtgagtaaattactcttaatgatcaagaaatttaggagtaactcccatcgtctatatgcctctaatatttattctatccatattagtatctatgttgatttattgtgttctttctttttttcttgagaacattgatttattgtgttcagtaggtgtcatttaatgcaagttgtgtttcatttatagacggaaatagactactacaagctttcagatggataagtgaattgttttctaggttcttactataataagctaaaactacatgtctgttctgattttttatttttactgcatgtattcctttgcaccagcttgatagtgtgagaactattttatttgtgttttcttcttgcatcttgctcaaatcttttttttataaattcatggttacatttatgctattggatctagttgtacaaacatactaaatcttctagactgtaaagatgagatttgaaacatgaaatattagcatgctgaaatttcgaaaagtaacacttattggaacttaaggtgatgaatttgagagttgttgtgcttgtataaaaaaatggaggtttgtttggttgtctttaatgcaacacaatgatttttcatattagatgtttacgtaattcataatttgttcgactttgcagaatgatgcagagaagatgtacatgatgttcaaggatgtttctgttgaaaagagttgtgcacctagtataatccattgtggtacatgtgttgtagagcattcaaattcttttaagatcctttcttctgagggtactgtcaagggaaaagctgacttttgtgacattgattttcctggaagtaaaaaggtcactaatttgtgttgatggatgttactcattttcttttttaggttatttatatacaacttgcaattatctagtttagtacattgcatattgggtccatgcaatgccaaattatcatcagcttttgggtttgtggtaaattttactgcaattatttaaaactatcgcttctataattcctagaacaacctttaatcaccattaattactttctttggcaaatatgtgtggagataagaagagatggatgtcttttacatagtgtactgtacatgctaacgatgttgtttgtcatactgatagtgtgtgtgcttacgccaataatggcaattattaactggttttgattttgttatctcaactgtcatttgttatagcctttaagataacaagatttttaagagtttgtttctcagctcgtggccttcatgctcaacttgaaaattttgtttcattaatgtatgtgtatgaattgattcagtgtctctatctaactgatggatccctataaacaggagtgtgccactgcttttgtctttttcaagactcgccatgctgctgttgttgcttcacaggttcttcaatcatcaaaccctatgttatgggtgacagacatggcgcctgaaccacatgatgtttattggtcaaacctttggataccgtatggacaactttggattcgtaagatagcaactcttatgtctgccattgccttcatgctcgtatttcttattccagttacgtttgttcaaggcatgactcaactagagcagctacaacaaacatttccattcctcaaaggaattttaaagaagtaagtacatgtagcagtgatgatctctgtttgttaactgtggattactgatgtttcctaccatagcgaggaaagatgggtaaggctttaaatttataaagcatgggtgatatgataaattggaatttggaaataaaaatgctgtttacattagagcaattccaacaggataaaaatagagttgcataaaggcttgtcaggtggtggggccaagggggatgatgtggagagggttttatcaattagcataggcaccattgcaacagtgccaacttatatatttatatatatggatacattttaaaattctgattggctaaaaaggtgtgggatcaaagtggcaacaaatggggttgtaggagtttcccctaatggtcaataattcttttattttgtattaaatctgaggtttactgggagatggcctacaaaataggggtgttttcctgtaaaaatgcctgattattttttattttggcaggaaactcgtaagcgggttgtttacaggttaccttccaagtgtgattttgattttagctctatatacagttccacccgttatgatgttattttcagcagtggagggaactatctcccgaagtgggagaaagaagagtgcatgttgcaaaatattgtacttcacaatctggaatgtctttttgtcaatgtcttcacggggtctgtgattcgccagttgcgagtcttttctagtgtgaaggacatacctgcacagcttgctattgctgttccagctcaggtgacattctctgcaacttaattgtgttaattctttgcttcgtatgatgctctaacctatatatatttctccttcacttacatgagaaatttgagcttctatgcttctattatgccctattaaaaaaacatgctgtttaataataattgaaaaaagaggtcgttttcgaagcattggacaaaattatccttgccactaacagccccatcaaccatctcaagctctttttctctctacaatgatggcaccaccatctccccaacctagcaccacttcaacgctgcaactagcattaacaacgtccttgccatggacgccaccacttcccaattccattacactgaagcatgctatcaaaacaccaatctatattttttgttccttatgttttaaataatcaaaaccacacccatatccacttaaaaagactaatttaaaggtttagaacacatatatgtatgatttattgattttgtttgcatttgtttttcttcagatctgaacctttgaaaatgtgcagaattttaattagaacgatgctctagcattgctgcagcgatgttttgcgatgctcttgcgatatttcgccatgctcttgcaatgtttttgtgatgcttccattcttcacgactttttgaggtaaaaatggatgcattagaggtgcttttgcaatgccccgcatgaaaacttgattattagaattagaattgtagtagcatcgctagtgcatcatttttacctaaaaaattatgacaaatgggagcgttgctagagcatagcaaaagattaatttttttcagatttaagaggtatagatatgaaagaaaaaaaaaacaattgcaagcaaaaccaataaatcatacaacacataaattttgtaagactataaaattagtgttaaagatattcttactctacctccgtggggaggtggtggtggtcacttgtggtggtggtcacttaaggagggacatggtgactttatatataactatgtggtagtagcctttctccaaaaataatttatatcggtggagtttggtaacatttttgtttttt

SEQ ID NO: 187669 - DNA, 1560 bp, Cannabis indica
cagcaacaaaaaaatgagatttgaatagaaaattatggacactgaactaaaaaccgtaatctcatctttctcactctctctcttgctccctcatcacgcgacgctagaaaaggtcatacaaaggggaccaacacaacactgttttcgcttgctcattctctcagctctcgcttcctctcgttcatgcggtgttgaaaaagtaagaccacgatccctctcatctatatgatgtcattgccgtctctagcccaagtaggccaagttttcaaagctaaacttggagatcgaaccccataagctgaagtcttaccctaaaatcccaccgaacagtgccagcaatgagggtggtccattgtggcttactctctcttactcactctatattttttttttcttttcaaatctaaaggatgtgtttggttttagcattttttatgtttattttaatggatgtgctcatgtttttgcttatctatttactgtattatgtttgataatatatcttttgctgtttaaattttaaagtacacgttgttattttagatttgataatgtttatttgtttgtttggatctcaaattttgcttagagtaattcgtggccaaatatgggagttttttttctttttggtgtcagttctaaatcgagacttacgatgcaaaaatgaatttcgcacccgtaggtgacggtttacaaccgacaccaatgaccaagtgtatcggtccaaaaccaacatcaaagaatatactttatgtctcagtggtacatgtgtcagttcattgaaccaacactataggtataagtgtgataagttgatattttgtcttataaataaggctaatttatctgttaatattcttatattgattcttaaaattattaattagtgtaatttgaatttgttaggcttttttgaagactaatcatgcatttagagtcatttggaaggattttagcacattttggtagaaaatagtggaagccaggaagctcagtttgacaaaactgaatgtaattgtaattttgacgattttaaaggaagaactagacttttaactcaacatgaaagttgtagactcattctcatctttcatgaatgtcttgagtcatccaattttatgttgtattgaagaagttatgatcaaaatattgttatgagtgtgctacacaaattcttcagcaaccacgacccccaacgacatttaagctcggttgaggtggctaaacgtgagaacacgttcgtacaattcatcgaaaataaatatttaacctaaattgaatgggcttttagagttctataaataagacttttaggattcattttaggacttttaaactgggtttttgagatagaaactcatagaaagtggataagagggagattacatcaccaattactcatcattctaattcttttcttctccttaatgtttttaatttttaattattattatgcttatgaatatagttgtgattatggagtagttttttttgttaaaggttatttcagaatcgttaaatatgaattcttgttagggataataaatattgttcttgatt

SEQ ID NO: 187670 - DNA, 1450 bp, Cannabis indica
ttctgactactgccctcaatctttgattctgcatctgcaaactgcaactatgttttggttctaggcatgatgatgggctcatcatttattggtatatatgttaaattgtttttttaatagagtgttggaataatttctgttcataaattggactcccgcattatgctagttatttgatttgtcatttgactccctttttcactaatagaaaggaattgctattcaaaagggtcactgaagattcaaaggccattaacagttaacagccatgttgaacattttggtaggttaacctttgtgggcatgcaacactagctgctgcacacactctctttacatctggagaagtagattcaaacattattgagtttgtcacactgtctgggattctaactgctaaaagaattgtagagagatctgatattgatacacacaaaggcttctttattgagttgaactttcccactgatcccatcaccgaagtcgtttctgctgaagactcaatcttgatatctaaagcattgggtggtgctactgtgatcaatacaaggataacaacctcgactaagatcattgtaagtcattcattccaagctattttcttgcatatatgtagtgtgtgttgggtatattatgtatatattttcgtgttgtgctttccaggctgtggtcccatcagcaaaagatgttgcaaatttgcaaccagactttggtgcactaaaaaactgtccaggaatggggatagtggtaacggcaattgctcctccagagtctggattcgattttcacagcagattcttctgcccaaagcttggagtcaatgaggtgttaatttaactaataatcttggttttggaccttgtagtgttatgttttataaccaagtaaacatgggctaatagcctaaaacgaagaaaaccacttacttataagactgagttgttgagccctttttcatatgcatgtttttcaggaccctgtttgtggaagtgctcattgtgcattagcaccttattggagcgaagaactggggaagtgtgactttattgcatatcaggtacttgttttatactctgttcaaagttggctaactctacctcttgatttccaacgtttcataattgattatcctattcaggcatcaccaagaggaggggtattgaatattcatctagatgagcaaaagcaaagagtgtttttgcgaggaaaagccattactgtgatggagggaatacttttggcttaatgtttgttttcaattcaatgatttatagatgagtcgcgttgtgggcaggttccttaaagtttatatttgaaattgctatcgggtaaactgaggactgagccacaagaactgcttgtcccctctgttgttgaaatatttccaatttaaataaattgtaagaaaaaaaaaaatggaaagataataatcaataaatgtaagttaatt

SEQ ID NO: 187671 - DNA, 1439 bp, Cannabis indica
catttgattacaatgaagtttttccctattgattttgtgaatggtatactttggtttcaatgtaatggtagccgaaaatattatttctgttaccatatagtaagtggctctgttatcggatatgttaaagcattattcatatgaatcaggatagcttttctttttattttttatttttatttttttttcttgagagaatattcctcattgtaattttgttcgttgttcttaataataaaaataagtaatatattttaagttttttgagctttgatcacgtagcttaattaaggatcttgtggtttttattactagcaagtaggtactttttcttatttgtataatatgcatgcgatatttatacagacctgtacttggattagtatttgatcatgatcacaagcactaatatttgtgctaattaaagttgttgagatcatcagtatttttgagcatatattactgtgtttgataaaatgttccaagaattttgaggtgcatgctaaggcatccgaaatgaagccaaatgccgaattttttttttcagtcacacgctgacgagcacacagttaattataagagaattatttcatatattgttttttaattttttctttaaaatttacggtttagattgctccagttacttttttcactattccattatcttcttgcttttgcgtcagattactaacaaatttagatctcaaagaagtacaacatgcatgtaagagaagcatctcagttattatttgttcattgtactttatcatgattaaacccctcttttgagtcatataaattgttgctatattttcttctttcctttagggtctttttttttcctacttttgatcaagtatgttctttattttttggctatatcttaaagaaattctatgctgttgttagtttaattaatatatgattctatgaaatcatcctgttaattatttctattttatgttcaactatgtgaatttggcattaattgaaactttgaatagttctttatggattgaacttaccataaatgtcaaacaccactggctggttactcgcaagtcactatgggtttcttgagcaagtttataattgttttctccaatatttttatttcattgattatttatgaagtccaaggttcatggttgatgctataataattgattgtgatataacatatgaacaaattgatcggcagaaaaaacatagttgttaactctaaagttcatgactagctatataactgctaattcaattgactttcgatgattggaggaaatgttgtaatgaaattatggagctcgagttgcagttaaatatatcattgctctattattaatttgttgcaagaaatataataacatcatttatattgcatatttcatgtttcacattatttgtcatatgtagtgtcaagaaatgaaattcctcac

SEQ ID NO: 187672 - DNA, 1040 bp, Cannabis indica
aattttttttttaaagactacaacattttttcttatttacttgacaactttaagtttctctcttaaacatgctttttatttaagttatagttataactttttattttaaggttaatattaatgaaactttagatttggaaggttgattttgtggcattggtatagttatattcatgatgtttatgggattgtttttgtcacggttatttagcatggttagtttttttaagctaaaactgcagaaatttttgctctttgccatgctggtaatcaatgtcaccttcttagttggataatatttaattcgaaactatcttaatgtagttaacaagattaataataatattttttttagactcatcactaaatttaattttaagagatatttattttaatttgattttcttttataatacgagtctttttcattattttaggacacttaaagttgttatctacaatcttactaagtatgtcttagatgtgactattagctaggtttggtggtgagtttactcaaattgtattatacatctttaatgatattacctatttttatcttttttaagagcttgctcgttttgtgatttttctttaaaaagaataataagatacaaaatatatataattaataatattcttagaagagaatggtcaagtcaaggagcacaaatttaaagaaaaaaaaaattcaatcttaaattaaaaatgaatagtaattaaatattgatattggtaggagatttgcatgtgttccaagaagaagacaaatgttttattaaaatgtggatggtgtcacactcatacccaattatttgtttttattttatatgtgaagattagctctgaatttgttttattttccctaaacaaagatattggaatataaaatagaactataaatatagatatttaggtaggagacaacatctggtacaaattaagccattgtccaatgacagtaaaatgagtggtgaatggtgattggtgatctcatcatcaacaatgaacatggacatttatattatttattttttttt

SEQ ID NO: 187673 - DNA, 3147 bp, Cannabis indica
cttttctgtttcatcttatgaagttgagccatatcgataacccttttcgatgattctttcgacgatttcttccctcctttctttgtgcttgtgaaactcaattgtcccatactaggtgacctaccaaccctctcagcctcctcaatcaatggaggaccagaaagtgtttgaacaacatattgatggaatatagattcttgaatcctatcaaagaatgtgttcacatggaaatttgaagctaagatctttaacaaagagtcttcactaaccataaaaatgacccaacaagtaatgtcactaatgtccatgaaagtattctaagaatcttgtttgttgattttgaacgtttaataccatgattgaaaacaagtacccaagttaaaagaacaaaacctaaccaaatgaagatttgaacactcttcttcaaaccatgaacaaagtaaacaactttcttttcaagtaagaaatttctctcaataacaaaaacaacaatatgcataaaccaattagtcatcaaattaccacaaaatatcaccataacaagaacacaccatctccataactccaagctccaaactttataagtttccaactttttaactgtcaaactagccgttaaacaaccaaagaggaatataaacaaacaccattcaatcaaaaaccttgctttcaattttctatgcttttctttatgtaaagcaactttgttgtaaatctcttcagcttcatcatcatgcccatgagaagctgagaatttttgactccgaccggtggagaggttgttcggagatgaagctcgactgaatgagcttctaaaagatgagtcaatcacaccttgatctgatgagttgttgtgatcttcaatgggagctgatgatggctcaccaaatcttgatttgggttttgagaaaactgatctgttcagaatattccggcgagttggggttccgtttggtgttgggatttttgggggtttgtttggacttgggaaaaatcttgaagtttccggcgaaggacaactcaccggaactttctgagttgaatcaaaatcaaccattttgatctgttttggttctgatgaagattctaaggcttttggaggatacccttttggctcttcgttaaggatttcgactattacttgggtttcgccattaaagtttgaagctttcttcttctctcttgcttccattgaaaacaaccctgtaaaaacagattggattttacaagtgggaatgtttcagatttcgattatattaaggttttcaaaaaaaaaaatatataggtaaagattggaactttatgataaacagagtaatattttggcgccaaaaaaagaaaaactgtaatacctgaataaataaatgcttagtgacactgaaactgaagcttaactaatctctcactaagcaaatatgaagtgaagaaagagataccaccattgatgaaagcttcaaactttggttgattatatttttataaatggtaagtacgtacaaagtgatcagagctttgatattaacaaaaaggaaaattgtgaagagtttctgataagaatcagattatatattatatattaattataatatttattatatatagagatagatagatatgtacttatatagatgtaatattgtgattaaaggtggttaatttattattattttttgtttagagatactgaaacaaaaagtacacgagtttcttaatttaatcctcgattagtatatatgtcagcacacaagagatgatatatttatttatgttctgtattgtgaatttgtaatgtaaaattatgtgagctattgttttattttattgtgagtttaataggaaaaatgctaagggataaatatcttattatttgtgtattttaatgttaagtcttcacacaatttgtaaaaaatatagagaattgttcattaattatattgccacatatttgatatagtgtccttaagattaaagtgtcttttttatttttaccgaaagagttgtaaattactcaaacataaataatgtagacaaacacatataattattttttattttttaatgataaaatgcaccaaactccaattactacaagatattatatttcttgtcaaaaaagaaaaagatattatatttttagggacacgattttatcagggtttcaaggtacattaaatgagtgtcaggttacgtttctactttttaaccctaattacccatagatcaatctcaaccgtcagatcaaataactcccttatctgacggttgtcgtacatcacgtattacaatccgtgaaagtacaataacaggacaaaatcatatccctatatttgtagaaaaactaaaatttttgttctctaaattatgatatttgtaaaaaaatttctaatgaactttttttttattgcaaaaatttcctttcaactatgaaaatcgttgcaaaaatctccctccagttatattctgctcatttataaaataatttatgtatgctactatgagttacagctataattatagtactagagcttatttaataactttaagctacttaaaatttaatttactagcattaaacatataaatagtagctttaagaattaatgtatatacatactcttataatttattattagattattatttatgtatttaattattgtttaaactcttaaattaaattagattagtgttatatttagtgttatatcaataaattattgaaataaataattaaaatactactataaaagaataattgcaataattttatagttaatgaaaaaaaatttacaataaaaaagaattcaaggaataaaaccctacaaatgtgaaatcatatttattctttttgttatgaggtgtttgaacaaaacatataaactcaagtttgtacataaagataaataaaggaatggaaaagtgttggtttttgggaccattggtgttaaattttgaccagaagtaaatataatctaacccaaccacgtggttcaagattcaaagatatctggaaatgaaattaactaaacaatgacaaaaaagcaataaagaaaacgacataaaaaccataaatattaaatgaaaaattagttttagttttagtttttgggacaaaacaaagcaaattttaagggaaatttgattttc

SEQ ID NO: 187674 - DNA, 3985 bp, Cannabis indica
aaacacatagaaagaatttacagaaccaaactcagtcaatttttctttttttcttttttttttcttttcttttttcaacaaagtgaggatgactctttgacaacctgattccacatcaatttcagtgtatcccaaccgagagtaaacaaagagcccataaaggatgaccataaaatattgttttaattataaattatatataaaaaaaataataaaagagtcaaaagtgaaagggccttaattaaatttttctctttaactatgttggtctatataattaaaaaaaaaaaaaaaaaaaaaaaaaaaaaaaaacagcttggttgatcaattaaaataagaagaaattagtatattattgttgatcaacttgttaattattatataatcatataaattaactttgaaatcttgaacaaaatgtacacttagctatatatatgatgataaagagatattgtgtttttcaactcttataaaatggaatatttcatagatgtatatatgctatatggttccttctaaatttgttatttttttcagaactattttcgatattaaataattttgtgaatttaaattttaattaactaaatcttatatacattcaactagttaaaattatagttaaatatatattcataactttattcaatcacacaaatgcaactatataagtactcaatttaattataaagtacgatcaatacaatacaaaagtagttgactaattgatgatattgatatatgtagattttttttttagtcgtatttaatttgtatatattctatatatagcaaattcttcagtccttcccttatatatgtacttttgtcggtaatagaaaaaatatttaaatactcacctaaataaaagaaaaatatatattacgggactttaagcataagtagtaaaatatttttgttgatgcattgtaatattgaataattgtacacattttaatttaataaaataatatgaataaccactacaagaaaaataggatattggcacattcaattagggcacgacttaaagtggtgcccatattttggtatactttgggccgacactactatagtcgtgccccatatatttttttttttaattttggaggtatgtgggcacgacatgtggcccaatggacatgataaagtcgtgccaatttagttttaaaaaatacctacatgtcgtgccaatcaacagatggatactaaacaatgaatttgttggcactaatttaatcgtgccaatatccattttttcttgtagtgaacagataatataaggtgtgatcatatcggtataatattaagcactccaaataataacaacgccctaaataaaatattatagtttctttgacttgaaagtaaataggtaacctgaaataattgccacaattactcaatcttttttaaaaaaaaaattaaacacgttactatatatatataacatatatctgtcttatttttgaagtcaaccaaactatggagctatatatatataatatatatatatacacaatacatacatatatacatatttatataagttgatacgatctgtctctgatcaggagctatatagatcgtgtatcgtatgtctgaatacgatccatgtacgaaggaatatgccatgaagtttttcaacgcgtatacatatttatatatatattgtgttgattatattttagtgaatataataaagtgatgagataattaatttttgtgatttgacattgcagttttcttcgaagatgccaagcatgatatagccaaagatgacgccgtcaacaatggtggtagctagggtttattatatatacacacatatatattaatatattataaaaagaaagaaagaaaggaccgtacacgtaccctatgaagaagaatatctgctttcctttatatatacgaatataatctcacaaagcaacatcttgttataacacaaagcaataatattattagctcaacttttatactaaactattttcttcaatctctaattagaagaagaagcagaaatggagaaaaagactattgattacatgttagttccattagggctttttgctatggtgacttaccatgcttggcttctctatcgagttatataccaccctaccaagacgattatcggtgtcaacgccatccatcgccattcttggactcgtgctatgatggaggtaagaaagtagggcaaaaacatatgacactctttaatgacagttttaaactgtcgttaaagatttcgtgtctatatatgttagtcgttaaagtctaattattaaactgttgttttgtttgtagaatttacacaataatggagttgtgtctgttcagtcgatgagaaacaatatattgtcgtcgactcttatggctacggtggccataacgctcagttctctaatcgctgtgctgatgactaattacgatggaaaagctaaaattgaattgtttgtttttggaaataaaagtgaagctagtttatctgtcaagtatttttgcataatggcttccttcttagttgctttcttattcaacttgcaatcaacaaggtattttccctttgagattatctatattttgtaattatcatgtaaatattagattaaatcatcaataattaatagtaattagagtaattacattaattaagcttataaaattaccaaaatgatcatctccaaagtaattattttttttttatgtaagataattaatatattccaattcatgtggagcatttgctataataaggtccaactactctaagacatgaaatattattaatggtgtgggtgcaatttagtacattaaatttaaagttatataaactcaaatattttaaatcaggtatttatttacgttaataataatataaatatttattgtgttggacaccttaaagtatttttttaacatttttgcgtgttttgttttgcagttattatagcaatgcgaccactctaattaacatgccgtacaagagattatcggaagatgatgaacacgaacaactactagttgatttcgtagcgaacaacgtgatcatgggaggctatttcttttcattagggttacgagctttctacatcgcgttcgctctattcttatggatattcggtcctcttcccatgtttatttacagctttgttttggttttcatgctctatttcttggatattagctttcattgtgaggggattgttgatgtttctgatgaagacattagtgttaggagaccaataatctaattaaataaataaataattatgtttgtatttttgtttaggttggtcaactacttcttgatgagaattaattattataaataacatatatatgtgtaattaatatcttgatgaattgttgttgtgattaatcatattcaatccaagtaattaaattgcatatttattaattaaataataataaaagtagtaccaacttattcaatatgttttcacatatatgtatatatatagatactgtatattccgtaccatttattctagaaaatgacaattcactaacacacaaaaaagtactaaatgctgtcgttttcgttgatagttttgtcgttggtgatttcatgtttcatattttagtttcaagttggcaacttggtcaaaaaaactaattaataaaaagtcaaataattatgcatgcatatacgtaccaaatgaattttacacctcatccatatataaatataaaaacataaagacaaaaatatgatgtactttttttcataatctaaaaaaaaaattatgtgaaattgtcaattcatatatataattgcttatataataaaaataattatatcacttatatgtataagcaactcatgtatatataatagcttgatatataatagtatgagtaaatattattttcaataatagttattgattagaatttttgtcttgtcaaataataataattagatttatatttttaaaaattataaaaaaaa

SEQ ID NO: 187675 - DNA, 3634 bp, Cannabis indica
gctaattttttttttttcattttttttcatccgataaaacaatctcaacccatacaatgtaaaaataagatatttttctaattagatagaaaaattaaccataaaaacttaaatttttctaattttatggtaataccaataaagagtgtaaccatatataaaaatagaaaacatatttgaccacttaagttttaaaatataaatatatttgtaattttgtattatatatgtattagatttttaaattatttattcttttacctaattaaatatataatttttaaaaatattatataaatatttgtaaattgaattgaattgttatttttaaatgtcaattaacattcaatcttcttatataaatatcctcatgactttatatattggattgaattaattattttatgagattgttgttatataatatttgtttgtgaaacattatgcatgtttatatatgttctctctcattgtataactgacaggacatgtcctagatctatagaaggattcaagtgatgagatatatagttggttttatgatttattccaacctaatattattcgttataatcattcaaatctgattacaatggctatttttcactctaacgtgtttctataattatttctctctactttagggaatttccgtatagatatacacatatttttgattgataataggaataaattctttaaagaactttacacaacattattttaatataataaagaacatggacatattttgcaattgtttttcttgatcgatttttaaaatattcctgatcatatcatgaagtatagaattagtagtgtgttttcgggtgaagaatattaaataaattacagaaatttcttttggggattatatttatattatatgttcgtcaaaggtagtagtacaagtagtgttatatgtatgttgataatagtacaaaagaatcaaaaagcaaagtacaatatattatgaatagtttaattaaagtggagaaaagaggtagtggtgttatgaaaaggggatacccataatctaggagagcaagaagttggtcgttttcttgtatgcaggcgggggaacaaatatagatgtttgtaaacaaaatatgtacaaacttaaacttacaaaaaaattcaatatataatatattcatatcaaatatggtccccatgtgtcttcttttcttattttatatattcttctttcaaaagtacccaataactcaaatattaaaatggttgtgaacagctttttgtaaataattcaggtatatattgtaaggtggatttgattgatattgtggtagtggaatcttattgtgtaaaaaattgggtcagttaaattttcttttttgttcgtattcggctgttttgttctcatgtgtgtaatattcattaatgctatatcctcaaaaggattatttattgagctttgtttttggtttaatattaatatgcagtattgatttgatgtagacatatttcgaaaaaaaaatacatatttttaataataagcttataattcttaaatccctcttaaagacagtggtggttaagtctgttagacttgattagcttatgcgcagttagcaattagcttactgattattatgtctattattagtttgttatcttgtaattgacaaataagagttttatgttctatactcaatgtaatcattattactctttaatgaaattagttagttcatcgatatctcttttctttaatcttcacgtggtatcaaagctttctctcatcttttaaatgtgttagagaattctacattattaatgtgtagaataataatagaatatataagatgattgggctactcctcccattactaattagttttgagatagaatctgattcaccttatcccgaattctaatatggtatctgagtaaaaaacaaacaaacaaagaaaaacctctaactactattcgacccaaaaaaataataataaaaaaagccgatgaaatttgagccaaatatgatgtgtggaacgataatagaatatataagatgattgggctactcctctcgttgccaattagttttgaaatggaacctcactcaccttctctcaaattctaataaaaggagatttcggtaacaaacaatggtgatcttcaagattaaagctcaaactagaaacgagcaagatgttcctcttctgcgatcataccctatttcgtttactcattcattaaacttgatgaacacaattatcttccatggaagcatcaagttcgtgcatcgatcaaaggaagttgtttacacaagtatcttgatgcttctcaaactcctttcaagttctgaaaggttgtaaatgaagcaacaaacttgatcaatctagcctatgaagattgggagcaacaagataatctactcatttcttggttactatcatccatgtccgagaagacaactagtcgaatgattggttgtgacactacacctatggagctatctcaatgagtactacactgctctcaacacaacaacttttgtatatacaaaactcaattgtgaaatacaaaaatgattggctctctaaatgattatctgttaaatatcaagggcatcattgatcatctaacaaccatttgacaaaaacagactgctcaagatcatatagaagaaatttttaatggtctactacttgagtataatgtgttcgtgaattttgttacaaaaaagacaagatgattgtactattgcagagatagaagcattcctcatggctctatctgtttgaattgaaaagaatgtcaaatctctcgtcatttccaaaggtgaagttagtctttcccacaataagccttctttttctaattcatgtatcagttttccctccaattctcaaatttcctttagcagcaatcatgcccctattgggctagtaatggttatttggtcagctggctatttcaagaggtggtcctagcttcgggcgtgttcactatcatcctaaccctacatgtcgcagtggcccctaatctggcagtggaaatcgtatcatatatgctcaaaaaccccaatgtcaactatttcacaagcttgggcacatagtgaaacaatataggtttaacaagtctttggttttaccacggtcctttgctcaattcactgaaatgcaagcttgtttagcctctccttgatcagtcgctaatgaaaattggtatcctaactctggagccactcaccaactaacacataacagctcaaatcttgatgctagcagctcttacttaggccaagaaaaaatctttgtgggcaatgtcacagggatttccattgaaaatactggtaactcttcctttatttcatcttttcaatctaaaacactgactcctaagaacatgttacatgttccctctattactaaaaacttattgagtgtctctcaattttcccaagataacactatctttttttgagtttcgtcgtttgtcctgttatgtccaggatcaggtaaccaagaagatcatatttgttgggaagcttgacaaagtcttgtacaagtttgattcaaacaatctcagccatctggtttctaactcactcaatattgatttgattgatgtgattctacttgagattcaaagctaattcaatgatcta

SEQ ID NO: 187676 - DNA, 1766 bp, Cannabis indica
cataataaattgtaatatttaaacattttaacaaaaaattatgatgtcttttttattatatatatataaatttttaatcactactacaaaaatattttttgctttagttattaaccctaatcagaacccacactattatttggctaggaaattttagcgtcaatttttaattggtgctatggagaaagtaataacgtcgattactaattaattaacctacacaaagcagcatcgttaatatttaaattataaaaagtgtcttaattgcatcggttattaactgacactaaacccaataagtcagttataataaagtgaagtacaaagcctaactttttttcgaaaagaataacccaaaattaaagaaaaatactccatttgataaaataaccctaatatataacatattttttttcttagggtttcatcattaacgatccctccccagatttttactctcgatctgctccctctcccgcccatagcccatgtcgtaaccaccccgatcgtctcttctcactcacacatctcttttatgtgtgaccccaccaaagtcacatcgtcgactcatgattaccatcgagaggggaaatagctaggtcatgagtcgacgatgtggctttggtgatgcttatgtttactccttttgcgtcgctcaaataagcgtcagttataccaactaatattagctacttttttatatccaccccaaaaggcatttttattatagtctattaacacatattataatgatctcattatttacatctatgtatataaatattacattaattaacaatgttaataattattattattattcaataaaaaattaattcttattatttatatataataataagtggagtggtgtgtgtaaagaatgagatgtgtatagtagtggtcttttgataattgggtggtagacttgtctgtttcaatgtatgaatctctctcattattcatatatcttttatataaattatatgttcaattcgaactcgaacatatatataaatatatcacttatatatattattcaaaagcatatatataaatattcagttcatcaatattggctcaagaataatattacaaaagacataaaacgtacgacaatttcattttattattatatatatatgctatttgtgacatgtcgaaaaactctggatcaataatttttctgagcaaagctacaaacttttttctaattagagaagaacaaaccaacattattttctctttttgatatttatatagatcctcttgtctagtcttatttgtgtttggtttaatataaatatataatagagcaaacacaaagaacattgaataaacaaaacccaagttgaattttttattttttatttttttaaaaaattcaatctgttatgtttttgcagatttttattgcaagtacttgtaatatttattgtcaattatataatgggcttttgaagctctaaaaaataaaaatattgagaaaattatattgtatatctagtttactttatttgttttaatttttatctttatttttgtattttttaattcagatatacatatttttatagatgatgtccttattatatctcttaaattaatataaattatgtactaaatttaaatgaggagtgatgatatattggataacctactcataaaagtgaatatatgttaataaaatataatagatgatatttttgattaatggataaaaaaaaattctaatcaacttaccccagaaatatttttgttatttg

SEQ ID NO: 187677 - DNA, 3796 bp, Cannabis indica
tgacatccctatagagaggtgttatgactaaactgattacattttctgcatttattcgtactagaaactgttttcaagtttgtatattaaagaaaaaatgaacgaaaaatgaccttagagtactatatgtactattctaaaaaaatataggatcgaattaactttcacaaatatagggtcgaaaatattatttagcctaaagaaagttaaacttaccaagtttggacacacaacaactactgtttttccagtaatacaccagtgagcaataacaagacctggaagaagcactattttatcaaaactccaaatccctataaaaaatccaaaggtacttgatgaagcacatttcagtgctgaaatttcaatattagcaaagccaaaactgtagtagccgagttactcttacgttttcaagggatagagcacgacaaattgtagcggtggtccataatgatagcgccaaagcttcttcaaatgcagccagcttaaaattgacctttacacaagatcaaattgtattgagaaaacacaagtcacatcgagcatagcctggtaactattaagaaacagaagaaaatacctcagaaggtgccaatgaagccgaatatttttggtgaaaaccaagggaaggaactggaggtcgcctgtattcaatagactgcaaatgttcaagaggttgaaaaactagtttacctccccttggaggaagaggaagagaatgatatccacaaataatctgtagcaagtcatttttattttcctaccacataaatcacacaagaaggaaagatcaactagtaatcaaaacaagatctgtatcagatagatgtatggacaataaaaaatcaactaaccttagcccattccattattaagtcatccctatgatctttatcgaagttggcaaagagttcatcgtcgtcatcctctgatgtcatgcttctagctgggctgccaagaataacaatatattaattaccagactatacattgaaaactgcaaattcctaatgtatgtaccacctgaataagaattcagaactctcaaggtgctccaacgtgcgaaatctagaggagaaaggtgctctaatatctggtgaagaatggccttcatagcttccatacaatctctccaaagtatccgatcgtgtttctgaggcttcagaagcattatcatcaaaatattgcaagttctttctaccatctttgtctatctcccttgcttgactgatttcggaagattcactagcagtaatactttcgggagaggtaggttcccatatccttagtgaggactgtggaacgatgttatcgggtataattccagcagcagcagcagtcatagctactgcactgtcgacgggtattgcagaattcatccaaccatttaaaggctctctctcaggcgattccacattctgattcatttgatcattagtagaagggacataatcatagagagacatttcggtgacaaattctgttatccgattcagacgttgctgggcaattatactgcagccaggagagtaaaacttcagtcacaagtaatggatatacaaaaacaagattgagaggtgaaatttacctatttaacatctcatagtgtaactcaaagaaaggaactctagttagtacacaataacagcgaggtgcagacactaaaaatcggttgaatcctcctgatgaatgagaaagaggtgatgcaccacctaagattccaggtggtctctgtacaatttctagtacatgtaagcaaacaccatatagtgttgcattgtctgacccctgaccaagaatagagaattcttaagcaatcaaatacctatgattctaatacattaccgtatatacttttgctttggaaagaatgaatttcatacttggcaagactagaacattgcataccttaagtgagaagatgaatgataaatcatcccggcccaaatgttcctgcgaaataacaaaacaacaatagatgttagttatttgtacaaagaaaaaatggcgcttggaaaaagactaactccttcctaatggagatgaacaaaacatggggacatattgactggaaaaactctgctggggatgacttctaaaaagatttattatacctgcccataaataagttcatttagatcacttagtgatggggttttctccaacaactgtgcctgtattatgacaaacccgaacaagtggaaccatgaggaacgataaagaaagttagaagctagcatgttgagataggaaacagaagatttcccaatggaataagaaatagaagatcagaaatacaaaccttaactccggctggaaaacagaaggcagctaagtctttccaacgcattgctattttcttccccggaggatatttgaacaatatctaatgaaacacaagacttaacacaatgcacaagttgaccaaatagcaaatacacacaaaacaaaaaagtcaattactcaacctgaggttccaagctagggaatgaaggcccccgctggcgaagcaagttaaagtctactaattcagatcttgacatctccatttcccactccttccttttagcaaatgcagcctccacagtctcgagattagcatcaggctgaagcccagcaacaacaaagtgttcaaataaagacgttggttccttgtagttggtatgatcctacaatgacatcctataataagaactccaaatctttccaaaataatccaaacccaagtgagccaaaaagtgaaattgaatataaaaaaatcaggtgaacattgaaataccaaaactttggagtgaagctgataccactggcgtttttggttagccaagacctcgggattgaaattagaacgacgaccttcatcccttgaattgctaccccatttccaagccctctgaacctgagttttcaacctatgaaaactattacttctattgtgaccactcaatacctcactttgggctcttctatgacccggtccaggtccccatcccaatggagaggtattagctatgttagaatgaccaggataaacactactcaaagcttcaccagccactctacatgcctcctcagacaaatgctgcaacatcaaaattggggaagaaggcctatcttcatcttctctgctatccattctaatatcatttcagctcatcttgtaaaatcttcatttcaccattatcaacaacaacaacaacaccacacactccattaacaaacccaaatacattttcacatatttcctctcaccagttcttcaatcatatcaaaaaaaaccaacccaattaaagccaaaacctttgaaacgtaagagtttgatcctcaaatttcaacaaatacccagatcacaaatacgtccaataaccgtgaaaatgacccctttttcacgtaatctccactttggggttataaagttttgatttttaatttttcttttcaaactttcttgaccaaatcatataacggatacccctgatcgcgaaaaatgatcaatgcataacggaaaagagagtcaaaatcaaacatttgttattattattattattattattattattatcagaacaaaaaagattcataaccgaaacagtgtgaaaacacataattgggattaaattcaataactgcttgaacaaattaaactgtcttacagtgaataatagcattattatatattaaaataaacaatatttgagaaatgtatggtacctgtgatttatattttctgttgcagagagcttatttttttctttgaggagagagagagaagaagagagagaagttgctaaat

SEQ ID NO: 187678 - DNA, 2964 bp, Cannabis indica
actttagactcacaatgaattacaaacgtctataatactatgttaaaatttgaaatggaagtggctaagatacatgggattccatctgaaaaacaattagctattaaaggagtggctcatttatcatgacaatttaatttgggactaactataattagattataaatgcatcataccttgtaataatcaactgcaatgaagtttggccatcttttaccagaggcattatgacaagtattgaccatggcaagtaatggagctgaattgtccttacaaccttgagtcaaacttggaacatctctaaaatagttcattagaaccaatgatcttgaagttgtattcataggaggcgattcggcccggttcgggcaagacccagctttcattcctccatttccatctgcattttacaaaccccatgtatgcatattaattaagcatggttcaatttattacacatattaattaaacatgtttttggtggaagaagataacttacattggttttcaacaacatatctccactcataggcaatgccttcagaagcttctttacttgatttagaagtaaagaccactaacctctgattcttctgaatcatatcatccactgttggccaatctctaccatttttgggcattcttgatagagggaaccaatactttctaaggccagccgcatcaaacaccttggtaagtccctttggggatgtcacatagtcttcgattataattgtgacaatctcagttgggtttgattggagaaatgtttcaacttctttcagcacattaatggccggttgctgccaataccaaacttttagataaattatttaccataagatatgcaaagctttgtatatattttatatggaaaattaggtaatttgttatttttggtaaaaaaaattacccttttaatttaaagatctttttttatattttaactgtattctataaatatataaataaataataagaaaattacataaagtaataagatcatattttatgtaaatataaccttaaaaactataaaaatatttaaaatttcgtataaccgtgttgttgtaatattttgttttgtgcatatgaactgtgtagatcttaggtacagacctgactcgacccgtagcgtattatatatatttttttaaaatctatacataattaaattatgtatatgcatgtttggttttaaacttacaaatgctgtgaaattatagcattggccaccgaaagagtgacaaagccaaatgtcatttcgaaagtcatacatgtccagcattagtcctcttacaccatcctgcataaaaaaaaaaataccatttaaaattaggtacacatcaaaatcaaaattacttatataaaatttaatacttaattatcctaataattttattatattttaaaagatataaaacactacttatatttgttagtatttcttttattatatatattttattagatttttagcatattatatatgttttgggatattttttgccccactagttaggttaaattttaatatgagcagtttaactactcaagttagacttgggaccggaaagttatgaagtataaagtgctaagtttctttttttaaattaaagattgcacatgccaaccaaacactaaagtatacttataaatacataattccaactagactagtcctaatttagagcatgatctaattcagaaattataaggaacatcatatgaagtggcataataaaatttaataaataatataaaaaatcgtaattattcataatatttcacgtcgatatgatattgggcatctaacattatcgaaagtcaaattaaagcacctaatgtgtggcaatttattatggtagaaaattgggagaatcataggctgaaatacatactgtttggcacagattttgcttatactttgtcaaaaaactattaattagtgtattcaaaaattacactaattaattagattaaaataaaaaatattatgtctaacattatttattgagttcaaatgaacgtcattacctatttaaaatctttgacataacaaacaatacatattagaaaatgaacataaacaaccgaacatcattattccaagtataaaataacatcatagtatatttatttttcccacttaacttataataattcacagtaaaacatgaccaaaatcatagcagccaaataatgaagccatatctttccacgaccaccaaaatattactcattaattatgtcatctctcaccaaaaccaataataaataaaacttcagaactatcaagcttcttcaataagtattacttattaatgatcactaaataaatttaactataaatattaattttaaaaatattaaattattacattttgatccaataatgaataataaaagagaaatttaaatttctatccttaatttaaatttcaaattcaactttttttttgaaaaactttttatcttaatttattttagctgttgtacaaatgaatttaggataaaataaacaaggttccatctaaaaaccaattgacaatgagatgagtagtctattcatcttctatatgacaatttattcacattaacaatgtgagactaactctaatataattttttacaatgacgtttaaattgttgcttgttacatgcataacaaaagaaagtcaaatggacaacaaaatattttagtctttttttactataaattactcaataaaataattaaaaatttacgtgtactcctaataattttaatatacacaattataaaaaaaaaatcaacttaaattttgttcgagattcaaatacagaagagtgtaccataacaaccattttaaagaatgtaatatggggttacaagattgttaaccatattttaatccaaatcactatatcataatccaaagttccaaacctacaaacattcccattttttttttaattttaaaa

SEQ ID NO: 187679 - DNA, 1205 bp, Cannabis indica
gtttaattaattaggagtacttaacttaattcgaatttatcattccattacgtatgttaatataatattattgtacacatactgtgcatattaaaataattaacattattatttcattttaattaatttgtcataagacagttgagattctttggggccgacctttctagggatttggagaatgacagccaacatacagaacctatatagtcggcggcccatgccattaatattcttgtaatcggataattaaatttcaaattatcattaattatataaattaattaatattatgtttcattaagattttaacacttgtttttttcttctttctttctcaatacggtttttctttaagggaatactacttttcttcatccaatatatatgttctaactggcaagtcaactatttgacattataccgatgatatttctatgtattcttatatatatccggtatccaaatttaatatgcaaaatctacagcacaagctagatttaaacaacaaaatcataggaaatattcaaatatatatgtgtatagaaattttatcaattatatttggcatgtgatgtgaactcgtataagtcatatataatatcgcttatcatatattgccttgtcatccaatatgtaatttgatatttataatattacctgtatatattaaaaaagtgtataataaaatagtatttggtaattatttaagtcgtaaataataaaatataatgcagaaataatatatttatatatttatagagtaaaaaagcaataaacaagtttgaaattggcaagtccaataaagagagccaaaaatcttaataagtattagaaagtgagtataatttgatgggatatgtagggatgagagcgtgcatatatctgtcatatatatgtgtatggctattgtgtaattcaaggcacacctatggattctgccgagtaagttctctcaaatttgaaagattttgaagaaaatatctctctttaagattctttgtaatcttatactactaaagttgggcctcacaaaatctctccaatactatttatcctttcccttatttcaattttgtggcatatacagccgaaaacgcccatatttctataaatggtcaattccgtcacgcctgcctccgatctgccacgtggtgtttacatgtacactcacaagtgttattcctatatatattgctaccaat

SEQ ID NO: 187680 - DNA, 1806 bp, Cannabis indica
attttcttttgatttaatttgttcagtgaaattatttatgattagatatttattattatgtatgaatttgtttcctgtgttgtttgtatatggattttaaaataaggttccatgtcttttgttatatggagtgttgagacagttatagtcatcaaacaacgaataacattttttggcttcatgttttctcctgtgtacagactgtacctgcttgtcaaaatctctacaaaaattccttcacctaccactgcctccaagatgaagtaacattacaatttgatgatgcaaaccagtttttaggtatgtattttctctcaatgactgcacattggttaaatggatactgtccttctgtctctgtaattctgattttgtggagcagtcttctgagatttagttgtttggctactatatgattcccaggattcattatcaaaggattacttataatacacagtgactatatgagtcctaaagggaaaaatgtagattatgtataattcatggttattaaatgtgtccaaatgtgtgaatgaggttaggctggcatacaattctccgtctgttttttgacttgcatttttcaattaactaacaagttgtttcgttatagtcctacaaatgtagttttcaaattctggcttgctggtcccattaaaataataataataataacagcatgattaaacaagataattttcactgaatacattttaatgtttggcctcaacgctacaacaattgttctaaagcattggacagaaaattttcttggatatgttctgataataatcacgaacaatataaacaacataagggctattggctgcaaagtctcgctgtttttacttccttgatatgtttaagttgatcaactgcataaagtgatgtcactgtcagttactcctcactggttttgtgtggttttgaacttgcaatgccaagatccatttatttttttgttagacttacactttttcttcttgtgtcttccatttcctattaaaaagttgtgttaactttatgtgtattggctattgcaattgatattggaagcttgtaacaagaaaagagaagccaaatgtgcatattgcacttgataaatatgtggagtgaatcatgctattgaactttactaaattgttgtctgtaatttgtaatgctcaattattgtcaaacttaattaatggatgtcgaatgttagcctactgttagagttatcatttgcactttcattttcttacttcatgcttgtttttgcagagcaatgtgaaaaggacaaggctcgtgtgctagtgcactgtatgtcaggtagaaataggtaaggaattactgttgaatcacctttagttatacatttctttcaatcttgtgatttctttttgttcacgatatatatatatatatttatatatatatatatataacccacatgtgtagaatggaataatgtagtgcattttacaacaagcattctggataatatctttaaaacaagggatgcttctttgttttgataggtcgccagctgttgtgatggcatacttaatgaaatctagaggatggaggctagcacagagttatcagtgggtgaaagaacgaagaccatctgttcaattaactgaaggtacacatgtgattttgtcatttgagtttactttttagaaaattgcatttgaggtttaaatttgataagccccaatccctttgtacaaaaatagtagcaaatacaagaacaatagcaagaaatagaacgactttgtgtttgaattgatatttgaatgagaattacataacaaaggaccc

SEQ ID NO: 187681 - DNA, 4147 bp, Cannabis indica
gtctttgtcatagctatatagaagaccagtcatttgagaaaatttgcaaacacatccaagcattaaatagacataaagttaaatttcgtatggaaaaggcaatgtgagatatgaaaatttaaataggggtaattaatttgtaatctgaacacaataagagtaatttaggataagaagcaagaggggaaactgagatggctgaggatgatttggttggtagtatcttcaccaccccactgcaactgttcttctagtttagctcattagtcaagaacaatccacattgtgcagaacctgcacaaattgagagtgtgtgttcatctctgaattagaggtgggttttgaataacattagagagcttagaaagtatgacttcactgaatggaggagtgctttatcattttttattctagttttctcatttctacatcacttatcacccactctcttcttctagatgtctcttcaatgcaactcttaacaaaggggataagaacaacgttattgttctttccattttttttttaattttatcaactttgtccttttcttttcttctacaaaataaaaaaaacaaaaaggaaaaaggaaaaaaataactgtcattttctttaactatttttccttttctgctaagctctgcaaacactcttttttttttcaggaccttatgttttttaatttttaaatatgctctcactattttaacccttcccttcgtaccctaatgtcaaatatccccaaatctcttctttagtttgtttcattgtttttcatttttcctcttcagagggacagttgtttctatcatcacatcagaagcttatgaaatctttctcttacagactgcaaattgtggaagtacttggactacctgaaatatccaagtagctcaattacttctcagtttgctcaaaaaatacatcatagattaagttccttttgatttgttagcatttttctattctttttgccagtttgctagcttttctagtgctactcatctgtttgaaacacttcactttcacggagttctcaggcctctaagttttttgtcaattcatctaatctattttctataccttttatcttctactaggtttagaatgccttttaaattagtcagttgctgaaatctttatttgcagttgtctgtgaggatacccttttttcaaaagctaaagagttcagttacttatggaagattttcaagaaaatttgtctccttcctccttgttatcctcttctttctctccacccaccccacacccattgtcaattgattctgagctctggcagatgggggaggaaagagcccaagagatattatgtgtcattcaaccaaacatagtttctgataagaagagaaaggaggtcattaattacgtgaggaggctaattaatggatattttggaacagaggtgagaagttttctgctcctctctcttttgattcttcttgatatgtatgaattactatgttttgttttgtttcttgttctttctgttgatttttggggctggttaagctcactaatattgtcaactccccatcaatgattgtttgtggggaacccattattttaaatgtgtactgtatgcttaatagtatatgtgtaagattgtttaatttctttggaaaaatgtctttcaaaatttgttaatggttgtgtaatctccacacagcagtggggagcttgctatggtaattggtaaataactcttgatttttcttttgatggcataagatatttccttctcaaatctttggatctgttgttaatttggatgaggtgtagctacatgttctgccccggtacttcggactatcattaaattgatcgaatattcctttatttctacgtacatttatgtttcactttgtcgtttattatgccttatccgttaaatcgtatctttttaactgtgaaacaaagccaagtgttttcaaagctttgattggaaatcctatattctagctgatgacacattgtgtgaatagaaaaactgaaatctaaatttgtgatctgatgaggctgttttcgagatggtaacattttcgctttaaaagttgaccttaatttatttatttgctgtgataacatttaattatgtttattgttttttttttggtaaattttgttcacttgtgttaagcttgtaagagcgttatgttttatcttctgaaactaggctctccgctgaaccctacaatatatggggacaggaaactatagtgttgtatctaagagacttatatgctagctgttctttcttctcgttttttccatggatgctaatgccacttaattagcactgccctcatgtttttttcccttttaatatgaagaagagttcttattaactatagatgaaacacgcgtttttacatggacaattagttcaccgcaaaatcagatttttacaaaacaagaagatcagaacactaaacacccttggaatcctatcgatcaatagtcaaagaggaaatcaatgtttttgttatgtggcttatctcttatacaatccacttgtagtatctcatgaggaaatcttaggacttgctaatatttctcatattcttgcaggttttatcattcgggtcagtccctctgaaaacctatcttcctgatggggatattgatttgactactttcagctatcaaagtttggtagaggatttagcaaatgaagtgtgcaatatactcaaacgcgaagaagactcagtgttccaagttaaagatgttcaatacataaatgcacaggtttgcctttcttaattttgactttttttttttaaaaaaacaaggacactaattaattctcatttccagtgacatttttatttatttatagacgattttgagttagagcttcatggacaaaccttatatactgatatgccagctgacacactctgccacgtacatcatagtacataaaccttacatacttggttgtatgtaacgtgcttgtgatggttaaagattttcttttttatatactccagtatcaaacttttttcctcttcttgctcgtagttgttcattcattttgcttgtttcattcttagtgttatatattctctgtaaaattcttacatgaaattaaaattttgaaagatcagaagaccttgaattttaccattttctcacttttacagtgccaaaatagctgcaaatctgctgctaggtgcatgctgatgtagatttctaacttgtgcttgatttcccatttggactgctagtactatgaactaataatccatacatgtcaaatggcaatcaggcatggacaagtggatactgttgaaccttcgtttataaaacgttttttgtatttaaaaagtaagcgttaagagcgatccatgcctttaattagttcccccataagttaatacctgtttaggtattacagttacaatacattgggagatagacataagaccataacgagaactgatgacatcaactaaaggataataagacatgaagcatttattcgccaatcttaagcttcacgtggcattcagttggtttttttcccctatattgacctcactcttttcttctaccgtttcaacttaaataatttcatggagtaacttgacagtattctacatgttagtatgaaataatatacgcttggttaaattgttggaggttcaaatatctttcgcttgtagcctaaccttgatagacgaaactttcaatttttgcaaaacacatgcatctaaattaaaccacaaatcttacccaagataggtagctcaaatggttagacatgtggtttgctcctgtaagatctaaggttcaagttcctcttgggcgcctatatagctattgatataggatctagattttcatatattgcaggattaagcggggagtctagtttcaaaaaaattaaacagatcctcagtaaaaaaacctctataccgaaatatacgaatatgatttgacttccctttgttatctcttaatggataactaagtacatatggaggcttactacatgttgtggatgggacaatttaaattggaaatttatgttcagacagctagtgacaatggatccagtagtattcttttggcagagagccaataggtaataatagatatgtttaataaatgacaaaaaaaaaaa

SEQ ID NO: 187682 - DNA, 2184 bp, Cannabis indica
tatatcatccacatatactagaagaatgattagactagaccctgctgcaaagataaacaatgatgtatcggactcagaggcagtgaatccccactgaagtaggcagtgtttaagtctgtcattccatgcacgaggggcctgtttaagaccatagatggcctttttcgagagaaaacatgatcttgttttttaggattaacttagcctaatggttgtctcatatacacagtttcttataaggcaccactaagaaaagtattaacaacatcgagttgcttaatagaccaattgtatgacactgctaatgatagaattgtcttgattgtaactagtttcacaataggggaaaatgtttcttcataatatattcctggtgtttgcaagtaccccttagccaccagtcttgatttgaacatattgagagaaccatcaacattaagtttgaccctatgtacccacttattgtatatgagatgcatcccaggtcgatatggaacaagtatccaggtaccaacatttttgagagtagtgaattcctcattcatagatgcaagccatttatgattttgtaaagcttctttaacattccttggttcagttgggaggagagactgagctaaaggatgttttatggccatgtaagcttttggtttaactattccattttgtgatttagttctcatagtgtgagttatggctggttgatcagtattgggtggtaactgaacttgagttgggttaggtgaagcaactagaggaacgatgggtgtaatagtgggtaattggcttgcagtgggaatgtgtgggtgagtaattgacataggatcaacaacagacattatagggccaatgctagtttgaggattagatgggatagtaactggtgtggggttttgcatagtagcaggctgagaagcagctttgtcaaggttgccggtttgctctcgaattactggtgcagggtgtcttgaggagatagtaacacaagttgtctcagtaataaaagtcaagacaccagagaagccagtattagtgtttaataaaatgtattaaatttggcagtaggtacattaattggtgaagaatttacttgatatgtgattgatgtagattgagcagcaactggatagtgacattcattaaaaacaaaattcctggcaatgaacattcttccttgattgttctcacatagattacccttgtgatatggggaataactaaggaagatacactgttcagacctgaaactcattttgtgaggatgataaggtctgagatgagggaaacaagcacattcaaagggcttcatgatggcatagtcttgtgtttgcccaaacagacattcaaagaggcttatgttattgagaatgggagttggtaatctgttgatagtgaaagtagcatactgaaaagcatgccaccaatatgaaaattctaagctagattgtgctagtaaggttaggccagtctcaactatatgcatgtgtattctttcagccttcccattctgttcatgtgtgtgagggcagggatgtgagaaagtgataccttgatctgttaagaatctcttaaatggtttgtattctcctccccatcgacttgaacacctttaataggtaagccaaactatttttcatccatggtattgaactggagaaacatgtctagggcttaagaattgaggaatatgggataaatccatgtaaacctgctatagtcatcaatgaagtggatatattatttgaatccacatctttggattgtatatggaaaggtatccaaaggtcggtatgcactaattcaagtggttggctggctctattgtgagatataaggaatggtaatctgtgatttttgccttgttgacaggcattacagaattacagggttttaagggagcctgtatggggtaactttggtagtaatttggttaatgtggccaaggatccttggccaagtttgcaatgccatgtgtttatatcagtaaaagtggaagcataacagaccataggcaaagacaaattggaacaatgttcttattggtagatgattgagtacaagaggaaacatcattatttatactacagtgattgaatttcaaactacaacaagaacaatgaacaaattgagattcattggttaaaaggcattgcaaggaaccattggacttggcaaatccttcac

SEQ ID NO: 187683 - DNA, 3536 bp, Cannabis indica
atatatatataaaaataaaaaatcatatgcaggttgatgcctttgtagtgcgttggtttgatccaaggttgatcaccataacagtaacatcatcatgatatttcctcctcctacctgctggaatatccatcaattcttccatactgaagcctgcatcgaaaacaatcacactcttagacctaaaggattgtctttctgtacaaattattttcttcccagaagactaaattcttcaaagattctctaaattgaaaaagttcatcatagaaacaagaattagaaaccaaagcatatatagtggaagaattagtagtcaacactatcatatttgagggcagtggtagagactttaaagatggcttaaggtggactcttgtgaaaattggtttatttcaatctttccctgactcataactttaaagccaaaagttatggatattattgatcaaatatggaaactttacctgcacggtttgctgctttaattacaagctgctccactagaaacttagcagggtcaccgtaagggtttctggcgatatagtacctcacgagctctactgcctcatcattgctaaagaagtcaaacaacccgtcgctaccaattataacaaattggtcagattttgaaatcctatgcacattcaacgatggttgagtggaaacatatgggggactcataaggttttgaactcgaagaattcccatcagtgcatcattcagaattttctgtgcaaggaaagaaaaagaaagtcagttccaattcaagaaaatagtatatttacaatgaaaaggaaactgtggagcattctgagcatggcaaatcatgttaaacttcagcaaaccaatatgagcatttaaaaggtctgctttctcaccaaaacaattttattttcatttttatcatataatggatgatctgtgcatagcacacaatagcttaaaacacaaaacaatgccaacctttttcaagtaaccaaccccaaatgcacgggtaaccttcaattttcctttcactttaccacctactacggtcataggatcatcaggatgctcacacaaaactcgatttcgttcatcctcttcatcaactgtatgactctcggtaagctggatagctttcagtttcatactcccattcaagtcatcatccttgcagtctgtcgccaatacagctctgctatcacctaaatttaatgtgtaaatcttctccatgaagaaacacaatcagaacacaggacccaatagaaaccaaatctggacgatcctccatttcctgctcaaccatatagaggaagtcagactcagcctgattaagagcgcgttgaagactatcaagcacttcttgcctaaatgactcgggtgacttttgaagttcagggtatgtcctacttttagaaatatcactgcacgaatccttgtttacaaagttactatcacctggaacataatgagaagaaccatccaagtctggacaatctgaagcttcaataaatttctgattttgtacccagtctaatgagctaaagtgaaatataatagtatcatacaatgtcccagcaaggaaatcagctgcatctcttccattaaaaccatcataaatggcacagaagagccatccattttcttcagaacaaacggcttgaacccgatcttcaccagcagctcctccagccacctgtacttccataggattaagaaagccctcatttctagatggagcactcatagagctaaatggattagaatcatagtcatgcagttcggttggagtggacgggctacaacttaagttcgacatactatttgggagggaagatgataacatatccaaccttgaaagacttggggaggaggaaaccttccggaatgaattaggagagtccaaactaggaagtatttcttcccctattaagccattacagatatttgtattagcaagagtagcattagcacttatagcagcaccagacaagcaagagaaactgccagtcctttggattcctccaggcacgaattcatatccaccggatagctcattagggctgcctctgttaccatagcactgatagccaaagctcactttgagttctccctctggtttgatcatgatttccccttgcacaattacagcctgcagtaacaaaataccaacactattcagttctaaatgaagaaaattagggatacacattttgctagataaaactaaacaactattagatgtatacacacaacctactgtggatgtgaatcattacacgatttgggaaggtcattaagaagaagaagaagaagaagaagaagaaaagaaaaactaaggcaaaacagtaggaacttgaacaaataagtcaatgaaaaacataagaaatgcaaagaagtaaatctaacagaaaacataaacagaattcaactcataagtcattacagtagctggattaacacctttcagagattcataactacttcatggaaagattgtatatgcaaattcaggcttccaaatttacttcaatatgcattatatcaggccttcatcaagaaaaagttggatcaaaaactaaaccagttaattagaagagtttacaaattggaaatatcaaaatccgacttctatctagtgattctcaagatttctcaaattattcagaacagtcgggtgtgtgcgtatacatgtatatatacacaaagtgtatctactaattacaaattttaccatatacacaaaacatccatgaagagaggaaaagaaaataatccaagaaacaagaaaggcagtaataacaagcatatgaaacagatcaaatactctaaaaacccaaatgaaaaatcaacaaaatttatctaaccccccatccaccaaagaagaaaaaggtcgatgaaaacaatgaaaaacagaaaacccatcacagaaaaaacaacaagttcacacatttccaaacgaaacaagagcataaagagctaaaatccaaaacaaaacccacctagtgtatcggtctctgaagaagagcagagcagaggaagcaatgacaataaaagtaatatagcaaaagaaataatattagagtaataatgggttatgaatggaaaaggaagaagaagaatatatatatatatatgagctgtaagaaagcagaaacggatctgagttagagagagagaaaggtggttttttagtttagtggagaatctgtatctgggtgtgggtggcatacgcagaaaatggatggttaagaatggggtttgctaagtttagaagaatttagtttggttggtttggcgtggaggtaggcgttgtgggctatggtgtggtgtggtctatttcactgtcaccaccactcagtctttctctctttctctctccaccggtaataccgttagtttttttttttttttttttttaatttgaactcttcttctttcttcttctcaaaacccaaatacgattactgtgtacccccgggaaatctatgaacagatttgactcttatgttacttgaaattaccaaactaccctccttttttctttttttttt

SEQ ID NO: 187684 - DNA, 3441 bp, Cannabis indica
attatttttttaaaaaaaaacttccctagttagtagaggtaaatatattatttaatttggttagacaaagtatctaactaagatacttccttattaaattatacaccctttacatgatatctccctttaatgctcaattattatacttttttatttcacattatttaaaactaaataaataaaatggactttgtgttttacccaaaagatgggcaatttgggaatatcactcactcactcactctcgttctctctctatccaccgcctttttatttttaattaaaaaataaaaataacaaaaatgtgttagccacgtaggattgctaacactgtttattacatttgtttttatttcggataacggatattccaaggcattttaatttagttaaattatccaaaattaatttaattatctatttaaatacttaaatagtcaacaaagcaaacgagagactgtgaccgccgttacaactcagcacagggacataatggtcatttcagttactttaaatccatcggccattttcatgcaatgttaaggacaaaatagtcattacacttaaatcatcggtcattccccatgcaatgttaaggacaaaatagtcattcaacttaaatcaagatcagctcagccattccccatgcagttcttcattttaacggcgttccaattcaactaaccgaaatattccacatataatattagattcgaacaaacagaatattccattccgtgctatcccgtgttagcatcgcgtaccgtacagtcaaaacgtccgtgaaaagacactaaaaacgacgacgttttattggtactcgaatgcgtacgggttagtatataattatatattctggttaggtgagagaagagagagagtacccaaaagagcgggtaaaagataaagacacgtcaccactttgtctctctacgactcatctagtcagctctttctctctctataaaaaccacttcaaaaatcatcagaaagagccaacgcacattctctctctctacttctcttcttgcacacagtttctctctctagatttttctcgttctctgtgtcaattgtatggccgccaattccagtagccgagggatcaccagcttagggaagcgattcgtcgatcagatctggactcgcgatccttctccactctctgctcccattctcaggtagtttcatttttctttttgtatacttttcttgtacattttctcgggaaatctttctcgcttgattcattgaacttgtttttttgctatgtatgttaagttttatgtgtattataaggtttgattgtaataattagctttcttgttttattgatttaaaagtatatcatgatttggtaactaggcaaacatttcttgattgttttctggaatttgatttggttagatagatcaattaggggaaatcgtgcactcttgattcgttgagctcgttgttttgttatatatgttaagttttgactgtaataattagctttcttggtttattgattttaatatcttgatttggtaacaagacaaacatttcttgatttttctctggaatttgatctggttagatagatcaatcagtggaaaccgttcactcttgattcattgagctcgttgttgttgttgttatatatatctataactcaaattttgtttttattcatatgtagataaggtttgactttaataatttgctttcttgttgtattaatatatcatgatcctgttgcatttcttgattgttctttggaaatttgatttgtttagatcaattaggggaaatcgttcactctcgttcgattcacttagttcgttgtattgttatacataacttaattttacgtatatatttttattttattttttttaatttaaaattatttatatcatatgatcctgttacacttctggattgttcttttgaatttgatttgtttagatctattagaggaaatcggtttgaggaaatttgatctgagaatgaagtcattaatttataatttagagataggtttatgagtagttgttttcttttaaggagactggtctgttttatgtaagattgtgaccaaggtttgttaatatacccattttcattttcaactaatattgtttggatgctacacatgttgatacgtacgaagattttttttttagacggttaatattgattcacagaaaggggaccgtggggtataggaaaaaggacttaaattgctgttattagacagttgtacagtattcatttataatcaatccctttcaccgaattttctttctgaaatcgttggcatattttgttgcaaggtggcattctatgaaacatgaaattttttcttttgtttcgtcactacccttttttgggtttctagttctacttcctgtacaatttaaaatagtcactactgttactttttttaggaataaagtgtcagcatattaattgcaggtgattataaagcttattccccaaaaagggaaacaattttttttttaatcatacaagggatttttctttttgacaatctttaatttgcttagtgcatgtttatattttgttttaagtttcaattgggattaacttggtttttgtgataatagtttacatttgataggatcattaggaaatgtgttgggtccactaattaaagttacgattaccaggtacaattatgtgtttaataaagtaacttggtagctgagtatagattttctttactttatacgacattgaaacatgttagtgaaacatttgtacccttatgtactaaaagtgaattctaagctaaacaaatctttagtaatatttttgacttgaaaaattcaaatgtttcatgctcttagagttctttgttaaaactcatgctgactcttgcttgtcaccaaagtctttcttgaatcttgacctgaaaacaaaattaaatataaatggcccatgtgattaaatttctgtcttctccaccttatttttttcccaagtgtatcattgtttatttatttatttggctagtgtgactagcacaaattgttaacttttcttatgagccgtcgcttttacaacactaataaaaaatattttttattgtctttgtcttgagtgaagacatattaccttaataatgttagtaaccttttatcctactatttaggcttaagctttaggataaggatgcttatgtgttgacaagaaagaaatcagtgccaaataactacattagccttatatgttgtttgatttggaagaaagttaggtggagagagtcagtcaccagtcattatagtatttatgtcacgtattacgcacgtgatcaagtaccatatctctcctttctggtagggactactaggcaggcactttccactttgtatgtattgtttgtggtgataggtaacacctaaccccaggtccacgtgttggcatctaaatcat

SEQ ID NO: 187685 - DNA, 3831 bp, Cannabis indica
gacataccatcaatccccggacttttgtcagatcccatagaatgaagagcaagttctacatcagcttgtgtaaatggtttgagtaaagactcattcatatcaacagtgaccgaaactggaatagtatccaaagtagcagccaaagcctcattattcgtgggagaatgctggaagatgtgggaaaaatattcttgaatgaccatgctcatatccaatttggaagtgactgttgtaccatcttcagttttgagagatgaaattttgttgtttgatttcctagccgaggccttggagtgaaagaattttgtatttttatctcccaattgcatccaatcaatctgagatcgttgttgccagtaaatcttctcttgttcgagcaaatcatcaagaatggattcattatgtttcaaggcagcagcagtatcattattcagagaaaaggaattattcaagttgtcaaccttcttttgggcagctgctatattatgtttcagacgaccatatttcttaatgtgccaactttgcagtgaggtagcacatgaatccagatttttaagcactcattggatgggatccaaaggctcatcagatagccaacaattagagatgatgactttactttcagggtccgaaagccatagtttttcaaaacgaaacctgctatgccgcttatggtgttgtgaagttaagcctgtaaaaaggtcagctgtgatggcacgatgatcagagttaaaatagtccaggtgagacactgtaggttggctgaaggatgaagtccaaacatcattgacaaaacaccaatctaaacgctcttttaaagagtttactgatgttctgtttttagcccaggtatacagtcgccatggaaagggggatctgtgagatgacagtgatcaagggcccttcgaaatgcagtcatttgtgattcacttcgcaaactgcccctaatttattttggttggataagatctcgttgaagtcgccaataattaaccaaggttgtgaaggagctatatccgcaagtctacaaagtaaagtccatgaatcgggtcgatgttgaacaaccggtgaaccataaaaagctgtgaaatggaaattttgcccaccagtatcagtcacaaaacaatcaaagaaacaggagccaaaagtgttgaggttaacttcaatgttgtctttccataaaagcatgagaccaccgcttaaaccaattcgaggtgcatccaagccattgttaaaatttaaaagttgtcgaatgcgaattaaagagttggtgttgagtcgagtctccataagaaagagaacatggggagattgctgagaaacaagcaatctaagatgtcttaacgctctcgggttccctaatccccgcacgttccaacttaagatttttataatcccttgtgggattacaaagcaatcttcgcagaatcgtcagagtcaccatctgaatccatggaagtggaggaaacattctagtgagagcagtcccctgttgacgaggaagggaaaaaggcagaactttgttggttgcggcatctcttaagtaattgtctcattgacggaccatccgaatgcttcttgaaaactctgttggggtgaagattttccttattagttttgggttaagggtaagaagtggaaagaagaggtggtggggtggtaaagagagaggacgagaagacagaggatgaaggtacggaaggtttggtattagcatttgaagacagtgtatttggggggtaaatagcaattggaatgtgaggagaagaggccaagctgatgtcagaggtatatatatgttggagatttatgctttgtgaagggaagaagagtgtgttgttggtagcatcagaagtgagaggaagagtaggaaggggggacatgactagggagagacaaattggaagcaccagtggtgtgggagggtgggtgtataatggttggggcagagatttgtgttactagcagacttgggagaaggttagaagggttggtaaaattcataggcgttgaagaaggaactgaagatgattcaccatggtaaagagtctttggttggggcagagatctcacaccaagattgggtacagtggaaaccagagatttacgagccaaaacgagtcaatagtggccatgcattccctttagaaaaatctgaacgatacttgtcatagccattggttggtaacttggctcccttcaaccacgggccatattcgaagtcttcatcattgccattgtccaccctttccatgaaagccacacatttttcaaaggggtgtccaagtcttccacattcaaaacaaactcaggcagtctttcataacgaaagtcaatccaaaaatcatctttgatcctaggcagactgatcatgtgtcctcgaaggagtggtttgttcacaagtaatcttactctaatcctcaagaaaggaccccaaccctcatcaagagattcctcatggacgtcaataaactccccaatgatatttcccaaggcagtggcaaacaatttagacttactaaggaaagggaggcggtagatttggacccaaaaatgagtgcttgataaattattcactgtgacattttgtagagcacttggggagcagaagacaattaggtgattttggaaatgccaaggctctttatgcagaacccgcaattcgtcgcctgcgcaaccaaatgtaactttgaacataccatctccatattcagaaacaattgcaggaaacctacccttccaatgaccacccatttggtcgatgaagataggagggtggacataattattagtgagtatttgtgcaataagaatgtggccagaattgtttgaaggagcaggggtaacatcaacaggcagagcaacaaccgaactttcttcattagttaaatttaaagttgaatccagagactgcagaaggggatccataacaggttggtgaataaaagtgcagagaaaatcgagcaaaagaccagcagttaggttatcatcgagagaagggatgatgaagaaaactgaatgcagataaagcgggggaagggagaattttgaaaaaataattaaaaagcaaaaaaaagtagttcaaattctataactgcaacagacccaaacagggcaccatttttttcttttaaaattctatattaaaagactttacttaataattctttttctttattttaagatgaacatttttttttttgttgtctattttttaaaattttacaaaacgtatatattgttcctttgaattttctagaaacaaataataaatgttaaagtcatatattgttatgacttatcataaattatttcttcatattaaggataactattatatgagtgtatatattaagattaacgtatttttattattaataacaatgtacatatttatataaaaacaaatattttttacctaacacacagtttacttttataaaacaaaaaccttaaataaaactaacatttacgtggttcggtacgtaacttttacctagtataaatataaatatgatatatatgtatatgcacaaattataaaatactgtgtgttttttttaaacagaacatttaagacattactacaatagagtaaacattttattagttagcaaacaacatattatatgcattaaaagatacatttttataaaaaatggtagaatatagttcatccaaaaattaattatttacatgtattgaatatccataaaaataacttcacaaaatagttatattattttttattctcttaatcactttatattaaaaaaattcaattagatcataataataaattaaattatatataattatttgttatattat

SEQ ID NO: 187686 - DNA, 8093 bp, Cannabis indica
attttttcgttgagaggaaaaatctataactactaaactacgcttataactacatatttttattttattaatttgtttaattcaaatagagtttttcatgtttaattaacttagagaagtaaattttaagagatatatatttttatttttctaataattataaattggcatgcatttaaggtgaataataaattactttgaatgatttttttatattttttcataatatattactcttatattattttttaataaaatataagttcattgttaaaaaaattattaatctattgaattttgttcattgtgctccatttatattcccatttttattattatctctcagaaaacattaccaaaatatttgtaataaaaaaacagaaagaaaaaggaaaaaaaaaatactacccataaatatgaaaatcttacttttctcaaaataataataataataatttaaaatttaagcagaataaaataatatagaatggtcaggcgttggacaaccctaaacgacaccgtgttaactgtttggtgttgaatgttgtaacatgttttgctgtagacagaagaaatcgaggactttgtactacgaaaatcagtgccataaatgttacattcaattatcaattcagcgattcgtctccatctctcttctactgcgtttcggaaggacctccattaaagctttcgctgggtgtttctcatttcgcagtctgatttcgatatctgactcttcactgttccatttcttgtaagatttgatctcctttatctgtcggtgatgtataatttcttgtaagatattcatttttaagctgcattttgtgttctttagtaggtcggaatcggatcatatttggatacccatatcttagatttgacctcctttatctgtcggtatgaatatacgtaattaagattctgcaagttagttttgtaattaagaggtaaaagacgactgtagttgtaaatttcccttaatataacacacacgaacatgagaaatgtcaccaaatatatcacttattcaccgaattctggtgggtcgtagatcgcatcttcaatcttcatattccgatttccattctctctctactctcacactctctcaaatattgcgatttcactcaagaggtcgccgccgacgccgagttccgccgagttcagattatacccaaatttcctttccttgctctttctgtgcttttttcgttttttattcacggatttgtgctactgaaatgtggtctgggaaaaggatgaggtcaatctcttattctcgtctaaacaataagcacttttttttttccttcttctcattgtttctatctccttagagtcttcttccaattattttgaatttgatttatgagtttcagtttcaatttagtctagttaagttatttttagttttgttggtaaaattagggctttttttggcatcaagtctgaaatctaagtttttaatctccgttctttatgtttgtgtagtttatattttgattttttgtatttctagttagatttcaatattttactatatgagtacttatagcaaaaacataaaacatataagtttatgtatgacaccaccgacaccaccatttgatttactttccctgagttataatgtattgcttgtaggttagattacatgaaacttcagttcatttgtgtgaattttcagatggtattaatattaattttaatccacttcagtgtttcagttttgtagaattatatggaggagcagtcggccacttggttagctctagctgaagtgttgtagttgggtgagtgaatgagtaatttagggttcaattccccataaatgtatctattaaaaagaaattaatttttcatgataatcctttttatgtttgcagaaattaattactagttgctggtagcatttctgcacatatgtaactaatcctttttatgtttgcagaaatctgtcggatcatattggatacccatatcatagattttgggacgaagttttctttctacttttatattttcacctatctagaatggctgaaagctcttgatttgatttgtgttgtgagattttgaggtgagaattaatttagatttagggaaaatgtcttcgattcgattcgattcctcaaagcaatactacgccactagcagtcttgtgatagggtatgctctctgttcgagcttgcttgcagtcataaacaagttcgccattactaaattcaactttcctggccttttgactgctctgcagtacctaacttctgctttgggagtttgggttttggggaagctaggatttttgcaccatgatgcctttacatgggagactgccaagaagttcttaccagctgccaccgttttctaccttgcaatcttcaccaacacaaaccttcttcgacatgccaatgtggatacgtttatagtgttcagatccttgacaccccttttggttgcaattgctgacaccacattcaggaaacaaccatgcccttccaagcttacttttgtatcattgttggtcattttgggtggagctattgggtatgttgctactgattcaggttttactttgactgcttattcgtgggcatttgcttacctggtgaccatcactactgaaatggtttatatcaagcacatggttaccaatcttgggctgaacacttggggtttcgtgttgtacaacaatctgttgtcattgatgatggctcctctgttttggattattactggagagtatgttgaggtgtttgcagctgtggaatccagtactgggaattggtttaaatccagtgcttttattgcagtgtcgttgtcttgtgtctttggtttgctcatcagcttctttggatttgctgctaggaaggctgtctctgccacagcattcacagttacgggagtggttaacaagtttcttacagttgccatcaatgtcacgatttgggataagcatgccagtccctttggtttgctctgcctcctctttacaattataggaggaattctttatcagcaatcagttactggagttggcagtgcttcttcacagcgtgaatcaactgcattgaagcagattgatagtgaggatgatgatcatgattatgaggatgatattcaaggaaagggcgtgcctggtaaacttgcttctgtatgattaactttatccttttgtctttgctgtttagcctcaggagaagaggccttaataggatataggagttagaaattttatcatctatggttttatctggaaaagagacagcttagtgttaattagtttcaaaaaaaataatataattttgtatgagatcttacagatcatacctatgtatggattctaggagcactttatatgctaccactttggctaccccaccaaaaaaaaaaaaaaaaaaaacagagagattgaaactgaaacttagagaagagcatctctgctgctttaccatgactcctgcgaagtaatagttagttgtgtatctgtcttccgcttaggcaagctaggtctttacttggaacgaagaagtatgtagacatcagctatttgtactttctcaatttaatctagcttgttatttgtgttttttgtttcttttactgcttgtcttcttaccttgaaataaaatgggatacatttcctatgttttgatgattctatatgacactacacatacgtaggttagctgaatttatgtagaagaacgagattattttcatccttctgcttccaatatcaaggatgctgggtgtaagaaaacttttaaaattaaagcttcgaaattttgtttttgacatttgaaaacacttgtggaaaacatgatttggtagtcccagttacccgagagggatagtttgaaatgtagaaacactcggagctgcttaacaacatttgatttcactggttacatgtaatcttttccatgaaacaatggacatccaagacacagtagttgtccttgtccaggataaatattggtaggtgggggtacttatctatgatttattattactgtatagagatgtgaaaagtgaaattccttcaattaatccagcatatgactataagcagactgtcatggcatttttctcagggagtttgtggacaacttgtgatgcagataccagtcctctgcacttggtttactctttcttgacattagcatgtttttcgtaccaagatcaagtgcacccaaatgtattcaagcaagcaggcactttgtcaccccatcccctatgtcttccttgatatttttttcttataagttggtagttgtgcttagatcagtgtcaactctcctgaattaatgagatgagactttggcatcgtagcatatcattgatcagtgtctctaattatgtttaattttaaattatatattttttttctaaatatcgaaacagatataaaatttatcaaaacatctctttaaaatggtgggtgtattacatattttctcaaaaaaatttacttttttttttcttcctaaagtcaaacatgtattactataaatacaaaatctaataatcacaaaactgtgagggcctcagagggacaggaattatccattatggacttgtcaagtaaaactgtgagggcctcaaaggttcagacattatctattatccaaccatggtaataggtattgctttcgcaccatagatcatgctattattcaaccatgggattgaaataattcgggggttaatgtaagcactccttgttgatctattgttcctttcctgtttactagtcaacgcccaaaaactttgatcctcttgaatacctatcacatcattcttgaccatacttcttattcatagaaattagcaaacaatataatgggtttcgcttcctgtcctctacataattttagcttagtgccattctctaaaattagtttcattttcgtccatgttaattttaagcaattttagtagctgaatggtgaaagtgagaattgataagtttaaggtacaaaattagaattttcaataatttggggagagcatcaaagtaagatctgttgttagtcctaattattattgttcacctaagttagatgtattttgtaggattgattttggaacttgtaatttttattaagagagttgattgaagtttcatgacggtctttcccaatcgtgccattttttcacctttttcattatgggttgagcctgaggtaggtgtgcaattgttggctgttgtcatttgaagcctacatgcttaaaaatttcccaattttacttcacatacgtgtgtaaagcactaatcttggattgcaagcccaattaattactaagttgaatttaatttgagttaaagctcctataatgcgtatattaaatcaaccacttcacttgtttttgtctcaaccaaaatagtttaattcattaaaacaacaacaatccaaaccaaatcagccaaaaaatgacctaaaaaatagcctccactttagtgactcatttgtttctcatgaaggtaagcatcgtgaattatactttctaaataacttattatttaactccgtgtttttatttattaggtttatgttaatgccatgattgtgcattaaattttggtttggtttatttttaattttcccagtttattcttcattcgtattggtcctttaatttcctcaatttttctttgtaagacattattctttaacattattttgtcttctggtttcttatgtgttattttattttaatttgtaatctgatttttaatctcataatccgcaacatcagtctcattaatgaaatggattataatattcagccactaaataaatgccacgtggaaggagtagtgaaacatagtttatacgtagaagtcaaattaaacttgctaattgcataaagtcataaacataatttagttatgatctatttatctttcgtgtgcactaaatagtgtagctaaagatgtgtttcttctactctcaaattattatttttggtagataagttgactaaactcagcaatgaatggcatggttcacccttcaccaattggatcaacctaaataaaataaaagaagagcatggaaatcttgtgaagaaaacatccaaaaaagcttaaagcacaaatctgaaaagcaaggaatctcatgggaaatctcaatctttaccaacaaaaacaaactcagcttactttaaacatatatattaaaacagtttcaagtcgagacaaatcaaaactataaaaataaaagtttttgttcataatcgaaaaatatatgtttagacaattaaaattcgattcaacactacatggactcaaaagttaagagagaaaaaagaagtaaaagagagtcaactgatttctctccacaaattgcaccgcccatttcgccaagcatgacgattgaacataaaagattctttattggagcgttttgtcttctaattgtgtatcattaacttcaacttagcatgccttaatattataatccccattatttttaatttattaagaaaaactcaatcattacactatgaataataaaaaatacaagataaacttgcaccaaaagaaaaccaaacaaaacaacttatatatatacacacactaaacccaaattacgaaatgaaaaaccaaatactctctcctaaccccaaaaccccccaatgggaaacttcaaaaccccatcaacaaacgacatcggattttgccttctcccctcagaactcatagagagaattctcatcggttttgccataccggagatcatccgttttaaattggtgaccaaaaacatagccgcgatcatctctaatcacgatttcgttcgccagttcaattcgcgttggggttcatccacgtggctctttctcttcaagaaacgacgccgttgcgattccgtgctcgacggctttgccgatcaagccgaccgctggttccggttctccatctccgacgtgttgaagccagcgatttttcccggggaggatctctttttcttgacggcaagtggaaatctgttcctctttgcctccaacactcttcagtctgttattaccgttaatttagttacgaataccgttaagaagatacctccaagtcctttaggccgacgtggcacctgttcctggcggagatccgccatgaaactggttcccggtccaatcgggtcggatcatttccggttctttttcgcggaattggtcgaacaacgagtgatcgtctttgtgtacgaatcagagattgacaagtggcggtcaatggaggcacaacaggatgtcggtattatgccacgtgttgatgaaagagaaggtaattttatttttctaactctaattaaccgtgcaagtgagagcataataattgcgatcaaactcgacacaaacacgccaataatcctacggccgagattcgatggcaggcggaacgagaacagacaattgacggttggattcagctggggaaaccgtatcgatcggctacacgtgtacggcgatgggttgatgatgatcgtgaaatccgacggagcaaactcgggaagtggagttaggatgttgagtggggtagagatgtgggggctgggattagaggggaatgagtgggagtttatatcggagttaccgtgcactgtgatgcagaagattacaaagccttacggggttatgacagggtgtttggagggtaaaaatggtataataaagggtgttttgatgtctaactgcgagggattgtgggacataatttggatatgttacgacattaggagtaaagagtggaagtgggtcccacttcctgattgcaaaatgaagggactcaatatggctggaattgccttctcttcaggcctcacactttcataaaccactcttcacaacatttgagtgaaatgtgtgatatgtatataaagatgcaactcacctttttttcttcttttccaccattctacaaatacttgtattttgaattaatattagctaatgtacaatcttagttaagttaacgatgaacgcgaatatatatatatatttaaggaagaaataagagaactcttaattagtttttctaaactatttttcaaaatataccactatactttttacttttttttttt

SEQ ID NO: 187687 - DNA, 5939 bp, Cannabis indica
agtcttatacaactatagactatcttgttctttattcatttggtataccttatgatttgatgctggtttttttaactgtgagttacagattccggaagaagagaaaaacctgggtgcccatgatcgcttgattcatgtttaccacttcacaaaggacactgctcaaaaccagatggtactgaattttaagagctcagtcccataaatatatgtatatatatatgtattctttttaatcgtttgcttaaattagtgattagataagtagtgaaggatattcttaacaagtaagattttgttatgttctttatttgtacattttttttccatttaaacagcaagtccaaaattttggtgaacccttcttcttggtcattcgtgaaggtgagactttagctgaagtcaaggtgcgtattcaaaagaagttgcaggttccagatgatgagttttctaaggtatgttctgtgctgtttcttcagcaatagacatttatttgttgtcaaattttatcagctgctccttttttttttttttttttcttctttatcatcttgtttttcttttatgcagtggaagtttgctttcttatcccttggccgtccagagtacctgcaggattctgatgtagtttcaagtcgttttcaggtttgtctatagttatgcatacctcaactgtaatatgcacaatttattttactggatatttcagtttgaactctttttttttttttgtttgctctcttcagagaagagatgtatacggtgcttgggaacagtaccttgggttggagcactctgataatgctcctaagagggcttatgcagtaaatcaggtaatactaactcaatgctatataagcacaataaaggggtgaagtatcaaacagatacttattcattcttaatgctctgttatacatgagtgattctcattaatgattttcatccaaaattatgcagaaccgacatgcatacgagaagccagttaaaatttacaactaaagcttttagcagctgctgatccctgcttagctcttgagagtgtatcaagcattcagttgtcaagtcgcggccacaacatttgtgttagggatggaaatggcaagagtgggatcaaaaagagccatttcagaaaaaaaaaatagaaagaaaacacagccaaagaatgacgaccatgatgctctcacttttaggggatttggttaggcactcaaattgttggtttttaggtttctattttcatatatatttctctctttttttttattattgctttgatgcttgtggggggaaagggaatgagatcatcatctcctgaatgtgtagcctatctatttattgttattccctgcttgagttctgggtctgttcttttcctccttttctttttgggtttattttcattttattacttttcttccataggaagacacctccttgcttcaaggggttggtggctttctatatatacagctccattgtaatctagcacagtacataaggagattttgaggggatgtatatccgggtatagtcggccgctttttagtattttttttttagctcctttgtatttctttttcacttttcttttgttggtgttccctttcaagtcgtaacttgtcaaaaatggagggaaaaagaaatctcatcatcagaagtggatcagtgtaaaatggtcgattaaattggcatctgcccctaggattctgtagaaattattatttactatattgcaatttgaattgtttatacatcattttgcagaaaaaaaaatgatggtgctctttttttttttgaagattgcttattttcttgcggttaataaattattgatgtgctaattggacaaattcttgtggaaaaaatggcttaaaacttttctgaatgggaaagaaaattaggtttacgagtccgttaaataatttttgtgtttggtatgtttagtttatttacaattgattgactagatattgaggctcaaattgaacagtaatgcaaattataaaaaataaaatatatgtatttatgaaaattttacataattgataacttattcataaatatagaaacaaatcttacaaatctattcataacagattttattctctcaaaaatgtcttacaaataatgtcaattgtggacaatttttggccatgctgacgtgttagaattcttccaatgtaaacttcttttttttaccaaaaggctccttttaatataaagtttttcgcaaataacttacattctttctacctaaagaaatgcatatatagcagtgtaacgatgaattaggaaaattcgtatgtaaattcttagactattgtattgcaattatatatataaattatagccgcataagtaaattgtttataaaaaatgagcaaaatatagcaaaagtgggatatttgcaataatttgtatagtttgagaggtagttgtctagtgacataattttattttgtttcgttcctggttcttcgatggctcactatcaaattgttgatagtaattaagaataacaagttctctgtgactaaaggtattgttagtagtgccgttacataccttacataatagttaagtgctcaatttctctcttttatatgtacctctctctttacctctcaatctctttctctctcaaactcaaagtctcctcttgaaactcgtcaattcagcgtgcttgaaatgataagtgttgatagtatttataagctcgtgatgaagatcctaagtcgatgactgcaagtaattgttaagttagttacgacttaataaactatttgtaataaaatctccacatcagcacaagacaaggtgctttcggatgaaacatatgcttcctagacaacaggctgaagcgtatgctgaaagagcttccagataggaaaatagccaactggagtcaactatacagaacaccctttcatgtggaacaactagccatctagaactcccttccggaggagaactagctttcttgaagacaacacccaaagtgaatgatatcattcgggaaggaccttccaaatgacgactatcattccacgagacttctttcgaatggacaagttagttatccgagaatatacttccaggagacaactaactttccattagttggacagtcttataaacatctttttatttggagaaattataccacatcttcttataaacaaaaattctcctttctaaggcaaatttaaatttaagagctaatattgaactaatattaaaacattatggctatttaatgcggtttgaacattattgctaatcccactccttactcccaaattataatacccaaataattgattcctagtagcctatttcttaataaatttgtgcaagtaaacttgggtaaacaatcaattccttaatcccatatgtaatcacattcacaccaatatttgccgagttaagacttgctagcaaatgccttaaactaatgcattactagaaagaaaacaaaaaagtgtcaaccacatacattattttttacattcttgaaattacacatttaaaataatagaactcgacacatctgcataatattttcagctagcatacatatgagttcccacatctataaaactcggtaggaaatcaaaccatttatagtttcgacaacaagccgatccatacgtacaagcagtagcaggtaagacctcgcctttggccctgtaccagcaaaattgcatatctcatgagtgtaatcttaatgaaactaacgttgttgaatatggtttattttgccggggattcatcaattcactgttaatttgtaatttttatagaactactaccatgagatcggaagaattactcacccaaccccagtgatgaaatttcatcttggccaaagaaattacttccatttgttctctgattcaagcttgaattgatcttgtctacggcagtgaccaaatccttaaaaatcagaatgcaagatataatattttagacaatatgcattacaaaattgtcctgatcattagaaactagatattaagtaaaatgcaatcatcattatataatcagaactgtcatattttctctagaaatcgaatacatcaatctgatgcataatatgaatgatgaaacgattgtaaacccgtcatttaagaaggattagcgaaaacatgtactcctattaccaccgatcaacttgagatattgccagaactcagaatgttccaactttcttgtccatgaacttcttatattaaatcggtacaatgaaaaaatctcattgtagattctcttgctattttcattcactactatctagttataagttttcataatttggcaatatattctaaggattaaagaaaattctcaaaacaaagatcagataattcattacttgctttacaatcataggttaaaccacaggacaacaaggagaacttcatacctcccatgacgctagacctttcatataggaaggaagattctcgtaatcgtccttcactaattttattgatgaaagagcttggacaggctttagagcatcgtcatttccctctaaattcatgagagaaagaaggggcaggaaatgttaatagattaataggaatgaacttggcacaaaatgtagtgataatgataaagatataatatgtaccatcatctaagtacattttcattttggattttcccaatgttgaataatctggctccttcaagtcatgtgacctgtgtctgtatattgcaaaagagtacatttataacctttgaagaccagaagtaatcacagataagatgatggataatgattaaaagaaaaaaagctcctttccaagacaatgaacttctaagattttgtaaactaaccttgtgggttcttgcatatacacatctagatcatcaatcttattatttgctgcatcatatatcgaataggagaaaggtaaatataatcattatcaccctaaaaatgaaaggcgacttttcaaacaaaaaataaagcaacttaccttcggatgctaaagaagcaagacaaacattggaaagaccaatattcttcaaactcaacgactcatcgaatctattgagcaagcaattaagaaagacaagagagaaaaacacattttgcctaacaaactgaattgaatcccaaacaaacttttagctgtacataacatgagacacagtatctcggatatactaaattttgttatacaaggatacaaatcttcgtcgtccaaaaaaacatttccacggttcgaactcattatattcgagtgtgtatcaagcgcagttgatgaatccgtgtttaaaacctcatcttcatcatcaatctccaattctaaaatcagaattcagaaccagtattaatcaatttaataatttgaagatttaatcaaacaaatacagaatgaaaaacgcacattaaaaaaaattgaaaaataaaaaggggaaggggataattaccggggacgtatcccaagggcttgagacaatcttggagttcaagaatatggatttgattattcttgtaaacctcattacagtgacctaatagttcctcaaacgatacagttgacagggacatggattccagcagattaagttggccaccggcggtggaaaccctccgattgaggcattgtataaaggttgaagatgcggaatcttaaataaagatgtaaataagtagaagaaatcatgtttggtaggtgagaaagtaaagtaaagtgaaaatgaaaatggtgagattattaaaatacggtacctaccgagagggatggcgcgacggttaatggattgcttgagggcattgcagctgctttccagatggttactgaatgaacctaaacttctgcacaacctctctattgattcctccatttttctctctctctaagaaatgagcgcgggaaatccctttctccaacttattcaaagagaaaaatctttctatt

SEQ ID NO: 187688 - DNA, 1438 bp, Cannabis indica
tggaatgtacttgtgtatataaaatatagttggaacctgtttcttgataaagggtggcaaaaactcgaacaaagctgcagcccaaggtgaaagtttagtatgaatggtatcaacagaaacaccctccttgagtaaaccatgaatttcctgagaggaacaaaagaaacaatgttaacacaaataacacatgattccgatatggggtaggaacaaaacaaaagcataaacaatcacagaacagaatgctcaagaagaaaaaactccgcaaatatccataaacaagtcaactgcatcaaataccttcaaaagggcatagacttcgggaatgctttctatgagtccttctggaagtaggataacaccatggtacttgtctgtccaaaatattagattgagtaaccaataaagacaagaaactacaaaatgcactaaaataactatgaagtgggggtgtgtgtgtgtgtctatatatataaccactaaaacaaaataaaaccttggtctgcacgggcttgaacggcatcacaaatttgctttgttatgtcaaaaattgtcagttttgatgcagccacctcctcaccaagaataacctgttaagaccgtaaaagtcgatatcagagaaggaaaagatgaaaaaaaataaagtgtcatctaaaagcaacattaagatgacttaataacagataagtgctgaccatatttggatgagactggagtgtgcactctagggcaacatgtgaatgctttcggcccatgagtcgaacaaaatagtaatactgcaaatagtcaagggaaatgattatcatttaagaactttttcatcaacaaaagaatagaagggttgcaatgcagaagaatgaagaagattcaaaaactcaaataatgtaagaaaacactaccttctctgcagatagagcatcggtgcagacattgcttataagttgggaattgacctgattaaaagaatacattttagtattcacaaatcaccactgctttctactttagcattcatacacaatcactactttaaaaattacaaataatataaacaaataaaaccaaagcctagcataaagagtctttcctcagaaagaaaaaaagaagatagaggaggactttaaggcaggaagagagaataaaaccattttagcgaaatataatcgcactttttgacattgtatggttctatgttcgtgaattatatttgtgcagtaataaagaaagatggtgcatgtgcactccaatggaatgcacaagcttcttatcgaaagacaaaaattacacaggttaaatagtattagtaccttgcaaattgtatcgtaaccaacattagtttccacaaactggttcttaagatctccattcaatgtcactggaactccaaccacctacatattaaacaacagaatcgacatacacacataaatcaagctaa

SEQ ID NO: 187689 - DNA, 1465 bp, Cannabis indica
cttttaaaaaaaatacattatagaattttttataatgtttaccttatttttctttatgtttgttctcgttatcattgtggcaattgacatttgatgatgtgagtttacgttaatattggaccataatataaatatattgtatttaatataagaggaatactaggggtctttcaatatcaaatcacacatatttaatcactaattaggactccaccttatagtagtgttaggtatattaatgcctataacaatacttaggaatgttaattaggtcagggccgccctgacctactattgacccagcctggcccgatatcactttggcatgacccaacccgacccgacttttcaatttaattgggtttgagtttttgattggggctgtaatttaggttgggtttggagtgttgggagaatggtttctggtaatgtggggttttaattcaaggttgggttttggttcagtgtgggatcatgttggggttgtgattcgggttgggtttggggtgttggaagaatggtttttggttggagttctggttcaatatgggattctactttcgtgtgtggttgtgatatattgggcactaaatctcaacatcctcctcttcctaaatcttttggctcttgaagattcttcaacttcattataaccaatgatctctacttctaggaacttgttgaaccagcatgatcctataaaataagaaaccaaagtcaaaatctaacaataacacaactttaaatagcaagaaacataactgaaatcaaatctctagaataacaaaactttaaacagaaagcaaataaaaaattagaaacatgcacaatattaatttctaacctaggctactgggggggctttgtggggggatttactgcaatggcattgggtatgttggaatgcctccatcatcatccaaatgccctaaagtgtcctcaacacagtccatgatttcagaaatattctgatcatcacgtggatttccatcatcattaacttctccatctctttcatctccatcatcatcatcatcatcatcatcatcatcatcatcatcatcatcatcatctccatctccatcatcatctccatcatcatcattagcatcatcatcatctttctcagattgtgatgatgaggaggatgaaataatcacggtctcaggaacagtattacttggttgggggctgtactcacgagaatgtacatcttcattaatctaatgtgctactaaatcaccccgttgtaaaagcttgttgaagaattcatcattacaatcatgaggcccttttagattgacaacaacatccgctactaaatcactgtcagatggcaacttctccaaaatgcacttgtccaatttatcaggttggggttgggggacatgcgttactacctcctcatccactctccattcaactacaaaaacttaatctaacaataccaaatatatgttggcct

SEQ ID NO: 187690 - DNA, 2996 bp, Cannabis indica
tttctttgctgatagattaatatgaatgtggtcttatttgaggttaaatgattttacattctggcatttcgtttccaatccaaagactaaaagaactgaatcatatttggagatgaaggatagttgagcagaaaactttggaattagaaagcaagtaatcaataacgagtttcaaattcccaagaattaatcatttcaatattatcattggattataataaatttttatgctggctctgcctctcataatttctgttgcatcattatcactgatacattctacaaaatgaaggtgatagctctgtggatattaactttgaatggccctatagtttcttacagtgattctcgttctgcacattttgcatttccagatgtggagtttctttgtttgaaattcaaatcaagaggtcggtttcacagttatttgtaacgttgtttcatcaggttttctcagttctttgtttcacctttagtgaaaatggaagcaatggaacgagaagtgcaggctgtagattctggtacttgctaatcttatcctagtgtacttcctcatttttatttcctaaaaaaataggagtcaagcataacagcaaaaatgcgatgtatttctgctgctgaataaatgccacattgttaaacaaaatggaacagagtttaaccaggttttacaaaatgatgcttgccgccttcaacaacttcagtgccatacatcaaccagtggtcatccttttaacagatttttttggggtatgtttaaatctgtatgttttgttttattcttaaaaggatatgtgtttgtctaaagatactcttatttttattgttaggtaataagaagagccttgtcgatgccatggagaagggagttgacttgcggacccacatattgcagctgtacaatgattattaccatggtggattgatgaagctagttgtcattggtggaggtgcagtactaattccctatatatttgtggtgcacttgtcattttcttcatgctatttaggttacatggtttcttgtaattattgatcatggtctgagagtgttgtaatcttgtgatggaataaatgttgtttatgagttgtctgcattaggatgtttgaactgttcataatagttgtcaaaattccaaccttccaaggagttggaatttttctttttggtaatatagttttcagtttcagttctgcaaatgtagtattcaaagttctatcctccacgcatgcatttcagtctcttacgaaacaacaattcttcttctgtacagggaatgattctttgtattgttggtttaacgattgttgatgtttacacttgttaagttatacaatcctttgtttttatgttttgtatgcatttattacgaaccgaaaattttcagctgatgttgatatattatataatatctgcagaatctcttgatgtccttgaggaatgggtgctggagctatttggtaatgttaaaaaaggtcaccctgtaaatttggagttcaaagtggaagttcccttctggaaatcaggaaaactatatcggctagaagctgttaaagatgttcatatcctggacttaacatggacgttgccatgtcttcataaagagtatatgaagaaaccccaagattatatagctcatgtcctcgggcatggtaagagagtccattttgatacatagctattgacataattattttattggatatgtagttgccatattcttgatacctttcagtggttctctaaatctaatgttattattctgtttttgactatagtggacgtttgtcttgtgtttttctgacctttctctagtattttaaaagtttcattataattctatatgggaaaaattttgggctgatgcatgttataaattcgaaatcatttagttttctttttaactcaatttttttttaacagtattggaggttattgtaattgagttggtgttcggctttactttatcttctttttttttcgtttgttttgtttgcttcattttgagggttatgctcttacactatttttcttttttaatttttatctatatgaatatagtagttctgtttcttataaatattataaatacatatatttgcagtaaattcattcattaagttcaaagaaaaagtttttgatttttatttttatcaaatttttcttttgttcaaattctaaataatttaaaataagaaagaaactatgaattttatttatccaacctatttctatgtcctttttctttttgaaatttcattttggattgaacaatttttcatatatatatatatatatatttatataccttttggctattcaagatttgtacataagccaatccatagctctattcatcgttgccgctggttcttgagttgcaaactttttagtgccctcgtacttttctggtcctaatgaatgaaagcattccatgcaaaaggcaactttgctatcaagagatggtcatgatactgccatttgaagaaggaattaaattaaattaaattattttatctttattttctttttccaagtagtttacattgatgagtaaacccatttattgctatttagcctttcattgtccatggtgtttgtttgactattgattctgaattcttaagtcatggggtttcagagggtcgaggaagtttgcttttctttcttaaagctaaaggatgggcaacatctctatctgctggtgttggggatgaaggcatgcaccattcgtcaatagcttatatttttgggatgtcaattcacctcactgactctggcttggagaaggtattttctttgattacttatggagttgatttggaatttatactcagtaatatgcttattttaaagaaaatctcacttttttttttctttgctttctagaggaatttggataaaaattattgcatcttgcatttcatttttttcacttggaaacacgtcattaaggaactttttttttaaaaaaaaaaaactttaatgtgctata

SEQ ID NO: 187691 - DNA, 2887 bp, Cannabis indica
gtgaaaaaatgatgagatttgatagagtgaataatattaataataatgctttgttttgtgaaactatatataagaaatgttcacctgcatgtttaggtagtttagaggtctcttctttttatagactaatgttttttgtgtgtgtgaagaaggagtcaagaaagaactaaaatggtcaaatggacagcactaaaagatctatctgtactatcaaataagccaaaagattcttgtctagtgttttgaggctctataagagaagaagacaaaaaggccaaaaaatgaagttgaatctaaggaagatgggggagacaacctagcaatgagtggagaggtgttggctatggattcttagtaacatgggaacttacacacacatatatatatatatatatatatatgtgtgtatatgtatgtgtaaggtgatcatgtggatggttcttctaagtgctaagaaaataggttttgatttagcataatctcttgaattgtgttttgcattcgtggcgttttgtttggccatacacttgtgcgtacatggctcaaccatctaatttggttggtccccatatcataagatcaaatattgaatttgtctaacataattactttgagaaatggacttaaataaggagtgttatattgtgttatgggaaataaattatgcactaaaatatttaataaaataacacacatttatttaagatggaagctattgttttgaaatatattattatgtcaattttgtgtaattttttagtgcatattttgtacactatggttatgtttgatgaatgaaattggaataaaaattagtgaaaggtacatattttatggatttttatataatatgtgcaaaaatatgtttttttttcttcaaaaaaaaaagttaatttattgaaaaaattgaaaaaatatataaaataaggcaattagttacctaattactctaaattacttctctcatattattttattttcgaaagaaatccatatttaagtattttgctaaaaaataccataaaaataaaaacttcttaaaaattatagattagaagaagaaagagttgggatggaaggtaatgatgataaaaattggataagataatattattccaaaattaaaggtaattatttcggtgtgataacattatctaaagataaactaactaaagattaaaaatgtgttaattattatgatctaaaatcacaatatttatgattggtttggtagtagtcactatggtcatagctaatgactagtgaagtgatcatataaaattttatgacaatctaagagaatttattttgatgaaaaatagtcatatggttcaaaaaggactcttacccttttaatatatatgatccaataattaagcttaatatgatgttaacaaattccactactccaaaaagcaagcttttttatttgtgagtttctcaagttgagtttactttagctatgtgtctcattaaagatcacataagagacaccgtactacttgactaggacactcatttttctagctacttatatcattaatattaacatacaaaaataatatatattcattattatcaacaaccaaaacaccaatatattaaattattgtccagcaagaaataatacaaaaacattgatccatatattcagcataaaagtttatcttcatcaggagaaaataaaataaaaaataaaaattaagagaaaattcaaatatagtatgtacaaaagaacaaactaaacttaaattttcagatttttttttaattaaaatattaaagaagggaaggttcatcctaatcttttagctaagaatattccaagttccaaagtctgatttataccctctcagtctgcatgtgatatatatgtaccttaattaaaatacttataatggatgtttgttttggcatatggggatggataatattttttttttcaatgagaggaaaatattatataagtaagttgtaatttatatatttatttatatgtatcattacatgtgagaactatacaatagcttatttttatctggtgtcacatggaaaatggcatctaataaattatgtaacactgtgttaactaacatgcatagtcatatatagtgtaatatttcatagtttaaattatcatgtcgatttagttttgaaggcaaacctatcactttcaatgttttaatgaaatgttttatggttttggtacaaattgcaatgataatgatatcaatggctgaaatgaatcacacaacacaattatataggaaaaaaatagatgagatcgatccacctctaaataaatgagaagagataacaaaagcctatcttcaaagaatgtttacggatgtaataaaatattaaatgataaatagtaacacgagtacctaaagttttaagtttgtaagtaacataatttaaaagtttatttttagtggtatacctaatgtttctaaaactgtaatttttctctaatttcgccagtacatactttgttattattttaaacatgacacatataagactcggaaacatgtaatatcagttattttcaaatattcttttaataaatttaaaacaaagtctgtactgactaaactgaaagaaattatagttttacaaatattaggtattatgctgttaaaaataaacattgagttaatatcacttataaacttaaaactttaaatacttataccgctatttgctcttgattaaaatataagtgttctatataaaaaggtaagatctaaatttaggactaaacttatttgattattatatgtgaaagttttcaaaaaaaaaaaaattgtcaaaatatgaaatgaaactatacccttaatgttgaaaaagaagaataacgaatttattgattaataatagaata

SEQ ID NO: 187692 - DNA, 2279 bp, Cannabis indica
aaaagataaccaatacaattaacaatctatgcctttattacctagtgctagtacctccagccttgtgctttgctttctcaataagtggtttcaactgcttcttctcagcaagaatcttgagaaagttgaacaaaaacggtatgtagttgtgtttccttcgaatattttcggttctccaattcttgaacttctcctcctccatcacaatcttgtcagtagcagcctcaatccctgaatttacttctgaaagagatttgttcagaagttcaaatttgctaacgtctatcggtctttccacccgtgctgcgttcaactgctgcaaaataccctccctcctcctctgcagctccttcagctcaatagtataagtctcttttctgttcttgataactgccattaaattgaatctaatctcactctgggagtatttctcaatgcgttcctggatcaccggttgcaacatctgcaaccaatccttgccacccgagcactgtccaagactaatgggtccctccttcaatccatcaagctcatacagcacgccatcgacaggcaaatagcttatgaaatggaacacatcatcgtctttttccgctgccttctgctcctcgggaatgaaaggctcaggtcgagcaaagctattatgcgccagacgtatggtttcactgttatttatggccaaacctttgagttcaggaggaaaagtctttgtgaaatcttttaatttcgatagttcggggccaatgtcaatatcagaacagttcaacagtatggacaatattgcctgggttgcacaagcattattgataacctaaaatgacaccatgaagacaagacaatgtagataaaacaaagcttagtacatacttcttcaatacagcaagccaattgtcgaggcaacttacctggcttgcgaaaaacaggttggggtttggatcttcaataacacgtcggtaatcatattcccctggacgccatttgaataagaaaatcaacccatatacaggcctgtaaatccacaagggcgaaaaacataggtggtactataaataacatatacttgaggcattgcttaccatgagagtatggacaactatatctgcttataatttaaaaaaaaattcaaagagctagaaaagcagctcaccacagatcttttagagaatcgaagtccaatgaatataactcctcaacctgcaaaaacatgccaagacatcatattctgccatgcaagtgtaacaacaatgagaaatccacataaacaacagcaacaacaacaagaactgaaccattttgttactcaggaggaaaaaagttctatagtaacctcatggctggaaattagaactgccgaaaatcatgaaatgtgctagcttaagaaacacttagtgtacattttagttgtcaacagaacttctaatttatagagccaactttcgttgatcaactgaagttggtaactacaaagttgctggatacattgattaaagaaagataataataaaagcacaatacatatcatgggacaaacatataaatataaatagaacatgagaaatatagagtaatatgcattacaacccttggaaaacattgcatacagtgaaagataaattaacatttatggaattgtaaatttctttggactctcacagtgtcaaacctaagcctacttgtggaaaaaaaaaaaaatgaatatttgctacagatagagaatataattaagatttcacaataggtaattaaataagtggagtgatgtgcattgcattaaacaagttttcattgaaaaataaaaactgaaaaggtttgaaaacatatgggttcaattaacattgaaataactgagaaagtacaattatgcaaagcatatattaaaattgatattgtcgatcagattgactgagggtaaatgaaagcttacctgtacacctttaacttgcatttgttgtataagttctgtgaacacccctgaaatgagataatatggtcaaaacttcttccatggtagtaaatattatattatatatgttgaagcacttgaaatatgttgtaacccaagtagaggatgtacatatgagaaggtctttgtgctaagaagaagaggtaaacaacataaagctaatctaaagaagacactttgggaagaaaaaagatgaatcccaatgaaatcagaaagcacaaacaaagcataaaagagaaagtgactaattggctaattctaattgaagtaaacatttaaggaatgaagattatggttctagaaaacccaataatct

SEQ ID NO: 187693 - DNA, 4180 bp, Cannabis indica
taaaaaaatggaaaaaaataaaaatttacacccctgtttggttggtgagaaaataggaaagaacatgaacagaggaattttaatttagtctcaacttggttgaacaaatttagatcaaaagtccatttggggtccattcagctggttgaatttaatatcctgatgctttaagcgcatagagagtgttattttagtttataattgttttttggttaagtgactctggtttattcattgcaggaaacatcatctgcccagtacatcttgcaacagtatactgcagcgtctggggggcagaagctccagaactcaattcgaaatgcttatgccatgggaaagctgaggatggtagcttctgaatttgaaactgctacaaaggttatgaagaacaagaatgcctccagatgtactgagtcgggtgggttcgtactctggcagatgaatccagatatgtggtatgtggagcttgcagttgggggtagcaaagttcatgctggctgcaatggcaagcttgtctggaggcacacaccgtggcttggtgcccacactgcaaaaggccctgttaggccattgcgtcgtgcacttcaggtgatcttttgtgtattcaatttattttgtctcttttctgttgttttgtaatttgtcatttttcttaaattttggctgttattcaatttcagggtcttgatccacgaacaacagccagtatgttttcgaatgcaaagtgcattggggagaagaagatcagtggtgaggattgctttatccttaagctctgtgctgatcctcaaactttgaaagcgagaagtgaaggccctgctgagatcataaggcatgtcttgtttggatactttagccagaagacgggccttcttgttcacattgaggattcccatttgactcgtatccaatccaatggtggcgatgcagtgtactgggagacaacgattaattctttccttgaggattacaggtcagttgaagggatcatgattgcccattcagggcgttctgtggtgaatcttttcaggtttggcgagatggcaatgagtcatactaaaacaaagatggaagaagcttggacaattgaagaggttgccttcaacgttccaggtctctctatggactgtttcattcctccagctgatttgagatcagggatgattggcgaaacctgtgagctccctcaggatgaaagaggaaaaggtgctatttcaatggcatcaagtcggtccaaagttgccgccttggaaaagacacgatgttaatgtggataatatgatttggaaaatggaaatttgacaaatggtaggatcctttggctagggcaattgtttatactggtagaaagttttagttcttacacttttaggagttatcaagtagggagtcttagtcagattttttttttctttcttgactttggttatgcctctattaatctgtaaatagagcataattgttcacaggttcctaaaaccaagcctggatgaatctttatactctcaaaatgcagaatccaacaagggcgttggagctcgactttccagttagggatagagcaaatggaggttacatttttagttttccttccatgaatgaagaaaatggtgaagctctggtatagcagcaaacctcttattaaccttgatatagttgtcactaatactcttgactgtattccagaagggcagtataaggaaattgccactggattgcctgagttttttctttctttttttttacttcagctaatgttttttcagttctactgttttgggttgtgttaatctaaggattgtttggttgatgtaaaactttctcctgggtctggaaatgactaaaagaggggtgttttttctagatctgcggaggtgaacagagtaggagagagcatacactctttacttttcttttacttgttttgtaaacaaacttatctggcaacatgggtctctcttgttgaatggtctggccatgtgtaccttcaaaatgtttaatgcttaagaatatgagatatgataaacagcttatctttcctcaatgttagtaaaattgtacagttttttgattaaatgtgttaaatttttttagatcttatctcattttttttctttattctctcctcatcttttattacaaaacatcattccatcatttattcgagttgtggggtcattaatatttatttataatatatgttcttgaatgttgtggttaatacatttccattctactctctgtattttttcttcttttcttatggtgctttacagcatctagtgttgggtgtttgaaagttcagtgacagtgtacagtggggttaccttttggggacctctttaatctttatttatatatttgttgccaaaggcccactaaaaccttcttgatggggtcactaaaactttattagggcatcactctttttcagtcataagtttgaccatttgttttggacagcaaataagattaaactaataatgtaaaatctatatgggagattaggtttggaattttcaatttgtttgcatcggtttgtggtgattatacttgtttgtagtgtgtaaaaatatatgattacagcaaagcatgataaggggtgaaaagtccagcttccaagtcacacaactctcccccacgtgacaccctcatcttccttttcattactactcacttaccttgctttgttcccgagtagtcaaagtccaaattcatgagagacctcttttaatgtttttatatttatttactttgtttttttatagttggccttataattggggagaggtctatatagtacatcatacatattattatatgtggcaatataaaattagaaatagtgatatgtagctccaaaaatgtgccaaatttatttcattaatgcttttttcctcttcattaatgcgttttatatcaattgaaagccatttaatttttatatattatttaataatttttttaattttaatttctccaatacatttattataaagtttttctttaaagtatgacttgccaatttgtatttcatttttagtataatcttaaatatttatttacaatttcaccatttacgaataggcgtttggtatgaggtttagtaagtatttaagtaagtttcactttttaaatggtattgtaaatcctctcaaacttgagttttatattctttttaagtctactccctccaactctactctttccaattcaaattcacataacaaatattcgattaagtggcgtttggttggattgaatcaaaacataattagaataaatacattccaatatttaaaaaaaaaactaaataaaagttatttcttttcaattctattatattatattatttctaatcaaacgttatctgaaagttttggtttattgttcttcacaggagagtaaaatttttttttaatataatctaaaatcgcgattgggttttggactggactaggttgcagggttctctctctagtccaaatgaagacgaaattgaagagaaaaaattgaaaaagagaaaggtgaggagagagattgggatgagttgaaatgaagaacaatacaagagaaagaagacataggagaaagaaacaagttgtaaaattagaaattaagtttctattttagtgaaaaataaaattgtgaaaggaaaaaacactataaaattaaagaaaagacttacaaaaacgtataatgtctaagagtagtaattctaatatataattaaaaaaataaataaataatttttgtctttttgagttattgggaatttatattgatatactaatctactgaatagataactcttatctctatatatttatgcctttgttcaagttgtgtgtgagtagtgagtacgtgtgcccttttctttttcggaccatttatttgtttaacgttataactcaagcctagtagtctcataaatacaaaatattttgttgtattgacaaaaataaaatatataaagccacattcatcacaatcacaaccaaatactctactcaccattttcgtttgaaagctccattatcgacaaaacaaaatcaaatgcatcatcgattaacatatttctggtgaacaaatcacctcattagttggttatataaatatatatatatatatactagtgaaaaaccagagaagaaaacaagatgaagaattgcagtataga

SEQ ID NO: 187694 - DNA, 1288 bp, Cannabis indica
agaagatgaagaagaagatcttagcgcgattcgtccttttgctgctgcaatgtataagatgaatggcgagctttggatgaatccagaggctgcagatcaagcaaagattgggtcttatcttgatgctgccacttcttggttgaagcttctaagtttccagcatcacgacttcaatttcttcatgtctcgtagatgtttctgatcatcatcatcaccatttttcactccagtttttatgaggaaaaaacaacgggaaaaagacttagttttgattagatagactagttagttctaactagaaccgactgtactacatgacactacagtttatgatcaatcaaaactgcagctggttataacaaaaacaaattgcattcgtcttcgtcatataaaataataacacaattttctccaataaaatattaacatctcttttggagtaaaatttataaaagtaagggtaaggaaaaaattgtaaacaaaaatgagatttgtttttttctttatttttagtgaaaatagttggaacctttcaacaaatttaacaatcactaaagattttggaacctttcaaaaataataataataataataaattaggataatatttacaatatatctggttggccttaaagtaaatcattgcacctgctgtctaaccaatttaccaatttgggaacaattccagaacccactatagtgtgcatataaagtactcattttttttttgttgggttagttgagattctcacaattagtttttaggggtttctaactttctatcctaatatttcttctgcaagttaaagagaaagattgagagtgaagattctgactgacgatgaaacctctaaggttgatcagaagagtttctggtaatcactctcaccccttcatttctctgttagggcttctcagacctcaaattcgttgttatgattccaactacaaaagtgttaatcaactggaaaaatcgattcaaactcgctgcagatctggaagccttgatgttgataaacttttatgtctctttgattccatgattcaaatgcaacccattccctctgttactgcattcaatcatttacttgccgcactctctagaaaaaaccaacactccactgttttttctctctacaaacacttatccatgcgttatcgccattttcaaccagatgttcataccttaaccattgttatcaaatgtctatgtcgtttgaagaagatgggtttaggtttctctgttttggcaagtatttataaatatggccttcgcccagatggccat

SEQ ID NO: 187695 - DNA, 2596 bp, Cannabis indica
taccaaacatgctcttagttactcaggcggttcttcatgttctgaatgaagggggcagccctgaagctctcaacaaaactctaattacactcattcccaagactaagaaatcgaagacaatgaaagattttcgcccaattagtttgtgtaatgtagtctacaaactaatctccaagtctttggtcattcctctcaaaaaaattctcccccatgtcatctcagatacacagagtgctttcttaccaaataggctcattacggataatattttggtagcttttgagttggtccattgcttgaagcataaaacaagaggcaaaaaaggtttttctactctaaaactcgatatgagtaaggcatttgacaaagtggagtggtcttttatagttgctgtaatgggtaagatggggttcaatattcgttggatcaatcttatcttgaattgtttgcaaactactcaactctcttttgttataaatggtgcaatttcgggcaatgtgaaacctcaacgaggcctaagacaaggagatccatctccttatttgttcttgattttttctgaaggattgtctcgcttttacaatatgaagagtccattggctgtttaaaaggattagccatatctcgacactctccatccatctctcacttactctttgcaaatgatagtctgttgttttgtgtggcagatgatagatcttgcggtgctataaaaagagctttggacacttatcacaaagcttcaggccagtaacttaacaccgataaatccgtcatgtctttttccccaaatacacctgaggccgctaaactctccttccaaaacatacttggtatgtctatatgtgattgtcacgaatcctatctaggcttacctgcttattctgaacgggataaaaagcaattattcaataacattaaggagtgaatttggaagctattgcatacctggactgacaagattttctcaattggaggtaaagaagtactcttgaaggctgtcattcaatccattctgccacttacgcgatgagttgcttcaaacttcctgtaaaattctgccgtgaaattgaggctatgatgtctaattttttgtggggtactacttcagacaagaagaaaattcattagaacaatggaaatttctttgtaaatctaaattggaaggtggtttaggatttcacaactttatccatttcaacctagctatctttgcaaaacaggcttggaggttatttcaaaatgctaactcacttttatgtcgtgtcctcaagggtagatatttttctagaaacgatttcatatcagctaatacctgtggtttgtcctctctcacctggcaagggatttgttggggaaaagaattattgaagaaaggtattcaattaaaggtaggggatggatctactataacatttgcaaccgatccctgggtcccagggaattcaatcttcaccccaatgttctacactggcaacacgaataactgtgtggtagaatatattacaccagatagagaatggaatttcagcaagttgtctgctgatttttcatctgtggatatggaaagggttctctctttacctttatctaataatgttacctctgattattggatttggcactacacaggtggtgagtataatgttaagtctaggtatcactttgcttgttccttagcagatgataccatagactatgtttcgaatccaaatatttcctggtggaggtcttttggaatcttaaaatggcccctaaggtgatgatattcgcatggacgactattcaaaatgccctgccagttgctgcagaactgttcaagaaaaaatcacttactttagcttcatgtagcttgtgcctaaatgcatgggaattcgtgggacatgcaatgttctcctgcaagcatgcaagacaagtttggaaaattgttgggtttgcatttaactacaaagctgctgtgtccatgaaagctgaagactttttgtttcagttatcagaatgttataccaaatcagagttggaaatgattttctgcaccatgtggtcaatttggtctgatcggaacaatgtcattcatggtaaacttgcacaacagccgacaacaatctttgctaaagctcagaattttctcaacaattacaagtcttcacagcagctctcacttcctactagtttatcacccactggctttccttcgacttgcaaggtttggaaacctcctcctccaaactgccttaagttgaatgtagatgttgctttcaatgcagcttgtcataagattggttttggatctataataagggattccaaaggcatagtcaaggctgctatgtctcaccctattaatggttgctgtcagccacaagaaatggaagctaagggtctcttttatagtctaaaatgggctagacagtttaacttcaaggttgacacggtagaaatagattccttgatccttgcaaatgctccccacaaatcaacatcaaatcgatcttcttttcaagatttaattattgatgttcaaactcaattatcctatctcctttcagtttgtgttaatcatgtttgtcgtgatgctaaccaagtagctcacggt

SEQ ID NO: 187696 - DNA, 951 bp, Cannabis indica
tttttttaaaaaaaaagtaaccgtgattatctaataaattggaaagtgttctccatttttttttacaactacctcaatttattctcccactaactcacatctcctctctcgttctaattacttcttcaagtgaagaatgcttcaatttttgtcatgcctcattaaggtaaaatctgctaactatttcacagttcaaattaaataatatttgttagtttccctaaaaataaatatcacaatatataaaatattaaagtttaaattttgatttgttttgtaagtgatactaatgaaatagtaagatcttaactatgactactctattataaaaattataccttgtgcagattttaatgctagatttatatgaatttaattattttttatcgtttgaaatgcatacaatgcattcaagtttataaagttaatagtaatttgttatattgaaggatatttctttgttggaacaattggttgatagtatttgattaataccgacaaagtattgtctggggtcaatactggcgggaccccaccgataatcactaatatcgaccaaaaacacttttattatcggcagattattccacctctaattcttataattattgtagtgactattattaattttaattttaaatattttgatattttaatctgactttttttatctttatacataaagagaaattgaaaatttcactgtcgtaaaatttatgcggactagtttacttaaatggagtttttatagataaggtatgtaatgagggatcttagattcttgatcttaattaaacttcagctagactaatgcattagatcatagacacttcagcatttattcaagttggtaatttttttaagttaagtttggtatatgttggcttttatattgataattattagtttgctttttttttttttttgttataaagtgatctgttgtagttg

SEQ ID NO: 187697 - DNA, 1424 bp, Cannabis indica
tttgatgtgatggtgactaagggctctactttggccaactttgtgaagtagtcgatcgcaaccacagaatattgaactccgcatttccccttaggcaatgagtctatgaggtcgattcccccaaacaacaaatgaatagggtgtttacatagcctgggtattttggaaaatctctaacatttgtcacactttatacgtagtccattgagtcttctgtcaatatcggccaaaagtaccattgtctcaagatccttttttagaggctttgcccctagcatggtttctagaaaagccctcatgtaccttgaccatgaagagtttggcttcttcctttgtgacacacctcagatgttgcattgagaagcttcttccttcggttccacactgtagttaaacactatcacaaggcctacctagtttatcaattactctaaccgccatattcaagtgtgtagctccaaagttacaatacaaaaaaaaaaggagttattaatgagaaaagttgacctctcaccaccgacggacaagctgcaacgtcaggctgagtaatggaaaacaccaagcaagagcagattttgcctcttccctagattcttcttgtttcaattggggacaattcctcttaaaataccccataagtccacactgaaagcataccttacaattacactctcttggatgatgtttgttacaacgaatgcactcagaagaagtataacgacctccaaggccaccctgctgaccaccctaacctaagttctctcagaacctcttgttatgactcgagcccaccgatgtcgattgagctttcctcttctaatcaaccaatgaatcactgcacccctaccaaaactagaagtaggagtagtagtgaccccactaacaactagagtccttcaagcctcctaaataaactctacaacgctcttagtccgtagagcttgcatcacatctaggtctcctagaaaaattagaggtccttgcatccaaaaattttcatactttgattccattcggttaccagcaatacatttattatcccaatttccatacagggtgacgtggcaattacatgaatgacacaaggagaacatgttatgatcttgacaggcgatacacttcatgatgtgtcgtccaaggtgatttatcattcttaacaatttttttgaaaaataagccagaatatccgaacagggtatatatcaccgttcaaaaagcatcaactttacagccagctcgcatacataagccatagtaaatgtggctggaatatcttcaaagacacattccataaatgttcaagcatctgaatcttgatcacatccctaattttgtgggataggttcacatcaataaggaataagaggaaacctttctagtttccccccccccccttttttttttcgtttttactgtttctaaaa

SEQ ID NO: 187698 - DNA, 1467 bp, Cannabis indica
agttagatttactataattgcttagggtagtttgtaaattggtttaaaactaattatctataccagaacttaatccggactgtgaagtgttactctcacttaaaaatgtagtgttactgcctgtattacctatttccttgtttctggcttttcactcaaatcaccatattgcagaagttcggatgatttgcgaatactttagtaatgatgttacgatatggacaagtcatttcttgattggtttatctcgatctttatgtcatagggtattagatgcaaatacatatgagaagttgcacagggtgcttgtttcccacttgggaaggtgcactcttttaatttttggggagtttacaatcgttgatgatgatttggcacgtgatttttgctttacaactatcggtgagcatgccaagtcaataaccaaagatcaaatgtacaaggtgaactatatttacatttttatcaaggatttcagagtggctgtttttttaattgtctgatcagttttccgcttgcagtttgctcgtaggttatgctcttctttatttgcactacaagatagcagatcagccttgatcactgatatactaataggtgttatggattctcttgcccatgatggaaaggtatgctgatactaaattccattgagatgtatttcttctatgtttatatatgtttaacacttcagttaagtttagggaaaaacaatgggtcaagtgatgggtagttgcaaattatgggctttgtgagaaaaatttaagtgtggctcttgtattcattacaataatgttaattataggtactttttcagtttatttattttttatatatctctctcaaatataaaaaggtacttggtagaaaaatagacattggctttgttatttattagtttttttaaggtttaatatattatgcaattaaaaaaatcttaatggctgcaaagaattgaaagtctggtagatatttgaagtagtaattgcttaaattttattgtagctggtttgatcatatttgtcatatattttgacaaaatctgctatttagttcctttttcagtcttattgttacattttttatttatcagaatccaagaaaagtgaatgtcatgtgtgcacttgagcaagatactcatgtactaaatttacacatctcattcctttttcttcattataatattttgtggtatacattgaatgaacatgttaatttatttctctgctatttgtttctgtgaattaatttaaaccatatttctatctgtttccaggttttttttttttttttgttttggtttattgtcgttgtctgtctacggtgattcctgtcagcttatttgttgtgaatctgaaataatactattctttctatggggttccgacttttaaaaattaaaacttttcttctttgtctcagaaactaagttggtccaacatgaaatatgaacaagaacaatttgta

SEQ ID NO: 187699 - DNA, 3236 bp, Cannabis indica
ccacatatacaggaatatcagctgtccttattcaacattatacactgtcacaaccagtacctcataatccagattcttagataaaaacaagacagatacgggattatccaaattttgctttactttttacggtttttttttcttctttcagaaaaagatcattgcatattgaaatttaaataaagtcaaattacagcaatggggaaaaaaatcttctaaaagaaaaattaataatgggataaaatgtaagtagacgcatgctgtcatacagtaaatagttgttatgaccttcaaaccaacgcagaaggtgtgcaactgagatccccattgacaagcaacctctgattcagccaaaaagcgagaagccacagctgccacaagtgatgagtccaggcctccagacaaaagtacaccaaatggtacatctgtcatgagtctttttagaacagcctgaaagatttcaagatgaacagaatgcattcaatatcattatcattcataaaataatattacagtaattcgtagtttgctaattgatcaacaatctaatgactcttgcgctcttgggagatttctaatttaagttgtgtagatgttactaaatgtcttttttagctatttggggatgtatcaacattaatgacggatgagctatgtcctataaatttctgtagctagcttagaccacagtcttatcaagtatactcatcgtagacaataacaataataaaacccacataaattattggcccatttttgcaactcgtcctggcaacaagtaagcatcgaattagcagaatctgtcgaccacttctgaagtataagtaggaaatgaacaagcataaaacattcatatccaatgcacatgttatcagtcttgccaaacatattatttatacattaataattaagggactttttctttttcaaaagggacttttatgtcagtatattatactagtaagataatagtcagtggcctgtaaatgatctgtaatctttttagggctttaattcccatgaatctcaaaaacttagagaacacaactctgaggtcctctagatcataggaaattatgttttactggctgcaagttaccgaacacgagtaggaaatataaatacataaaaaacaaaatagtaaaaaaaaaattggagcttaccttctcaaaagccttccgaaggaccattggatcatagggagttgaaggtatttgctctgaaaaccatggtgggttgtaccatcttctcattgctcctgcaaatacatgatgaattcataagatggaaaacataacattcatcaaccgaaaaagattatgatgtaagaataggttttaagttagcaaccgataacattcatcaaccgataaagttagcaaataaatttgttccaaacagagatacgtggcgggcgcttaagttttgaaaccaccttgtagatttcttgagttttttatagtacaagaatgagatactatttgatttgatttgatcagatctgatcttatctttatttattgttccattcacttaataatagagagcttaaaatatgcataagcatgatatatcataccttgcttgctagagtatatatgcccaggaaggaacgacataaacctttcacagtcatcactcaaagccttcatttctgaagcaaaccaaactgatcctgcagatgattaagtaataaacatgttcttcattttatcatctcactaacttctaaaataaaaatgaaatcataaattcgcaaacagtaaaaaataaaacttcgcaagagcaaataatagatgaactgaaaatcaaaggtactctcaaattctgaatcaaagaatacagagtatatgttattgtgattatgaagcggtacagtttttacacttcctaacatctcttatacagctcgtattcaagaaacaaagtcttaaactattattatcaggaccagacagtacattacacatacggggataaatttacataccatcaagaccccaacccatgtaaagtggggtaataccaacagcatcccgagctgctatatagctattgtctcgagtgtcaaggaggacaaaggagaacatgccatccaacatatgcacaaaatcctccccatattcttcatactgccaatggcaatgacatattttcataagtgatgcactaaaaaggaaagtatagaagtaccaaaagaagaaatatgaaaaggggaataaagcattaaaatcatagttataataaatggttgttcaccaagcacaaatcaatcttgaaatatattcttagtcacttacaagatgcgcaatgacttcacagtcactgccagtgcgaaactggtgtgacttcagcttctgtcttaattccttatggttatatatttctccattaaccttatgaccgcaatttcaacaatcacacaggagaaaggtgtcaagttgatatattagtaaaataacacattattaaataaataaaaacacttccacggaaagtaacccaatctgaacaatgacatgtacaaaaggaaaaatacatgagacaatctgtatgtgttaattcaactttaccaatattaataaaaaccttcttaataagttgatattaacgttagtaaacataaacctacacacaatagttcgaagaggtaaaaagagctagtagtaccgtgacgacaacagtcttatcttcattgtaaagtggctgatctccagaagtggggtctacaatagctaaacgttgatgagcaagataacaattcccatgacaatgcaagccactccaatcaggacctctatggcgaagcctatggtatcaaatcaagagagcaaaaataatcaactaaaacgtaattaacaacaaaaataatggtaattttataaattcacccacatcctaatcaattaacttcaaaacccaaatcccagcacaagcaaacggaatcaaaatataaaattgagctactagacggacaacattcatagcaatatcaaacgacttaaaaaagtcaataatgccacaacaatcaacaaaactacaaatttggatatgaaaaataagaaaaagaatcaaatcgtatccatacgcataaatacagaacccaaacgacaatacacaaaaacttagagaataataatctccaaaacgaaagaaaaactaacagctcagaaatagaatagcaggaacaaatgtaaaggcgtcaacgtgttggtaatatgatggaaaaagaagag

SEQ ID NO: 187700 - DNA, 3056 bp, Cannabis indica
atggttatgcgaataaatgataagcgtttgatattgtcttctcccttgtgaaattcaaataaattgttttttttgatgccttagatttacttttcatgatagtctttggtttatattctttcttgtgttaactgttaactgttaagaactggggagcctcttattgattctcagtaatcactatacgctttctgttcccccttgctctcattatctacctcaacataataaataaattgaacattcaaaaaattttgttgggtcctccagttttgtcttttcccttcttttggggctttaaatcatgatacttttgggtatagtataccttttgaaaatttattgtgtactgtgattcttacctgaccttttttgtggtcttcaagacttggtttggtttggttatacctttactatttatttccaatagtaatgatctaatgacgatgtaccagactaacaaattgtttgtttttcatttttccaggcctgttgattgtaaagcattcatatcagtattccacttttgtatattagattgtgcaattttcctacttcgaaatatgtttggcttaaggaaatctcctttaaagacttctaaatataaaacagttgaccctgtatatcctaagtcttctggttcgaacccttttgactctgatgatgaaatggatgtaaagcacaaacaaacttcctcaaggaggacttcttctgaatcctcattagttttaccagatttcagtacaaacccttttgatgatgatcttggaagtgcaacttcatcttcttcatactccaatgcagctgcttcagccacgagaaacaagtatagaagtgatttccgtgacacaggtggattggagaatcagtcagttcaagaactggagggctatgcagtgtacaaggctgaagagactacgaagtcagtcaataactgtttgaagattgctgaggatattagagaggatgctactaaaactttggttctcttgcatcaccagggtgagcaaattaccaggactcacactgttgctgctgatattgagtatgatcttagtcgggtaagtttctatttgagcattaagtagtacatgataatggacaacactaatttttgtccatcaatacccctaaacctgcagtgtgcacaacattcacaggccataccctatccccatcatttgtttcatcattattactatattatatgtctgcctaactcttatatttgatacttttctttaagcatatatgtatttttaattgaacccctctccattttacacacacgcccaaccacttgaggctaaccacttgagctagcctcaagtggcaatcctggatagttattgaacatgttttcatgaactgagaacaatggctatattttaaggccttttccatattttttaaggataaatttacttgcaatttcttttttttttttttgactgggtattatttacaaatcaagaagttgaaagaaatactatgaaatttgtaaataatatggagtatttttctttctcttacttgataagttaggttattcttaaaatgaaaatgtatttgtgtttttctgtggcataaatgtactactaatatgaattctgtatccttctctgaaaatagaaactctcagttcaggtcttgtaatattgctaattgtttttgggcaaaccgcacctaagcagacattggccttgtgcctatggcttacaattgagaaagaatgcttgtcttttgcattgttgtaggccccttcaatgttgatttaatttcagtgtaaagtaaaatgaattatttagtgattatgcaaacaattgtttcagggtgagaagcttctgggaagccttgggggcatcttctcaaagacttggaagcctaagaagacccgtcaaataacaggccctgttataatgggaggaggttagatcttttctatatgtctcattttctttattgatgaactgagatcgtaataggatatattgttgcttcacccgaggttgccatttcccttgcaactaagaattcttcttgtggcattcaaaagaaaaaaaaaaaagagaattcttcttgtgctgtgttgtttcttatgcgctggaactacttgaatttgtagatgaagttcaaaggagaggcagccatatggaccagagggagaagttggggttagctcctctccctaaggggcggtcaaaagcccaaacactgcaacagactgaaccagctgatgcttatcagaaagttgaggtttgtatttgaggagtgatcattccaagtttatattaaaagaaattattcgtttctgtgtccatgtgcaatttcaagcaattgatgaattttatttgttgatttcttaccaggtagaaaaggtcaagcaggatgatgcattatcagatctgagtaatctcttgggagaattgaaggacatggccgttgacatgggatctgaaattgagaggttggttacattcacatctcaatgagtatcttagtttcaatctttatgcttctctctctcctttggctttcttgtcagcaaagttaatcatggtttgattttgattactttgtgaatgaaatattgcaggcataacaaagctctcgagcctttacatgatgatgttgaagagctctcttaccgtgttagaggtgccactgaacgtggtcgcagattacttggcaagtgatgaacttctggactactaccatctgcttcttgctttgcatcctttatctggcttcagtggttctgtttcttttcattttattatgaatgtaaacatttccctctttactgtttgagtacgttgtatacaacttttagatgttcaagtacagttgctcttgttcactaaataattgatttgagggttaacctttttggattcaaattttgtgaccttattgtcttgttccttctatgtcttatgtctcacaacatattttttgtaaatattttactcgattgcgttaattattatttttattatgttttggtaaaagcgttaattattttttgagaaaataacatagggaaccgaaaaata

SEQ ID NO: 187701 - DNA, 2705 bp, Cannabis indica
  modified_base (2643)..(2643): a, c, t, g, unknown or other
cttgttgaactgctggcaccaagagtttcaacaaataaacatacttcaacaattattgttaactttaattactacaaccaatattgttgactttattctacaggcttctcctctttataaatagaggttttgttgcaagagaaaagcataaaataaattttctaaaaatacaaaaaaaaggtgatccggtagagaggtgagttcattcaatgttaagtgaaagataggactgacgaagatatgaaatcactcaccaaaatcagacttgggtttgttcaatctcaaaaattaaagaattattgtcagaatatgaaaagaagaaaagtactggtatgaatatgtgatacaaagccagattagtaacaaaagatttcactcaaagaagaagagaaggaaaaaagaatgaaaaaaaaatataattggtttgaataatgggttggattaaccaggtcaaatgaggatctaatccttcattattctctctaatgaaaggattgcaatactaacactagacttatgttcctaactgagggtccaatgggctacatggtacaacgcatgtaacctgtctttgtgccagtcttatctcatcgtgatgtgacagacgctaattaattttatatgcaagtgtctgaaaaaggtgtgtgcgctattgtcaaaatagtgggtaaacaaatccccacattaatcttatgcgaaatccatatttgctagatgttcagagagaacagcttgcaatgcatagctaccttcaaggtcatgggccatatgttattccatgcaaacaaagatgtatggaagtgttctactttgagagtggaatcacagggaccgctcattccgggaacagagtagtagggatgcctttgcatgtaaaaggcctcttcctttgatgaagagatccattttttttgggaaaagaatgtagatctggatgaaatgctctaggtctgaagattgaaagcagtgacgaagaacactcagtgacaaacaagtatagagacagctaaagcaaggagcatggtagccacctcaaattcaagttacaaagactaataaagtgaacttaataacacacaccaacctcatcaaaacacataaagcaaagagacctcaacccaataaaatattaagataagcaagatatgagcatgacatcaaacatcttaacttcaacacctaatatagcaaagcgacctcggcgtcacttgaatactaagcaagaagcataatagccacctcgacctcaacatcaaatgaagactaagtcaaggatatattaacaatctcaaccttatcatgtcaagtttgaaccccaaactggctctaaataagtaaagagacaaagaaattaaggacatgtaaggcataaagaaaatgtgacctcatttcacatttcactccaaaataatttgagaaacaacttcagtgcagatatgtatttagatattaaaaattaagatattttagaataaaatttgacatcacaccttaatagaattggcgaccaaatcgtattttcctataaaaatgtaaccaaagcccataggagagttctcactgagaacaaaaaagagaaaagaaacattactttggtgatcaatagatctcgagtttacagcactcaaggtcacatttagagataagactatgaattctaacttaatatttgttttctcaaaattcaacagaagtatgatatacgtcatatcttacttcttgtggtcaaactattgaactacataaactctacgtgttaaatctacatgttagactttctatagaaaaaggacttagattcctcccagtcccatctcaaacttgtaactcaaatgtgggtgaggaaaacatacccgttctgcgagaatacgagctttgtcggagtaccaacaccaactgcaataagtttcacaccagctgcatcaaattttgcttttgattctttcagtgctgaagcaagctcccaactatgatcaaggaaagagacaacgagtcataacgagacatacacaatttcagatgaaacacttcctacttcaccgtttgtagaaaactaatttaccagcaaatacaaccaaagtgtctcaatagtgcaacaacagctactccctgaatgaaaaagcgcaaaaggaaaaattactattccctcttcaaatagagcaatgaaggaaagaaatagctttaactcatgccaccaatttcagctctctctctctctctctctctctcaatgtaacagaggggaaagcataagcatcaactgcacctatgttatacagttgcatggagaaactaattagattagttacctcattctgatcccagagatcctcgaatttgacagggtcgccggcggcagtgaaaatagtaacatcgccgagaatctccgcaatacttggatcaaactcagaaaccgcagctctcgtgacgtaagcgggtggcccatcgtggatcaggtttaggggaatacagggaggaaaaacttgaggcttgagtggtgaaggtgagaagaggttgagaagaagggtgggaatgagccgttgagatggtgaggaagagaagagagggaggagcgagcgttgacagcgagaggagagaacaagggccattctgattagggtttcaaagaagtgaaattcaagngactctgctatgctatagtgtggatttgtggagtaggaaactggaaggagcagaaaaaaaac

SEQ ID NO: 187702 - DNA, 919 bp, Cannabis indica
atatatatagtggtataaggctatgaaagaaaatgttttcacatcttatttgtagtttctttgcttcaagtccaattaagtaattgggcccaatgatgtatgttccctttggaatttgtaagcccaccatatttgaaaatgaatactaattttatcactattacaaagtttactaaatgtggaatcattcactgatttaaattgttaaataaaggctaagatgtatatgtgatgttgataattatccatttcattttttaacatgcataactttaattgtcaaactaactaaatagctatgctatttaccatttttagagaaacatccatttatgcacaaattcaatctaatataatcctatgctgttatttcattatctaaatttgttggatgagagttttcaaaactatttttccccaaaaaaaaaaaatgtatttctatgatttaattttgtagtatttttcatctttcccccccaaactattagtctttaatgaccatgtaaaaaatatttgacaaaaataatgttcaaatgactatctttaaccatctattttcactaaattggtattagtgaaaatagattattaaaatagtattatcctaagaataaaattaaagagatgttttgagaagaataaaaagaaaaagacaaacttttagcaaaaagatcatgagatttgttttatttaccaatcacaaattagtccataatagctagaactaattaaactacataagggaaaaaaatgtgatacatattttagctgtcaaattatgtacttcttacttttttatgatgggagtgtgaattaatttgagtaatgaaatttagtgtgtggtgagtagtgaatactaatgggcccatttgaaggtcttaattgaaaggggattttttatttatatacgttatattat

SEQ ID NO: 187703 - DNA, 3138 bp, Cannabis indica
ctgcagttctagtttgagaaattataaaactacatatacaatttaatttgaaaaaaaaaattaacaacaaacaccacctacactgcgaatacctctaattttattagaattgagggaagaaatcatcttcttggtgtggttctattaaggaagggaaattcttctggttctggttacagaaaccccagctagttttgtttccgctttcaactcattattcatcaaatctagtatactcggttgtgttttgggttatcaatgggaagctccaacaacactgggcttactgattcttccgatacccaaaagctgaaacaggaagacgccgattcatccccctattctgtaggggaaatggtcctcgtctcttgtggtcactactattacgcagccaaggtccatttttgtttcgtctcttataattttgcttcttaatcttacttactctaacagtgtcctaatacttctatttcactcacttatgcttttgtctaaggtcttaaaaattgtgggttacctcaacaattgggacttttatgttcattaccatgtaagtagtaattatactaaccaacacatatgccatatttttttgtgttatttattaatttctcttttgatatgcttctagggaaagtaataatattagtatgataaatcgtgtaccgttatgctatcttaattgcataatcttgtgcttttcagggttggagcaaaaagtaagtacaaaatcttcctcttaaggtacctgctttattttgctgaaagctttttcaactctgatacgaagatcatgttgttggatttttgatggtcttgaacttgcaaacaactaacagggccttgattattgttgatgcaaagtgttcattcaaattttctgtatgggtagcaacaaaaatttattatcagctaatgatttgttaggccccctatcctcaacacacatgtgagacgtaacactcataagtgacctattttcaggcgggtatagaatatgaaaaaggatgttatactgttatggagctacagaataggaaaattttattattattatatttattatactactagtatgtaacctgtggaacagggaatgggctgaaggttattataatattatattagtaagtagtgttttgtgtgtgtgggtgtgaggaattttctaattgtgatttcagtgtgtggagagtaggtggtttctccaataccatcagagtttacgtgcggtgatgctccttgaaagtaatccctaaactaatttctatcccctgattattgctaaagctgtgtttctttcttgggtaactgggttttcctgattgttactgtaagaaatatttaggcacctaacatgattcttcacaaaatatgtaagaggttatttatttgtatatatccctacctgaagtaacgactcttgcagtgtcatgagtttgcatttcagatattaagttggacatattttcatttgtgatctggtttgtaacatatttactatgtttgaacattttaaatgtatcaaataatctaagtgtcattagtagttaattaattttggcatggtgaagatgctcatttgatatgatgaaatatcttcagcttcttttgacttttcattgttaattcttttagttatatattcttgatgtttttaatttttctatccaatatggaattttggacagatgggatgagtgggtaactacagatcgtttgatgacatacactgaggagaatgtgcagaagcaccttgccataaataagaaacaaggaatacacaagagtacagagttagcacgctcatcaaattttaaggaaaaaagtaccaatggttgggtttcttcattcatgaatactttttaatgttgttgatttttatcagtttctacataggtgcataactggggaaataattgttgcttgttctaatttttttccccttgaaccggatatgatcttttcatttgcttatatttgataacatgtttaagatgtttttagctggtccaagccaaaatccccagtagcttagtgcctgacatattatggtgttaagtgtcaatagttgattattcattggtttagattgagttggattaacataaagttaatttcagtatgtaaatctcttagtcatcgtcactatctgatgctaacttatttatttcaatacaaacagtacaaaatctcatgttgcttcatatactcttgcttttagctgatattgggtattagagttctaagcagcattttggttttcttaatttctataaactatttcatgaaattttgcagtgcttgctagtggcaagaaaagaaaaagtgatgaccgtcgcttcatggtatgccatctattggtatttggtactatgtataaactatttatactttgattatgagcataactacctctgattttctagttctgttcttgactttatgcaatggtgattgtattaagccgtatattaattgtaggaaaacattaacataacaatggaaatgtgtgcaaaaattcaaataccattgggactgaggaagcatctggttgatgattgtgaatttattacttgtatgggaaaggtgattattctatcttaccatcgtatggttttgaggaatgggatggctcttcaattgtggattttttttcttttttttggacgtttcttctttctgttttcatttctatatgcattttgggtacattcatggtattgatccttttctagtcctgtcttttattcagactatatttatatatatgtatttttatttattttgtaaatggtatatttgtagaggtaaggagaatgaaaaactttattgacaatagaaactcagaacaaaagttaaggtgcgtttgtttaggattaacaaaaactggtaaagagaaatgagaataaaaaaaaaaaataaaatggagtggaattaaatttaatgagtaaaaaaattaatcgagaaattattaaattgtttttatttgtgcattggaatgacttttggatagaattgccattccatcaaaatgataacataatcattccattagaatgtcattccaatgttttataaagcaaccaaacaaagaaataaaataaaaatagtttttattccattcatttccattctatt

SEQ ID NO: 187704 - DNA, 1074 bp, Cannabis indica
tttctacgaggtcctttggagacagctgatggcaaattagggtaagcttatatttttatatatacacacacacacatacatacaaggaattatatgtaagtataagatataaacctattcttttacaagctacttcatttttataattttttatgggcaatcgtaggacaccacggctctactgcaatcttccagattgccccgctgagctaattcatccacctgaagattgtaatgtgaactctacattggcctttactattcaggttttcactgattcagattgatacttatgctctcttcactttgatttattgtaacattgactcggtgcatttgatgttgttttggtttgtgtctccagatatgtcgagttgaacaagttgttgttgaaggcacccttacaggatctattattcattttcactgggttagagcagtaaccatctcttcttctggagtaattagtgcatctgggctgggtaagccttccgcgtcatctttgctgaacaatttttataccatcagaaatatgaattatcagtaaaaggaatgggtccaccttaagagacaaaaaaaatccttctgtccagtttcagatttggcaaacctttaacagaattttatttgggtgctaggttgcactgatggaatgggccaagggaagatatttgaaaatggtctttctggtggaggagggcatggcggaaaaggtgggcatggatattataatggaaatttcattgagggtggagttgcatatggaaatgctggtttaccttgtgaacttggcagcggtagtggaaatgttagtttagctggtgcaacaacaggtggtggtatcattggtaagtattttatgtgatgaatttttggtctttgatcgatgtgctttgaaaggtgaaactgattctgtgtttggtgcagtcatttaaacttgtaaaaaatggtggaaatactcttgcatgtttatcgcagtattcatattttgctagttatggatatttgtacttaaaatcacagtgcttattatggggcttaaattccagagctcaataatcgatagagaacgtc

SEQ ID NO: 187705 - DNA, 3755 bp, Cannabis indica
tatatatatatatatgtttggcttttagttttgggccttaggcacgggcctagtttgccttaacttagggtcaggcctgcttacagcctcatcccagaatttgagaaggagggaagcatgaactaaaagagtaagagaagattcaataagaagcctatgctttctctcatccactctatttttctcatgagtggttgggcatgaaagtctatgagagatgccatgtgagagaagagtgctttcaaaagcttgaaactcacaccccaatcagattagagggctttaaatttgcaatcaaactcattctcaacccgagtttcaaaattaatgaggcatcagatttgcatttcaaaagaaacacccatatgtacctagaataggtatttatgaatgaatataatatttgttaccactagatgataatcactagggaatgaccctagaggttagagtgaataagttgcggtggtttagtaaattatgtctcaaaatttggaaacagtagcttatgtatttttcctaaacaaaatgcattaaaaaaaatcaaatgcaattttatcagactttggcaaattacattgagaaaacacatttttaaccacttttgtagagggatgtctcaatctgctatgctaaagagaaaactgacaaatagtggagacattataagctgcaaaattagaaaaatttgtagtaacatcattgaaagacaaatgttaaggtacaaatggaaagaagactgagagagagagagatatatagcatacaagtcatttctaagtcctccttccatgagaacttgctggggatcctgatccttgacaaaaaaaatattaaaatgaaactcaaaagaagattttattatctttagtaaatggagagacactaagtaaattttaagtgatttttggagcaggaagaagttcatcaagaagaagatatttttgagtaagcttggagtgtgttgaccccaaaaaattactaagtgtaatatttggagtcataagtatgcccaaaagttttccaaggggagctccacgcgccctcgctcccggctcccgctcgcgagccctcaccctcggcccgcgaccctcctcatgcggctctcgcccgtggccctccccctgcggccctctgctcgcggccctcgccccgcggcccccgcctgcagcccccgcctgcgtgccctcgtctgcgaccctcacccgcagcccctcaccccagtgtccgctcccccgtatgcgtcaacaccctgctgattctcctttccttcctgacaccagcagacctagtaagaaaatattaggcgagataaagatggcacgataagtataaataatggggacaaatttcatttcacttaaggtacaaaatggaaggggacaattttagtgaaactaaggattttagatgtgtcagatcacttaggatactgtgttgtaatggatgaaagtgacttgacatagggagtattgggatatgctgtgagtgcaaagggagaagggctcactataaataggacccttaagttcattgtaaagggatctttttctttgaatgaaaaaacagtaacttcttaaaatagaagagctttggagatttatactctaaacatttcttttgttaagttttttttttagagataattctaaatcctaactttattgttgacgagttttagccgttaacagagtgaaagaaaaccttaccaacattttggatctgaagaccatcaccatctcctacatagatctggtttggaccataatattcctatttttgcatcagattaccctcttgaggagttgaatggttagtagcgcctgagttagggtaccaagtagggtcattaacaatagaggctgaagcagccatagcctgcatctgagataaattatcatccattacacaacaaaaatacatggaaagtccatattaaactgttgataacactttgatgagacatgacaaagcctatcacacagttaacaagtaggtcgagttctagatgaattggagaaaccatcatgggaagaatcaaaggatgcaccagatgaaagggggaaaggaataggagatgaacctcgaggtctagtagcatacaaattctagggaggagtttttgattgttgaggaaagccaccttgagatgcgtcatacgaatgttgattaccactgccataagtatgatcaaaaccaaaagatcgaaactttaaagcaccacgattatgtgctaagttggctgaaggatgagactcaaaatcacttttgtgcttatcaatatgatgttcctcaacaagtagaagagattcaatttggcaaccgtacattcatcttgatgagaattaacaaaaatgatgaagatatcatagtctgaagggaggcatttgaagatggcagcaatattctctttcacagtgagtggatgaccaacatatccaaggcaatcaactagaggtatgacaaagaggaggtaatcattgattgacagggaacctttcttgaaattttgaagctaatgatactgatcaatcttgactgatgattgtgatgaaaaatactgataaagaattttctaaacagcagagcaagtatcacaaccaacaatacacattagaattgtgttatttgatctaaacactgtaagcaagattaattgtaccaactcgctcatccgcgacatataaaaatcatggaggttcgatcggatttgcagagataaaattggacagatcatagtcacaaatcgcagcaagcacttgaggacgccaaagaagaaaattatgattatcaaacttcacagaaaacttgtgcggatagatgattagatcagtgggaacagtcattgtcgcttgaattggagttgccatagacacaaatcaaaatcacaaagaagtaaatcgagaaagaaaaaaattaagagagagttactctgatactatattgagaaaaataaatttgtgaaagattgattctattcttattgataattaaattaagtagagagtatttatatacattagttagttatataaggctagaaagttagttacgaaaagagctgaaaatgcagctagaataactaacaaagtaacagctttaacaaagtaccaacatattcatcatgatcattctctttatatttgtctatagctattataattgtgatcatctttctaatattgtgtttgtagtctatttatttgtaatttgagcacttgagttgtaatctttgaatttattattcctgtgttaaggatatccaacatttattgtattcccaatattatgtgagaacttatttcatatctaatatgataactttatacattttgaggtcttttggcatttttcttaattaacttggtaaactattttcttatataactaaggcagttagcaaaacaatagttttttatgataaaaataaaaataattaaaactgttgttaataaggtttagggttcttaagtatctaggttgtttgtcaatgtataatagccgtacgaagacaagagtaagcagcaaaatattgcttgcaagcattcagttacgtactctttttttttgcaaatacaacctaaaataatgacaaaatctcatacatcagtagtaaaatcaagatagaacctataaaaatcactcaaccataattgcaagctgccactatttgtctttttcttaattttatgtctttcttagctttatgtatgggactatttcataaatacccaaaaatggtgatctacaatttt

SEQ ID NO: 187706 - DNA, 2836 bp, Cannabis indica
tatatatatatatatgggtattattgtgttagatgacaatattttttgttcaataagtttttcgttatcaacgttgtgatttgagctgttttctccgatgcaagtcattgtggtaatcaaacggctactgatattgttatcttttgacgtttacagggatctgtcagattttggaatgggtaggaatctagcaccaccccaccctctcatgagtagagaagaatttgaagcacggaaagctgacttgaggaggaaacgtgagaatgagagacggggcgataggtaaattgaaattttttgtttttctttttgatttgtcatttcattattagactaatttatgaaatgttatcttatctgtggagtttgcctttagctagtatcaggaaaaggacttagactagactactctatgatctgattttattttctcatatgaattagaaattgccttaccctctagtattagatggctgtaggttgcaatttgcaccattgcacaagttttaagctctcacactacactgaatctgacatgggttatttatgtctgtttattgctgaaatccttaatttaaacatttgtcgtatgcatttaatagtggattcattgtcttgcagcagcagggatttttccaaagatcaggattttggtcgagaagtgaacagccgtggcggtgccggtccaatgaaacccaaatctgtatgtctcttattttgtcctaatttttcttttatttgtgtactgcagcagcagcagcagcaggtacatttatggttcttagcaagtttttcacaagaaggcactaagttgctaaagaacaccaatttggcaagaaatacctctcttttccctaccaaaaaaagaagatatttcgttttttcagcagctagaactttagaattaaatatagtagggacgtttgtcttttggttattatttaaactttcaatttattttaattttatattttttctaatgattcaaatcatgcctaagctataaagtataaactagaagatgtgatagaaaaaagtgcataaaattattagtgaattattgggcctctcaagattaactgcatcaaaagcttaatgaccacaaactaactgtttgacgctagaatttccatttttcctttgcctagtggcccaaaaataatattttaaaatgaaatttctttccaaaaaaaaaaaaaggtttttgacattttgttttgccacatgacaaacttttgaaattaaaaaaatacaaatttgattcttaacttataacccaaacaacaaaccaataaaactgatcatcaaaaaaagcaaaccagtaaatcaaaataaaagactgcttgcttgtgcaaaacttaaaacttctattggttttgggtcccacctatttaataaccatttttttattatattaataatgttttttttttaaaaaaaaatgttaaataaataaagttatttaatttgtttattgtgatttatttgggttaggtgcagagaccagtggatagatcaccaccaccaccaccaccaccagactatacccaccgccaccgttccgagagatcttccattgacagacctcccagagatatcgaacctccacgcccacccaagagaaagtccgaccaacaccacgaccgtgaacgagaccgggaccgcgaccatgaccgtgaccgagactatgactatcacgatcgagaaagtgaccaccaccaccactatcaacaacgccggcgatcgggttcctctggcaggccgacctctgaagcctcaaccaaaccctcagcttcggcttcggcgtcggcggcggcttctgcctcttcagctgctgctttagaggcggcggcggcggctttagatcgcaagaataaggcgagcgttttctctcgcattagctttccggagggagaagtttcgaaaaagcgtaagctttcttcttctccggcgaaagatacgggaggtagtggtggtggtgcgtctgtttcttcgacacatcacaaaacggcgtcgtcgaacgggtactacgaggatcaccaccacaagtcttcgtcttcgtcggtgaaggcagcggcggcggcggttagtggtggaggaaggaaatcagctggttctatggattacgagtctagtgatgaggataggcatttcaaaaggaagccttctcggtacgagccttcgccgcctccggcgtcggtggatttggaggagcctaaacactcgtcaagaggttccagggatagggagcgaagcaagcacagatagggtagaagaacgagtagtagatgtaaaaagactactgaaccaaccaaagcaattggcaactgcagccattgatgatctcacactgagagagagacccataaacaaagccacgattggaaatgaaattgttgggattgttgtgttggtttgggtttggtagagagaacatgtggaatattattttcttgtgtatcatttttatattttaattaatgtttttcttttttgcaaaagaaacaattataatgattattttttttttttggttgaaaccaattttataatgatatttcaaccataaagcttgtgactttttctattggatgatttaagtttgaagtttatcttaatctttctatattatgttagttattggtgatttgtttggattatcattatttattacaattttacatcatggcttaattcatatatatctttggggattaggatggggattaggatgaaaaacgtttagaatcagtgtttgctacggattgtaacaaatttttacaccaaccaacaagtgtaactgctttagcggtgtagtttttttattttatttttt

SEQ ID NO: 187707 - DNA, 3022 bp, Cannabis indica
tctctctctctctctcttcaactcatatggatgctttggttgcaccccatatgattctttctatcttctctcactttctctcttttaatttattcaaactctcttcttgtggtctatccttttcctgtttttaatgtctttttattttggcaggattcaccagatccattggcaaattcagttttacagcctcagtttcctggaactcttgttctggaacttgattggttacctttgcgaactgataaaaatgatccgttggtgctttgcattgccggagctgatagtagcttccgtcttcttgaggttaatgtgtaagttcattttgaattactgatatcttttagtttttcgataattactcatcacaaaatgaagactgtttgaaattaaataccataggtggggttttgttggaaggaatgaaaatataggtatagtaataggaatggaatagaatcaaatttaaaatgcagcaaagaaattgataaaaaaaaattattaattttttttaatcttgcattggaatggtctttccttccatttcaaaatggaatagtcattccaccaaaataacggaaaaatcattccattgaaattaaatacctttggtggcatttggttggaaagaatgaaaacgtttgaataagaattagaatatagaaatagtaataggattgaaatagaatcaaatttaaaatgcatcaaagaaattgataaaataattattatttttttttcatcttgcattggaatggtctttatttccattaccaaaataatgaaaaaatcatgacattccaatactttaaaatgcaactaaataaaggaatggaataaaaattgttctcattccatttcattacatccaactaacgccactttaattaatcttgaatagtaaaagtactgcggtggcaaaataattatgaggccttttggggctaggcatgatcaaatggtggtgtaatgtgataccttctgttattgctaataaaaaattattcagatgctgtggaagttttacttgaatagagcccaaggacagtgttgataaattattagcaatttagaaccctattttatgctttaggctgtaactttcctatcattatgcttgtttatcaccacggttttcctccaccataaatgagattccctaatttacttgggaggaggtcagtctcagacataagacctttgtctcttttttaaaaaagaaaactatttattgttttctttgtggtctcaaactagtctttgatacttcataactgcaccaaattcttcttttttcttttttttttgtcctcttttagattatgggatttaaaccctgatcactcacacactcaccaactcaactagttatgctagcctggcgtaattgtaccaactgattaaatcttgtacttggatgtgttattggaactcagatataaattaacattcaatttgggtctttgttcacaattatcatatccatgcctttgaaactttgtttgtcgatgcttgcagaattgacaaaagacttggttatgtgccccaaatgaggtctacaaaagaacgattccggccaatgcctttgtgttctcccatactactgcctacaccgcatgccctggtaaccttgacttgaattttcttgtcaatttaatgtcataatgcatatgctagtctgttacacgtaatgccattctgggtgggtgttgattgttgattatgctgctatgtaacattctttgttgccaaggtatatgcaagagtttttatggcatcaatgaataggaaagttaatttctttggtgcaaagaaataagtaagtgattttattggccaaggaatatgcaaataacaaaattgtgtgtccaattatgagatagatgacttgctcatcatctccgattctcagcacagatagaaactgctggactattgatcaattagttccatttagtcttttgattgctcagacaataatgtgtggagatccattaatatattgagataatttgcataatttttgctaatgcatctcttttcttgcaggcattacggatgatcttgcaactaggtgtaagaccatcatggtttaatacctgcagtacaactttagaaaagagacctcacttaattcccggaactccttcatccacaggagaccttcggaagtacttgattgatttaccacctattggtgaccctgtagtgccagagttgctacttaaaatattagaaccttatcggaaagaaggtcagtactttcttgttatggtgtaagacgatattttctgctcagattgagtgtttgatccatgtttgtctgttgcctcttatggatttttccttttcaaggctgcattcttgatgatgagagggcaaaattatatgctaaaatggtcaatagaggttgtgttatgaggtttgcatttgctgctgctgtttttggtgaatcctctgaagcacttttctggatacaactaccgcgtgctctcaaccatttgatgaggaagttagtaaataagcctccccaaaaggctccagcatcaatgtccaatcctgagcttgatgatacatctattctgagtaggatatcatcgaaagggaaatcaatgcccgggacaaaaaagaaggatccattggtaaatcccataattattagtaatgtcaaatgcttttaggcttgttattctgggtaatttttcctccatttgaatgaggtaacattgtctgcatttatgattttgcgttagcagagtcaaggtagcctcagcttgatggcttttgaacaagaagagttgtgggcaaatgctaatgagcgtattctttggcatgagaaactggagggagaagaggctgttcaaaatcgcgtacacgagtaagtggatcgagtgtctttttttatttgttgttgattaattgcttgttaatgctatcggtttttttcatttaatcttaagtggttgttttggtgagccagctagagactgcattttctgatatttctttaatattatttatg

SEQ ID NO: 187708 - DNA, 3508 bp, Cannabis indica
tgacaagtaaactctagttgtagtatatcatatcagtaaaaccctgtgtttgataaatctaggaactttattcacatagtcatgtttactttccaatgtgttgacggcacaataaacaggatcaagtatgtgaaaagggtttcagatgaatttatacattatgtacatataatcaatgaaacataaattattacaatcaataatttaataaattcaataataataatgatactaataataataataaactattgtatttatttgtttaaattaaaataataaatttctttacatacttttaggatacactcctaaaaccaactgcttcaacaaataccaaaactaagaccgcaaactagcatcaggctgcccatacaatcccgtataccaccaccaaaggttcccatgaaactgaaccataacatcaatgtgactatgcaagtagcctttcaaacaccatttccgcatttctcgtccaaaacaaacataaccccccactatgccccaccttctccaccacaagcttccccacaaaacccaaacgaacccgtataagctcaaggactgaatgagagactagcgtctcaaacaagaacataatatcaggagaaaactctttaatgtaggaattaaggatttagaactttcgatcattcctaagaccttagacgttccaagctatgcaatttataattcttgatggccctgatcatcaggagccaccgtaacaagactacccacaacatcattcctaaccacaataggtaaaagagatgacattaccacaatcactgaaacacaatcagtatccatctcagcaatataaacctcatgcaagtttttggaatccaaaaggagaggaccccgtaaatattttagaccttttttataaaaaaatttaggactcttggatttaaccttgagtgccccaatcttatcttgtttatttaattttatttttcttttttgtttgtgagtcgatccagacatgcccccatgcatggatttcatgggattcacatgagacgtcaatgacacagcatcaccacccaaacaaccagcgaccacaggacccgtctcaacctccattacaagactcccatgcaaccccatatagcagccagctccacatgatccaatccaaaagagaatttcatgactcaaatcacgagacaaagaagtttccttagaaagggaaccatcactcaccccattataagaaagtgttgctcggtactttccaaagcttcaaaagaattagatatatcaccattaaaagctctaaaaaatgaatgtcatttaagagaagcatcccccacatcgtttgatcaattaccgccactaccccaccagatttagccaaaccacctccaatcacaccacccttcaccactgagaccaccttggcactaaaaaaactctaggaatcgccaccccaccaccatgatcatgtcctcgagatctcttctcaacaggactagtaatgcaatcagcaaggggaacccttatccaatccccatattttaatttttccttcccccaatatgcttaggcttcaacagacattccttggtcagatgtcccaaaatcttacaaaaataacataagtctaagagtcattggtaacatattggcataatgattagtcgtttattcggggccaaccgtcgcttgtccatacaagccaatagctttttgatgtccatactcacacgtaccttcatgaaggcaccatgagacattccacacggaccacacaacacctccaggactgaaaaactagcactttatggatttgaatcctaaatagagcgaagtcaaagattaactcttttgaatccaataattcatcagactcattcaaggttaacaagcaatgctcgaagacccaaggtatgtttttaagaacgtgtttggattagtcaccatatcaaactaaaacacgaaagtattcttacctctcgcttccaccgtaaacgaactatgtatcttccataacctattcacagcataaatttaaattatctcaattgatggaccaagtagatattactcgtcccataatcttcttagccacaaccatcaccccctcctccaaatttttatcattcaatcttgatcacaacagtcgaagaggacgtcgaaaaagacatagaatggcactgggaaaccaggatagaaaaaagactcaactatgtaaccctagaaaccaagagaaaatgtagggtcaatattccaataatcaatttaactagtcatttttttccaactaatattgattgcctaactaatctcaatttcaaaattcatttccttataggggtttttccttttatagcccaaaaaagtaacaatattataaatataatatgggatggcctaaagaacttttgtacagccgaagaaaaaaataacaaaatacctcttagtctacccttgcagtcgcacattcagcacaccagagaaacgaatccaaccagtgatcggagaagcgcggcaacgatgaatcaacattggtagacaaagaaacaccattaattctggcaaaatcacctgagaagaagaaaaatatcaaactgaaaaccaactattactgatttgatgaagaattctgaagaaaaaagaaactagtttaaaacataaactcaacctaaaaaaatcattcaatttatagatttataatatgtagatctgtaagaaatagatttaaagtttttcgatcaatccaaatcaagtataatcaaaaaaaaaatatgtatcactacaatagctaatattctaattgttgtattaacgttatttttcaaaatttcaatcatggatttattaaaatccaatcgcgaaaaaaaaattaaatttgcatttatctcgcctcatggatctggccacgtttttttatagtatttttgtttctacgccattgcattacagttggttgtcatttttattgacactcttataattgataatcaattattacaccatgattaggctatactgcttttagtcttatttgtaggtattttatatagacaatccaatacaggactctcataaaaataattgtaatatggtcagtttgttcatattttaatattgattgagtttacattgatttgcagtgttcttacaattgtttcttcagtccaataatactttgttatttttttaatatctaagcacattgttcatacatggttgcaactacgttgtttatgcattgcctcatagctgtgttactgaaatcttattatgtataaaatcaaggatcaaaattggcaatatagaactcacataaaggaacctctattgtgataagtttgtttatattactaagtggaggttattagttcatttaaagttgtaaaatatatgtctaacaatacatgtatcatataaaatagatgatggtgtgcctgtatttttaatgccctattgtgttttagtttctttatagttttttcatagtttgctgatcataattgaatttttaaaaattttaagaaat

SEQ ID NO: 187709 - DNA, 4284 bp, Cannabis indica
atatatctggggcgccaccaccgcatcctcgaacccggagacgaaccactcgttgtctctgtcgacccgcctcaccaccttgtcccagcttaaatccctatgcatgaacgacaagtcgtgtaaaggccactagtgctttggtcacgcacttgagtgattctattagttgatcgtagttgatgggcctggcgggctttgagaagcctctgggcttgaataccaggcccaagttcttctccgacgatcggtggatgaactcggcgtgtgggatacggtggtccaggaaatcgtatatttctttgactgcagcccactttctcttattggggtagaatctagtcactgtgtttggtgtgatctcggtcacgtttccattacccgtgtcgagtctctcgaaatcgctatagggaatcattttagagctggccactacgttgatcatgttgttaacgctgtggaaacaacggtcggctagtaaagggagtagactagcaattcgataacacgggattagggcttttagtcgatctgacggtgaggataagtcaagggactgtagatctgtcctgattatacggtcctgattagcccctcgacttagcgcacaaaatgttaccaaaaaaccaactgcgtagtaacctaatatgtatggaagatcttgataagtccagaataatttttcaactaatgaatttgatgggtcaatttgtccttctcttacttgatcagtctcttcccctctccacaaacaaaagtttcttacaaaacccgtcatgtttggccattggtcttgtaaaacttcggttgagtttggattagtgggtttacgaacagtgactatatcaactgagcagaattttgacacgattcggttaatgcaatcgtcccaaaggccaatgaaggagtctctacttgtggaagtggagctggtaagactaggtgttgtacggattatgggactaagtatatcgtatgtgaaagctctacagtctactaattcgttagagattgtaaagaaatgttctttcccttgtggtaagtctcgataaacatccttacgaagtggtaaacgtagctcttccggtggtgcctcttgtaaataccaagagagctcgaacaaggttgggattgatggtggagaaactcgaagacatcccacgtagtaatcggatggatcttgaaaatcccatggtggaatcgctgatcaaccaacaaactaatggattattgcagtgtacaaatatatatacataatatgatatgcgaagtatttatataaaaatttaatatattagctcacccggccaaatgtcaaattatattaattatatgtaagaagaaaactcatactattattattcaaaaaaaaaaaaagtaccaaactaaatagttaattaccagagtctatatactatatatagcctattatataaaatagatcatatctatgatatgcatgtatacggtgtctaactaaagtaaaaatgtattatgtatattaaaattaaattcacattagctcacaaaatgtgacatttattcgaaatttatgttagaagaaaactcacatcttactgagggttccgtgaatggaagctggtgaactttctcagcgaatcctggcatgcatacaatcatgaaatttaaaaaaaaatacgttttgttcctgtctcatttacaagagatatatatatatatatatatatgtgtgtgtgtgtggaagtatattccaaaatatatcgttgcatatcataaattaagaaacacgtaataacagttaccagaagcagagactgagaaaggctttttcctgccaaaaactttgacttgttgtccagaaacgaatctgtccacggagaatcctcgtagaggaccttcttcgaaagcttccattgtggtagcaaccatggcatcatccaagtaagtgagctcatcagcattcaagaaactcgaggtttgtaacttcactctacccctatggagctcaccttcttcagcccacaaactcacagattcttcccaagacattcgtatcttaccaattcggcgaaggtccttggatgatgttgatggtggagatgggccccccatgtctacagacgactcaaaccccattaagccccctctcccaccatagtataatgtctcaacaccgcttcccataatcaattgctttgtcgtcctaactgcgtacatgtatataaatattaaagagatgagagagagagagagtgtgtgtgtgagagtgagagtgatcagcaattaattatgcctagccttatttcttgatatataataattaatgagagggaaaaaagaaaagccgcaaaatcaaacctgcagatagaggaaactgatcgtcttctttgaaaggaggtggcgcagtgagagctctagattctccggcaacaattagggagctaccaggtctggtactgagtggtgttctcattttagagcccataaactgagaaagctcctcaaacacttcttcatcaaacgaagctggcaatctatgaagcttcctctcgtaaggggaaagcctaaaatagcttttcccaacatgttctctctcccctcctctttcccactcataaactttccgaaactctcccaacatgttatcccatttggttcccgcagttttagcatctctattaaccccgtgccgttggagaaaatcagccacttctttatccttatcagctctagtcttccctttggtttgagaaccaacaagattaatatccgcaccactcactgactccattctcgatgaagatcccccgccttggtattgaactctccacgcccgggctaaccacagcatctcgttaggtttccagacagggctcacgtatttaccttttctaaattgttggtgaactgggttttccccagctagttcgggcttgctcgtgtcttgaccggatcccgaaagagacggaatagagtgagacggagatgatgcggtgtccgaagacgaagcagctgcagtactgtggagtactacttgcgtgggtggttgttgctggggagccgatattgggcttgattctcccgtcaaaattgccatttgggcaacttgttgctgtttctgctgagaagaaggagacgggagtatcttccattgcccagttgtggtgtatcgaggtctttttggattattaactgcctgatcaaactgttgttgatcgaacggtgaagatgaagttgcaccactagggatatacaaagggcttgatattatgtgggaggctccacttacgactacggtggacgtttgttggtgtggggggtggtggtggtggtgaggtcttgtttcgtttgattcgtctaatattgcatctttaggagaagaagatgaaatttgttgctgctgagactgcggctgcggctgttgtttggatgatgactgcggtttctttgttgtttcccccttgttgtcacccatctctatctctaatgggcccccaacgaaccaaagaaagttctttagctggagagaaagtaataaactctagaagagaaccagaaccaccataaccagtgccattagcgtagctagaactagtttggtttaagggattcgctttcgctcaaaactcacaagggttctgtttaggtttcagttcacgttgagaaagtaaagtcatgatcagaattctattggctgacttgagagtgagcagcttaatctctcctaaaaggaaagtcgtctatacagaaaagagcataactagctaggtgtatagggatcttaagcacagctgaaaggaaataagaaaatcaatttttatgtcaaaaggataaattatatatattgatatttataatccaaccaaaaaaaaaaaaaaagagttgtgggttgtggaactggcattgaatgtgacacttcggcccaattaataatgttatttaatacaaccatcacattggggatttattcttgatcttgatctgtcattttgacaactatgtgtatgagtttttgtaagaagagagatattcatagagattgaaagactagagatggtaacatgtagcaaaggagagaggatgattagggtggggccaggattgtactactgcaactgatcagtagtaacgcggctctaagaagaactacattgttttattcaatgtgtttgatggcatttgattttgctgttattattattattattagaaattagaaatatattgttttgttttgtttgttttaaaatggagaaagaaaaggaaagggaaatatagattgaaaaattaaaacaaagaaaaggg

SEQ ID NO: 187710 - DNA, 4210 bp, Cannabis indica
gagagagagagagatgagtaatgtgtgatgtgagtgttaatacgtgtgagctaaagagagacagatagctcacattttttgtactcatatggggggttgagctaatataagtaaataacaaactataagcaattttaaatagaagagataggtttctttgatcaactcaatggaaccaaagaaaggaaccatggaaaacaatgagaaagctatccacacaacaggtgagtctgaggttcactacaactacaagggactccaaaccatgccactaatcataggtaataaacacagaaccttcttcttccttgttcctttttctttttcttaacttcatcttcttctggttttaattagtgtgaaacaatattattacatcaatttaaaaaccatatattatgtacagggaatgaagcctttgagaagctagggacaattgggacttcacacaatctcttggtgtatctcacaactgtattcaacatgaaaagtatcactgctacaactcttgtccaagttttccatggcacaaccaacttagcttctctacccggagcttttttatgtgatacttactttggtcgttacaagactataggctttgcttcagtctcttcctttctggtactaactaataatattaatactactattccttattacacaagttttacaaattcagtcaacataaacttttataatggcagggaatgttggttctcacactaacagcagcagtaactaatcttcatcctccacaatgtcactcagaggacagtgaaacatgttctggtccaacaacatggcaatttttgtttttactaagtgggcttggattaatggttgtaggagctggtggtattagaccatgtaacttggcctttggagctgaccaattcaatcccaatacagaatctgggaagagaggagctaacagtttcttcaattggtactacttcactttcacctttgccatgatggtttccttgacattcattgtgtatgtccaatctgatgtgagctggggttggggtctggccattccttgtttcctcatgctattatcttgcgtattcttcttcgctggttctaaaatttatgtcaaagtgaagcctgatggtagtccattgacgaatgctgtgagagtcattgtagctgcagtaagaaagaggcacttgaagttgactgagcagccatggatgtcccttttcaatcatgttcctaaatcttctgtcaactctaaacttcatcatactgatcagttcaggttagagaaacttaaataattaatacaatttcctttgggaggaatttgatgaaagtagaaagatctaaacatgccaaacttagaaaagtcaacgtacttaagtacttagcataaagccaataatgatcttttgtactgtgagatggtaaatgcttgatgtgttaaccaaaatgcaacatgttgttttccagatgcttagacaaagctgcaataatggagccagaagatacaatcaattcagatggatcagctgctaatccttggagattatgcagtatgcaacaaattgaggaggtcaaatgtttgttgagagttattcccatatgggcctcatgcattatttactatgttgctaccaatcaacaacaaacttatgttgtctttcaagcccttcaatccaatagacgtcttggcaacactaacttcaaaatcccagctgcctcttactcagttttcaccatgattgcccttgcaaccttaataccgatctatgatcggctcatagtccctactttaaggcgaatcactggaaaagaaggtggcataacaatgctccaaagaattggctttggcttggttcttgccataataaccatgattatatcagccatagttgaagaaaagagaagaactttagctctcactaacccaatacaaatagaaccaagaagaggggcaatttcttccctttctgccttttggttggtccctcagttaactttaataggattctccgaagcctttactatcatcggtcaagttgaattctactacaagcagttcccagagaacatgagaagcattggtggttctttcttgtttattggatttgcagcgtccagttacttgagtggttttttgctgtcacttgttcaccatttgacttctggttctaaaatgggaaattggttacctgaagaccttaacaagggaagattggattatttttactacttggttgctgcaatgggagtcataaattttggttgtttcttggtgtgtgcaaactggtataagtcaaagaaaactccaccactgcccttgaagttgatatgaaagatatgcaatctgaaaaggactttgtatgaaataccatctgaaatttctctgttatcccatgacacttccaacttgtgaacaggttaacaacgttactacactacatggcatttccaaacatgttagtaacgtttctaacctgataatacaagttaagattcatagcacaagtactcaaaatttggtgccattgtttggttgtggtctaagaatgtataacagaaactgtataggttattactatacagactcctattacttaaagtttagatttctttgtcaatctaaagaacagtgtatataactgaacaagagtatgtgtcttcttatttttgaactctgttgtgttctacttttggggcattgttttatctgaaatataattttaacaagtttcatgcttgtagagaaatatatatgatctttagctagtcttcgatatagagagatgttataatccagccacttaaagttacaatacattctgggaactaaccatgaccataatattggttagacttagatgtgaacatttgaatatgaaaaatacttgttatcactattgaattcgtagcaggatccatgtcgttgataaatattcaagaacagtaataagagaggcactaaaatacctttataataatagtttaagcagtaattgtacgtaattaattatatgtaaagcgtgaaccatatatgatcaatgtaaaatgtggaataaaactgtaaatcgaacgtacatgaagattggaccgaaatactttcaactgttaattttttgagcttcgatcccacaagttttggatctacaaatgaaaaccaaaactaacattagtgttggtattcggacttccaagccctctctaactcttttagacaaaattattatttttcacaaaatatgtagtgagcttagacattggtacccttcatttataggtgagatatccattagtatttgtgccacaataattgttaaaatattttgacaattacttcaaaaaaataaaattgtgtaatagaatattaggtaatacaaaatttaatcacaaatagaatattttaaattacttatcaaataaataattacatattttataaatcacatcaaatttgaaatttgacttactgaatataaaatattctaatatattctccaacttggataacatttaaatttactatttaagtctaacaattatccttattaaatagtaaacatatgaatcatggcaataggtcctcattatatgatgagtattactttttatgtattacgatatatttattatataacatgtacttaatgtgacaatatatttaagcaaataaatcatatatatgcttattctggtcctatgaagataattttctcatatgaaattaaggtgcacataaatatagcaaaatatcgaaataatagtttcattaaataattttagttgtacaacaaaaactgaatcccatgtttattttatgattcttgaatttattttgcaactgcaatcattcaatttagtgttgtgtgcttaatgaccactcacacttatttatggctaatacttaatgttgatatgctagctttgaccagaactattatagttcttgagccataaatactaaagctggatttatcacacaaattttgttggaccacattgcactcacactatcacatgtttgatgaagaatttgtgtacaaggatctcttcaaaacacaagagatcagaatacaaaagcaaccatatccaaaagttcagtttgaggtggagccagcagaataagattagattagagaacaaattgaggaataagaagaagaacctgaggtacatgaagatgaaactgtttctgaaccagatgagcaagagcatgacactcaag

SEQ ID NO: 187711 - DNA, 3028 bp, Cannabis indica
ccccaaccatttctcagatctggtgcgtacatatgcctaatcgcatcgttaataacatcagtctcttctaccgtcgcagatccaaagtcttccagaaacctcttcaccgtcctccgcctcagctccttcgcatcgatctcagacacggccttcatagccttctgcgacgccgtgaacaggcagttcccgtcggaagagacctcaccaccgtgagagagcctaaaaaccaccgacctaggggaagaggaatcctcagtacaatcatcctgtggatgcttccacaggacacccttagcgtgaagcctctggagatggcgtctctgctggtcttcaaggccaagaacctcatcccaagcggtggaacagatagcagtaacagcctggtcgaccagatctactgcttcgagctgcggcggtgacggtagcggcggcgctgactttgggtcaaatgtgtccgcaacggtcgctgaatcacatagtaatttccccatttcccaacccaaaaaaataataaataataaaaatcaaatctttctttaaaaaaataagttaatttccctcttgtaagtcctttccttcgtcttctacttcttcttcttcttcttcttctttcttgttcttcgatggaagagttgcagaggagagagagagcacaatctaatctattgtattgttttagggcaagtccaactccaacggtaaaattttgattttgtgttacaactaacactaaaaaataattttatttagcactaaacttttctcctattctaaccactaacactaaaacgtaaaaaaataaataaataaaaagtatattctttattatatacaaattatattctttttttgtgagggaaaatattctttaaaaattacagataatatgtatacaaaatttacataaatacattattaaaatacttgaaattggaaacatttcaaaaaaattgtctgtctatagtgggacaccttggacaatttttttttttttgaaaataacatcggataaattaaagcaattagaccaattggtcattactaactagtctcttgatactagcccaaaggactttccttagatgattagccccctccctaaccaccacatcacaagtaagtttaatccagtccataggtggtggagcccacacagagacaacaggaggaggtcgtaaatgaggcaaaagagagtatcgtaatttgtataacaataagtaataaaatctatataataatcgatgctatacatataattattatgtaccttgtcatttctcgctctccatatagtgtcatttatgatagacgcatataagaacacatcatcaactttcacgtctctcatattcaaattctaaatgaattttacccaatcccgcattctagttcccgattcttgaacatgaatgagacaccaaagaaaatctctccatagatgagaggtcatgttgcaatgaagaaatagatgttacatagttccttcctctatcccacaaataggacaagaggaatcttcaatgttcattcgttctctaagcatgaatcggatggaaagaatgctctaccagagtactttcgtgtgttttgtcattccataacctgaatcaaaatgtagatagacatgtcaaaaaaaattatttagttggagctccgattttgcagatcacttctcatccgaaatatttggatcagatccaaaatattatttggatcagatccgatccggttttaatatattaaaaaaaccttaattcaagactcgaacccagaccagacccgcccgagatccaaacctaaacttgcttaagatccaaacccgaatctgaacctgaattcaagacccaaacctgggttctagacccaaacccaaacccggagccaggaccatacccgaacctggactcgaacccaaacttggacttgggacttggttcagggtcctaacccgagacccgaacccaggatcgaactcagactcgagactcgaacccggacctagatccaggactcgggacccacacccaaacccaaaccaagagccaggacccggactcagactcgcacccaaacacgggacccgagacttgaactcgagactcgaacccaaacttaggacccagactcgtgacccgaaccggacccaggacatagacccaatcccggacccgacccgtagttggtgttggggtcgagattattgaaaatatattataactttacacaatctattaatacaagtcaataccaaacatagtgttgtatcaaaaagtactaatataaaattgaataggtataaaattataagtttagatatataattaaaattctaaaaaaaaaaattgggtcggatcagatctgatccgaataagttaggttggatttgatttattttgagtatctaatctagcggggcagagggtgacagattcttacatgatctagatcagatccaactcgatccatttacactgtagatatatctagagctattagttgaattgtgctttaacttgattatgtttaacttttattatgagattttgtaaaaggtactcttagtgtttaatactctcatcggtgtcatactgctattagtgtaattaagcatcgagtcctatatatcttaagaaaataatttttagagaatattgataaccaatcgtggaacgctacctataaaatgtattggacaccactagtgcctaatagtaatgttctattggacttttattatatgatattctttcaagagaatcaaagtgctagagttattagttgaattgtgcttagacctgattatgttcaactttaaactagtctaataacaatcaataacactaatctttcaagaaaaaaaatataacaataatgacaattttggctagttttcaacattttgatatcgtgtatatatattagattaatattagggtaaatattattgtagtatgtcttttgtaaaagttactaattagattttctgttttgagaaaaaacaaaacagaccctgtattttttaaaatgg

SEQ ID NO: 187712 - DNA, 3242 bp, Cannabis indica
taatttgaatgcttgatttgattacggctaagaatttgagtgcaaacccatatgaaatttcgtgcttaatttggagaatttatatttcgtactttctataatcttttaagattttggttaatagtttgatttgtctttgatacagtctttgctggtaaaccacttgcctgtgaaaagcactgattttcttagagtccttagaagaagatgactgtgatcgatatcttgactagggtagatgtgatctgcaaaaagtacgacaaatatgatattgataagcagaaggatctcaatgtatctggtgatgatgcctttgctcgtctcttctctgttgttgaagatgatatcgaggctgctcttcaggtattctcagtcactttggatcaatcatttaattggagttcactttttgtttctcagaagaaataaaaaacaaaaaaaaagaaagaaagtggacactggaattcaaaccaagttcgttagtataggtgatttcattaattggtggaatttttagggcttttttagggttctactgatctaaagtggttgattttgtagaaagcggaggttgcagcgaaggagaagagtagggcgtctgcagtggccttgaatgcagaaattcgtcggactaaggctcggttgctcgaggaagtaccgaaattgcagagattagcttttaagaaggtcaatccttactcttctaatcttattattcattggtcttttgtgaaatttcaactcttgctggacaattatggaagatgtttcatattgtgaagttaggtatagggtgattgtacatgggaaaatgaataagtgtagtttgtactttgtttgtaacggtatacttcatttgtttgatgtactacaatactgcagattttctaattttggttgatgaatagagtaaaaaccatactatttatttcaggttaagggactatccactgaggagcttgccgctcgtaatgatttggtccttgcattgccagataggatccaagctataccggatgggactccagccccccagaaacaaactgggggctgggcgtcatcagcctctcgtactgaaatcaagtttgattcaggttttatgatcagctctgtcatctgtttgcattgtaatctttttgattgatgatactggttataaaatggatgatattactttgcttatgtgtttcacgtgagaaatgctaaaggtcaccaacggtgaggtgtcatattgcttttggtgtattcacgtatcacatcctatatattttaatttaataattattatgcaaaactgctgaccatttgtagggcgccacttcatggtggtgttgggcactggtatctaataacagtactagtttcacagggctatatgacttttctttgcttatgtgtttcacaattatgacagagggtcgatttgatgatgaatacttccagcagagtgaggagtcgagtcaattcagggaagagtatgaaatgcggaggacaagacaggtcaaataggatcactgtgtttgtatcttaagaaagtttgattacaatttagatgcatgatattttctttttgggcattctttggttttttatgctcttttttgacattcctacaggaccaaggtttggatatgatctcagaaggtttagatacgttgaaaaacatggctcacgatatgaatgaggttagttgtctctgcgtttgttttcttcttactcattacatattccacatttgaactcattaattattctttatgggatgaacaggagcttgataagcaagttcctttgatggatgagatcgacgaaaaggtgcgatatagtgtcatccacattcaatttttccataagctctgttggagatagacgtactaatttagtagatatcacctaatgcttcttacgtgtttacaggcggacaaggctacatctgatcttaagcatacaaatgtgagacttaagcacactgtcaaccaggtatgaagcagcagattcttacatctagtaaattttccaactataggtttctctcatgtcacatctaagatgacttctctgttcctaatcccagctacggtccagccggaatttctgtatcgacattattttgctgtgtataatactgggaattgccgcatatttgtacaagtaagcctgtaccttggtctgaatcatttacaaagtctatctttttttttttgaagaaaagcgtacatatattataatcaaaataaattagacttcacggtcattacgaaataagtgttccgggatacaaccgaacctcttatgggtaaacgcccacttagccacattatgtgccacaaaattacaattcctactaatattcgaaaaaatacaactaacaaacgaaggagaggatttgaaacaaaaagagacatagttctcaatctcccaacgggaaacctccctattaagagcgttgataaccactctcgaatcactctctacaataataaacttaaaaccttgattcttcgcgatatccaaagcaatgcaacaagccgccgcttctccacacagcgcatcggcaaactccaaataagaagtgtggagcattagattgagtttttattgaaaatgtgatgtttttgttaataaaatcctgtctagttagaggctacctgaagcaaacttgatgttcatgttgatgaatgatgaataataggtgtattgcttccattttttttcacttcatgcatgatttatattggtgcaagtgttttaaactgttcaaaaatgttgctgctgagaattaatacagaacaacaaccttattgaatactttcatgtacaaatgcaaaggtgtggcttattcaaacaatttgctgtacaatatacactccatctagatctctgtttcatttctcaaatgttttggatgttgaaatcttatttatgtttattggtctattattccgatacgagatattctgatgcatattgtctttcgtatggcagtgcactgaaaaagtgagatgagctgaagtttcacattttcgaagtgttggtggcttgtggtaattttttccttatcaagaagcagaagagtttatggtatttgagttgtgtattatttggttatttatgacttcctttctaaagagtctgtgctcttcaagcttggtgcctttgatgttgtacgctttgatcaacatgcatttctgtataaatgtcttttcacaatgtttttatctgcccattagagctgagctgtt

SEQ ID NO: 187713 - DNA, 1381 bp, Cannabis indica
agacaaataaacaaatcctaataatagttttatactttggcttcagtggtaaaggcatgtagtggctttgtgaatatactttaaccactcatttagaaatacttcttttcgtggtgctttatatttggtttgtggtttcgtttgtttggtctatgagaatctcatctctcacatgtacttcagttttttagcattactaagaaataagaacaatattttgttctatagatggcaatagaattggaggcgattttggatcatggagcagcaattcctggtgccatctgtgtaactgcttctgtttcgttccttgacaaagtcatttgtccgatatataagataatggcattggtaagaggctatatagattcaagtatcttttcgttacttgtgtattcttgatattacttttgtctaactgtacagtgtatgaaatcattattttttcaaaattattccattatcaattcaaacatacaatactacctagctgtttgatgttatatgtttttatttgcatattttcatttgttaccaagttactgtttcagtaatttcttcttcatttttacttcggtgaaccacaggaagctaaaagaaacaataatgggaaagttgcacattctgcgtggcggaattatgatgacttcaatgaatatttttggtcttctctctcttctaattctgatttccaatgtatgtttaggtcccctgctttgtctcactctctttcctaattctgatttgcaacgtatgtttaggtcccctgcttgctttgagttaagctggcctatgaagagagaatcacccttctttttggagcccaagaaaaaaggaaatagggtttgttattctttgccatgttgctcgagttttccttcattctatgtttatagcttgtgcttggtcagatgtgccatttgttgactttcagaatatattgttagagaaatgcttaagggcatttatagtgggtgcttagcaccttatgaggggtaatatagtgcaattcaatattaaatttcatttattgacttttagaatataggagttttgtttttttctttttttacattttaaaaagtttttgtatatagtatatgtttttacagaaatccacataacaacttaaattacaactaacaaaacaacttaaatcgcaactaaaattcatatagtaacccataaaaaattacaagaaaaactcaaactgtaaataaaaaaaaaagaagttgaaaaattgtagatgagtaattctagaatatattataaagaattgttaactaattataagacatgatcatgtcataaagttaattttaggtacttttgatacccataacaatcttattgttaagataataacgggtgcctttgttct

SEQ ID NO: 187714 - DNA, 2652 bp, Cannabis indica
taataaaagaaaatattttgcaataagaagaagcaaaatggagaaaaaattgtagaggagcgcgaatggaactgtgaaaaagtgtcagactttttattttccctttttctttgtttgatttacgaaagagaatcgaagaagaaggagatgaagaaatcgggaggtgcagagaagaagagggtgcggaggtcttcggcggctgtccaaaatggtggcagagatccaaactctgacacccctcctagggtttgttcttcatttcatatcttctgatctagggtttcacctacattgataagccatttcaatttggtttttgtattgaatttcgtacccaattactcattactttgattttcgttcggttattcgatcaaaattctaagcataaaaagaaattcgggtttttacccaatgctgttatgttcttccggtgtttgactaattgctcaatttattggatttattcaattcgaacagaaacaagctgcaaagaaggatgtgtatcaattgttcgcggagaaagtgagggaccataaggatttggtatctagatgggctgttttacaggagacccgagtggaatattttagaggaaaagattttggtgggtttttgaggaatcatcctgagctgaaagatattctggaatcagataagaatgccgagcctgaagatattggcaatgctttattgagaaagaatcttcttgtgcgttgtgatcgagtcgtcaaaactcttcgacctggcaagaaaaaattgtctacctggcctgcccacttggagatcttccctgtaagtttagagtttttctttttttgaaagaaattattttgaggataagatattgtgttcccttgcttctgttgaaatgatcacgcttgccttcgttagggtggaaagtgattgttttcttttttaacgcatgtcatttgattcttgtgtagagtattcggttgcatgcacaaacttattgggtaaatagttcccatgggtttgtctatgttattggcagctgtaattagaagtatgcaaatcctaaacacccacagcaaagttattaatgttgcaatcatcctttgcaggatcaagttttttctgaaaatgatgctttcttcgcttggacattcgttaaaaggcggcctctttggcagacactgctctcgtttttctggcctgtgttgactctggcaatttgcttgtttcctatatatccccatcggtgcaagttaataatactatactcatgtgcagggcttcttctgcttttcatgtcactgctcttttgtaagttttctatgactgactgctagtgactttgtttatatcctccatttatgtgtgaccctacttccttagaccttcctttgctagcaagtaggttcaaaatcgaatttcattctctattgatttatgtcttttggagaatggtcataatcttaagtcatggctgttcatagcaatctatgttttctttactactaatagttttaactcagcaatgtttagttgcatatacaaacgatgaggtttattggcatacatggttgtgttttcttttacccttctatatgtattatttttcttaagaggctgacagaaagtctgttactaaattgtagtgagggctacagcatttggtcttttgtatattgttattggaaaacgtgtttggttcttccccaacattcttgccgaggaagcgacattgcgagaattattccgtttctgtcctaagaaagatgaggaggaacgaccaaagtggacaacaaggcttttctacgctctagtaggggttcttgtcatattactgctgaggcaccatgcacctgatgaggctgctagggccaggtcagttttactccttacatgttaaactaattttcatttctgattctactcaaggaagttctcaccattgtttcatgtcatactagagtagacaattatggaaaagtaaaaataggacgatgatcatttattgttatttttttttcttacttttctaagttttgattcattttgcagatatcaaaaaagagtgtcaaacataattgatgatgttcttgagtggtctccaacgttggctctatctgggatgatggataagcagccaagtatggttaacaacactgagcctgatagtagttttgcagataagagccaaacaaacccggaaggggagggccccgttgatgatgaaacgggtgtcgttggctcagcctctaagcaacacgacgcagaagttaatgataacaaagaggacacagaacaacgtaaacatcacgatgatatttgattatagactttcaaccttagcagactatagacctcattttctgccttaaatattgagtgtaaacaatgtagcagacgatgaaaataatccagttcattataaattcgtgtttctttttatttgtttaaaatacaaatctatggattatttttcccgagaagaattcatgtatgtaagacaatttcagagcttttatagtgaggctttaaaaagccaataatcttccccgatcttttgactaaacagaacacgttgtttcaatgtgtagtttattttgtaaataaagcactatgtataaattatatctagaggacttgagaggactacaagtattaattagggaaatttttata

SEQ ID NO: 187715 - DNA, 1764 bp, Cannabis indica
catttcattgctattttttttttattttcacatgagagctaggaggaaggggtggtttttttttttctttccaaaagagcttttgtttgttgtaaggctttatttggcttaactgtctcctaatacatatgctgcaatgtaggttccgttgttaactttcttaaattctcttaatttttatattctctgagctgttgttaattttcttaaattttcgtcctcatcacactattgatgatttatttaattatttttggcaaacaaattttacaggaactgatgatgatcttcctccatcacatcaaaacagaatccctagagcaggtcgtgttgcagggaatggaagatctgctatgggctctcttccatactctaggatgtatggtgaaactgacatggaggctcagattcaccagcttgagcaagaagcatacagttcggttctaagagcctttaaagctcaagctgatctcattacttgggtacattttgtcattttgttgtcatggatctaatatttatgtttttcttatcaggtttaaatgactgctacatgaaatgtattttcttcaggaaaaagaaagtttaataactgagctaagaaaagagttgagattatctaatgaggaacacagagagcttttaggacgagttaatgcagatgacatcataaagagaataaggtctgaaagacttcagaaaagttctttttgtttaaatgagaaactaggactatttattatgtttttttccctcttcgtatcttaatatatatatttttttgatacatcttatcttaatatttggtatggtgtgtttccattagggagtggagacaggcaggtggagctcaagctggtatgcccagtacaagtcaagcagctcatgatccaatacctagccccacagtctctgcatctcgcaagaagccaaaagtctctcagtcagtagcctcccaatcctttgggggggccatctccatcatttcacccacaggcagctggatcccaccaaccatcttcatccactgcaaaacgaggatctgttccaggagccaagggaaagaaacagaaacctgtgagtcttaagatttttatgatattgatgttgggcgtaaccatggttctattttggaaaattttgtgttatgacagttttctttaaaatgctttttttttttgtatcagggattgcctggtggttcatcaatgaagcaatacccttcttctggtccgactggaaggggtcaagttgttaatagagttgcttctggtaacattgcaagtgaacatgctgaaggggcggcaatagattcattaatagggaagaaagtgagaacaaggtggcctgatgataacaacttttatgaagctgttataactgactttaatgctgccgaggtactttttgttatggcattttcttggacaacagtaagtagaaaagatatgcatttgatgtctattgtgttttatttttttgaatttgtcagggaaggcatgctttagtttatgatatgggttctaataatgagacatgggagtgggttgatctgtcagaggtaaaattaaaaccgtatcttgttggcttttctttttgtatcaaatttcaatattttcatactttttattttcttaacattacatcagcaacaatttaactactgaagatgtaaatggttgtgggtatagtgttccaagacaagagaactaatttactattgttcatcactcacacacatatacacacacagatatatatata

SEQ ID NO: 187716 - DNA, 3716 bp, Cannabis indica
gtttgcagtgcaaattatgaaataaatgttgagtagatgatgaagtgagatcatttacttactcttagttttcttgaattcttacaaaagctctttattattgcctttgagatactactaggatctttaccaattttcttcagaatattcctaacccgttgctcaatagcaagaaaatcagcctcagccttagctaggtagatattctgtaaattcacataacatctgcacagatttaattcaggtttagttaatgtacagtgtatcatatccaataatactcaagtagagagatggaatagcatcaaaatatgaagtatatagattggagataatttaggcaactaactcagttgaggatgtcatatctggtattgatccctccaggggagcctcaccaccaccttcattttttatgaattcctgagaaaagaaataaaagacacttcaaatctcataactttaagagtcccataagagatacaaaaagataattaataaacttttaggactttaaataaaaaaatcaactttgtcgggccctagatacaaagataattacaactatttcaaaacccaagccctgccttttgcagaataaagacttattaagaattccatcaacgaggtgattcaagaaaaaattataataacaatagcaccaaggaaaagagagaagggaaatataagaggggaggatcacagtgaagtcttgaaaatagtattaagtagtgaataaacaagaaataatcatgcactgcttgaattttatcacactaaatgtgaagcacacaactgaaggatgtcacacaaaatattagtttaaccaaccttcaatgctgccaccattacccaaaagtctgacgaattaatattaacttcagcagacttatcatcaattatctgtcgtaaatctgaacctgggatgtaaaagtaaatttagccacctaaataacaaaattggttttggattataacttattgtggtcgacaaattagaaatgaaaaatcaagaaaatgttttccaggtccacataacaacttgagaaacatgaagaaacctaggaacaaaaagtggagaagaccctcgtcatgcttttttgaaaaaaaaaataaggaaaaagaaaaataagtttggaccttgtaagttaaataatgaataagcatatgctttttaacctctaatttcgtattgtatataattaacggcatatggaattccatactatgctaatatacattttcctaatcatatcctcatggagtgcaatattattacccagcatgacatatgaaacgagtttatatgtaaattagactaaaaatgacaatcaggatcaaaaattaaaactcactaattcctcgcggagcaaaaactttaaaggaggcctcgatagcctccttgtagttatcttcatctgctgcagtcattttagctttgagaagctcctaaaacatttggtagctgaaataaattatactgtgaagcaattaaaagagcgccaagtaacagaatgtataaatcaagcagttaaaccttgaattcttttttctcttctctggttgaaggaagagaaccgccatgattattggcccactctagtgccattttcacgagaatgactacatacggtatgtgtttgtgaactacaggatccaacacatctagatcaatggattctgcaaacctagtataagtaaatttgcagtcagtatctaaaacaaggaataaattgcaattataaatgtatgtaactaaaaaatgtaatgcatacttccatgtacaagatataggcccaaaagcaacaaatagggatcacttggaaattattgttttggccatcaaaagaaacaaaaattaaagagccaatccccaccccaccctaaaatgtcaggctcaagccatacctcttaagctcaggccatgggttatttaaccgaaggtcatctagaaaatgatcaggcttagattcaataatagtatgctcctgccagcaacataacaaacaataaagattgcatttcattatacttaaaacttggtatgctcatttcaacatcaagtaatattttccttttaatcattaaatctagaaaacatcaatgacaacaaagctctagataaaccttgttatgtcattgccatgttctgtggcactgagtgtgattatagaaaaagtgtttcaattcacttgttacaacagcaaaatacagaacaacctcaaatataactgtacaaattaccttcacactaattcgaactaaccccgttaggccataggagcgagcaaaaaccaacattacatttgcctcccgacaaattctatcaagctttatcatcgaatcctccactagctgaatgtaaagtaaaagaaactccgtaaaacacactaatgattagaaatttaacaatttgaaaccacaatttaaataagcatcctacatgagcactgagacacagcgagtgagatataaaaaaaatgtatattcttagagataagcttggccctatttcagatatatgtactcactattaatagcatgtaacaataaaaaacatcactccatacctgagtggccacaaccaaggtgaactgagaaaaaaaagatggattcgtctcaattagcgcctctggatactcttctataaacttggccttaacagcgtcattaagctcttgaagaaatgcacacacactttttgcctttgattgtccaacgcacgattcatcaactaacaagacccaactaaaatgaggacaaactcaacagtaaccaaatgcaacgacaccatgaaatacatacccataaagttatttccaaggtcaccaacttcaaccttagaaccatccactacagtgatgctaccaaccccaccaaggacaagatttttaaggtttaaaagccccgggggccacaattaagcagacatatactggctttctcaagagcagtctgcccctgttcaccccatattctgcaattttcaattttagatggaaaatttacataacggcaaaagatatagaatctcattttgcttaagaaaaaccaagcgtatcacacattgcagtatatacataaaataccacatctagagcttacgatcagatatacgtaatactaagtactaactccagtcaaacacaaaatctaactcgagataagatgttagtgacacagttacccaattataaagatatcaatatctattcctacagctataaaatacacacactaacaaagcaagcacaatacatacaaatgcttgcttaatcgttcttctcagtccacccctaacatgaaaaatccagatgacgcaggaagtttaagttaaaacaaattcgtgtcctccttatactacctagttctagggaaaactcaaacttaagattcctctaaacgtcaacaggaaaaccctaacaggcaatgaaatttgcttcggactcaaaatttcaagacaaaacttcaaattcccggaaatattaaaaaataaaaaatatgaaattcttggagagaaagaggaagtacgcaaagcccagtcaaaaataggaagaaaaatgctaatacacgctcaaaaaatacatcgctaaatacatgaagcttaagagcagaatttggagttaaaagaatgctatggagttgggggaaaattagttaaaattctgagagagagagagagagagagagagagagagagagagagagagagagga

SEQ ID NO: 187717 - DNA, 2205 bp, Cannabis indica
atgcataattgcgctttggaatgaaatcggattaaggtaaaaagtacccaataacaatcagatgctgtttacaaatgagaattaaacctaaaagtttaatggaaaaggacattgtagaaatgggttcaaatagaagtcagtgaagtgcgcagagtagaagtaacagtagaaacataagaatgtattcatttatgccaagattttacaaatatgggtcgaaatggaattatggaagataacaagattgattagaacaaaagtgaccgtagaaactagaaacatataaatatattgatgcatgtgcggatatggacaagcaaaagtacttttaatgtttgctgtaaaataagaaaagaactaataaaatattaacatcctacaaccaaaattggcaatatctaacgcagagaaatttgctgtgtgctaccaaagataacatgtatttgacactggttaatgtccaaacagaaaatcaataaaagtataaatctcctacatgccttataatggcagaaggaagaaccaacattgcagctgagaaatattcttctcatgctcatagaagagtcatccaatatgcaacttcatcgagtgtagaagtttaacagaaacaatcaatcttattttgcatttgaaatagcgcacacacacacacacattcacatacgtacagtatgtctgtaagtatgcatgaaaaattttgttttaggggaagaaggcgttcaaattgaaattagcaattattgtacagaatgagcacttagaaacatatatacatatatatagatacagacaaagcgctcttctgtgttaactgtctatgttaaatcaatactcttataacttacattgtaaagacattttgacgccttctaggtgttaacacacattatggttactagcaaaaataattgaaacaccgtaatgctaaactcatataaataaaataaaactaaaatgtaagacagatgtttaatccatataagggatatttttaactcaacatgtagtatgaatttcatcaagaacagattgatagcttaccagcaaatggagacagagtattctgcttgttgtatatgtgatgggtagcatgaagatatttgtagaggggttttatgtcgtgcaattctctgtgcatccaataaattccaaactccacaattacaagataagctgctaaataaatgaagtatccaagccaaccgatgtcatttattctcgagaaacacctagtccagccattttcaatcatgtactctgaaatggatggaagagcacaataccatggcatggccttcatggccacatatatttgcaagagcatggccttgttcgagggaatggcatctgcattgagaatgttatggaactcaacaccttcaggttgaaaattcttgtcatttgttcttaactaatgaacatacattacaaaacaaagcaagcaacgttgcaaattaaatgaacaatttccatccccaaggtaacaaagaaattgctgcatttaagtgactgttcagagacttattcatgcaagtgaataccagaaacaaagtacaagaacacttaatttatcttacctactgagaaatttgcaggcgtcccaacatgtcatgacattcctgagattaagttctacacttaaaattgctggtagtgttacactagacactatgatgtaataaatcaagagaaccccaggattaccaagtgcataatagaatttcccaaacatattttgtttcttttattattttattttatttttttggcaagaagatattttgtttcttagaacttaaaacacaattcacattcagtcaacgaaaatagaccagtcccatctttgaagtggtgtccaggaccaatctcatcctttataagattacagagacttttaaatactaaaccaaatttagcatgattatttctcaagtcagaacacggttcaaaaacaaggaaattagtatgtcaaatcagtctccggaacaagtagaaaattaaagtagacagcacaatcattcaataagaatttctgacacattaactgcagtgtcaaattacagatccgtgattgaccttcaatccgaaaaaagtaaataataataatataaaaagtgacgaaattaatgatcgtgtagttaaattttagtaatatagttttagtagagggatgacaaataatgaagacgaagatatacctct

SEQ ID NO: 187718 - DNA, 2062 bp, Cannabis indica
tttatgtatattttccttttgagaacaaaaatcttggcttgtcaaggttgaattttcactaaaaagatttggtagcattttttccctttccttgatgcagttctctgaagttaacaagcatctattctccaattgctagacaggacgtttgttgggacaaacttgaattccttgtgggaaaggttcttggttacatcagaaggtatcccattatgctaaatgatcaaaaacattaaaaaaatactggagtttctttccccaattctttctctatactaacttttactttcatatttcatgaaacccacaaaggggcagtaactattgattgagtttgtgaccttcaaactttaagttatatctgaggtcgtcatgtgatctgtataaatcataaattggagctatatatcattagctgaaatgaataatcccaaaccgaaaaaaattaatataaaatagatcagctgagctcagctgtaggaacaccagttttatcaatataaaattcaagtttgtttcagatttatactgtatatatgaaaactaccagttatttgaatggtctactgatttactttgcttacttggattatattgatgggaaatgtcccatctgctcatctatatttgcctttcagatgactctgtacgttgtcggcacacctcaagtcctctaggtaatggtgccattattgagacctctgacaagaagatacttgtgttgaaacgaagtaacaacgttggagaatttcctggacactttgcttttcccggtggccatccagaggtattaaatctgatatacatatattagtatagatatttttttcatatctttgtagtttgatgtttagtttctatcttcgatatatgtgggtgtggtttgatagattgcattcgtctgtatgttttggctgcatgtctatgcctggaattgtatccccagacagtctcaacactaattttcatatctgtaactttgtgaatagcatctataagctttctttcatcctttttccaacatattactaattgtgtttttcggaaataacacttgacagcctgaagaagttggaatagaatgtcatcagcgtgaaaagaagttaatggattctgacattatcaacaagaaggtttctcaggaaatgtttgacagcattattcgtgaagttgttgaagaaactggtgtacctacgacatccctggtaagttttagcctttttgtctaaaatgaaacatgcctttattttaattttcctttctttctagttttttgtctacaacctacattaattgtactttattgctaatagataattatttctgttgttgattttatttttatccttgagatggtaagagtttcttccagtgaaaattttcaccataataatactgtatatgtcccgacccatccaaaccctttttttccccattgtattgcttgtgtcatcaacatatctcatatcaatcttaatgtaaaacctttattttcaacaaatgattttgatagataaaacctttatttcatgaaatcattgtcacgtcttaactggttagcttagtggcaataaaaaataaatcttgctaatgtacacatcaaaaacattattttataatcacacctacacgattcgggacagtagattccttttatcagatgtactttttagggcaatgcttaattcaagtctaatcaggatgagccctattgacaaacatttcaaatgatgatattcaacaaaagaagtgataattattttaaatatgatgaaatttatgacggtcttttctcctagccaatgtaaacaagcagcatgacctagccactaggaggaatttcgcagccgtgtattacattagttcagtaatctgtactcatagataaattacttcgagtttgtattgatatctgcagatatgaaaaaatgggagtcaaatgacttttgataccagtaactaataatttacaaagtattgtaatcatgtcttatagtggactcttaggtatattttgctttcaataataagcctgtaattccaaaacaacaacaaacaaacc

SEQ ID NO: 187719 - DNA, 3106 bp, Cannabis indica
ttgatttttttttctttctttttggcatatgtgaagagtttggagaaaactttataaaaatcttttgggaaccataattaacacccaccacccacactggcttcttccttcaatctacattgtactaataataacaataataataatattgattattattattactatcattaatattatgatcaaggcctatcatttacagcaatggcagggctcattttcttcttcctttcactaaagctacggcaagacatcaagctaggaaggcagcattgtaaagacctcattggtttctcctcatgccttattataaggccttccccgtttggagtccattcgctactacacacagaattagccccggagacaaaaggcgtctcatggccagattttgatgctgcaggggtgtcatgacccgcggttggcttcactacaggggtctcatttgccgtgttgctcgcctcttcctctcgctccttcatgctctcttggaaaagttcaagcaatctctttttcttctctgttggtggtgtaggtgctggtgttaccgagccaggcattctgtcctcaaatggggtcttgttaactcgcgacgagcctggtgtgaaccctctatggaccggtgtgttgccccgagatggggtgaaatctacaataatgacacattcaaagttggtaattaaaagtaacaaaaaggaaaatcagatgcaaagtgagtgaatattaattctcctttatttgccaccatgccaagtttcaccttattcttttaaagtacttatttttagtgtttggaactattacaagaaaggcatagtgtggaaagacataaggaatgaaagacaagataatggctcttcaagaatgtgaatatattcttacttaccaccattgacactataaaaatcatcttcacaatcagattctaaccaaggctgagaatcaaaaaaggcttcatctttactacctgtaaagaagaacacaaagcataagatttcatttccaatatgaacacaagtgattatgaagcaaaaagggtacaaagcaatatcttaaaacatgacaattaacattattcaaatcaaaagtaattaagtaaaacacacgtgattaggacttatgctgccatttacttctatttaaaaatgaataaagacagaaccagtcagtgaaaagttcagttcattactaattaggaaaggttcatataaacaattaaaacatagtgtactacactatctgtgaactggaccctacttaaacatagccaaaagggtcccatctaccacttaatcttgaccatgatcctgaacaatcacaaagccatcatctacagcaagatgctttgccaaaacacagtgcaaaactaatggcccccacttgcaatacacctttcctaaattaaaggcatggaccaacattcaatactagacctccataataatctaggtgtgatgttgtctaccagtagtagtaccaaaatatctatgtcttcatggaaaggctaagaaagttgtttttacctatcttgccattcctaagaaagtcctgttaaaatctaggatataaaacattcattatcagacatgaggttaaaagggtattttccaagttggtctccactcaccatcatgtgcatataatctaactgttattatatttagtggacaaaccagaaccacttactctcttgcatagtgattatatcacatttggacatattttataaagaaagaatagtcaataaagatagttttttttaaaatataaatacatatattctgagcccatttgcagaaaatatacaatcactaattatattatactcaaagaattcttaaagcatttcaacaaatctcaatcattccaaattaagagagctaaattatattataatgtaaaacgagtctaacacaaaaactctattgttacaaaatatatcaaagcaaaggaggtagaaaatcattaagatttacttgaaaaaaagtcccttgagagcactagcacaccccataaaacataaaatttgttaaaacaaaaatataattagtacatacagattaaaatacttagtcaacccagaaaaaatattaatattaaaacaaattctgaaacatgcttgatcatgccccaatcacaaactctggaatacagtcacttgacagaaatataaactattaaattaaaagaagaaaaaaaacttcattgttgtagtaaccaagtatatgtatgtgatttattttatgagttgagaaaaaaaaataaaaacttgatcttttaagaccaactcaagaaaaggcagagaagacataaaatccaaaatcttttaacagtaaacaaaaaaaatgaaaaagaaagaaactttgtaaagttggagttgtatataccataatccccaaaagttttggaagaaggagaaggggaccaaggtttcaaggcaacatctttgatcctacagttcccaccagctggttttctttgaccggtgaaggtgggattccaagcttgtcgtttttggatccaaacgacagtctaagcttcatggctgtgtctgagcttctatgggttgatgatgcacaagcacccataaataaatctctctcttaactcaacaaaatgggtcttaacataactacccacccaggtagagaaaactattatttttgcagaagaagaaaaagaaaaagagagcgttttttggcttactctaaagaagtgagaataatgctttgagaaaagagagagaggccttgatagggaagttatggcacaacccaaataaccaatgtgctttgtcttgctatacaaactctgatattgttgagtttacagaattgggtgggtccctagaaatgtgaaaatcaatagagaaaaaaataaataataataggaaactattaaatgattaaggtaattttttatatagttggacattagagaaatatttttagtatttttttatttagtactttctagtttctagttatttaggatcataattatataatttgaatttttaatcgtgaattttgacatctactaaatcatggagtattgttattgggcactagtggtgcctagcaccctcaagatgtgttgccttacg

SEQ ID NO: 187720 - DNA, 3533 bp, Cannabis indica
taataagctcagcttggtcatccgaggacaaacaatcccgaactaagtcgttacaattaaaatcaataccattctccgtaccagagaaaatgccatggaagaattccatgaattcctgcccaattagctctcttttggtgacccacatattatctttgttgaggatgctctcaatggcatttcttctacctttgatggaggcggagaggaagaagaatttagagcatttttccccttccttcaaccaattgaccctagccctttatttccaatacacctctttccttactcgagcctcatttagaaaaattcgcaaggacctttcagtcgcccactctctagagcccacgggcaagttctgaatgagatctagtcttcgctccaaatcacggattagaaaatcaagctttccaaattgggacctattccaatgcataagagcgacccgagtagctccaatcttcttgaaaaccctagccggggcccaggggaacctgcccgacttccacgcagaatcaaccactaatctgctacgctcatccctcgtccaagcttcctcaaatttaaagcttcttctgattttctcccccagaccatcagaaaacaggcacagcggacggtggtccgagttggaggtctgaaacgagcagaggacagccttcggaaacagtctaccccaagcaccattaattaggcctttatccagcgcagacttaacatggttggacccagagcgatggttatcccaggtcaactcgtctccctggataggcataggaaaaagacccctgacattaaccaaccttgaaatgatcggaataaactggtctctgcctttggacctaactcgctcagactcacttagaacaaagttggtgtcacccaaaataagccacgggccaccaaacctatccccaagcttcataaagttctcccaaaaagattttttcgcatgaaaatatgggggaccataaacacaggacaagagccaaggatgcgattggggatccgaatacacaatgccagtgatgtggttttgggaacaagcaatacactcaaactcaaagccaattttccaagccaagataataccacccgcactaccaatagccggaacaataatgtgaaaataaaaatggagagagtgaagagtacgtaccaaaggagtagcatccactttgagctcggtcagaaaaataaagtctggagagcgcgaccgaatcagggacttcaactcacgaactgtagaggtctgccctaaccctctacagttccaagcaatacctctcatggctcctgtggaggagtagcagtctcgtccacaggggtatgagattggacagacccaaaagaaccagattcctcgaccacgaaagtgccttccattggcctagatgagatcacattcttgcctttaatactccacttatccgagccgattaaatcactattggacaaagagaaatcctccgagggctcgtcctccgcaaccttagtagcaatagctctgtcctccgagtcccaagggaaatcacgaatagcccagggatgagggcgaagaagcttccaaggtcttgaataaagggatgcagaggccccatcaaacttccggtttttgaacggagtagttctttcgttagtctcagaagttggtgaaaccccaatgtcacctccaatagcttttatctcatataaatccaaactaccaaagttcttaagctcttgtaagagagtatcttgagcttgaaaaaaattagacaaagctaacttttcatcatggtgaaatttaacctcttgaccacaagtagagctcccattggaaatagccttggcaggcccatcacccaaaataccaataatagtattattagtattactttcaacaagtccctttccttttactttagctatcggcccaatggaagcaagagggcccacgaccttaccactttctttcacgccctgcttatccatcaaaggagcggaggccccacaagctgaaggagataaatcaattatctcgtttggcccatttctcttacacaggtcactagtttctttaataacatggatttttaaaagcaattggacccggcccaaaagaggaaagagccggcccaatatcaaccccatgaagcccatctctatgacccagcacattaaccaaagtcaaatgttggtcagcaaaattcaaattaaaattaggatcggacagagacccctttttcaactcatcttctccaacatcacccttattacccaaaatagcaaaaccaggcgtgcttatgacagaaggtcgtttggggacccacgccgtgtgatgagccagctttcccctggcaaacttttgatccgtcgccgtcccagtacgcctcgaggctcgcaccaccaagttcggtcgagtcgagctcctcccaaggtcgttcctcacaggcttcgaaggcaccacctgaatctcatcgagcccaggccgaggagatatagtcaaggaaggaacgaaagaattcgcaccggagaagacatcaagatatgaagaggcagtggagagccacgacccaaacatagggaaaggaactccattatccttgaccacagtgaccggagaggagagggaacaaccccgtctttggtggcccaatcttccacagttatagcaaaaaatactaattctttcatatttaaattgaagccaacggtggccacccgattcgaaatcgaaaaaacaaccagagaacaggggttgtttcacatccagttcaacaattctaaggaacttactccacaaatccggtttaccttcatcgagctccacatcgatgaccttgccggctttccctcccaatatattaccattggtaacagaaaaataatcccgggggaggttgtgaatttgtatccagatcttcatcaagtcaagattaagcatgagggacttcctaggtgtccaaacatgaagagacaaggaatagccgcggacacgccacagaccattagcaagagcccaagcacggtcctctgcacgatcaaaacccagctcaaaacaatttgggttgttggtggagtcttgcatagcagccacattcaccttgaacttccaagttttatccacaaaatccataactgaagcttcattgacagacataggagcaataactcttccaacaaggcaaaatgaagataaagcctgttgggaagaggcacacggagcaagttttatagtagtttccaaacgagaaaaacacttaccattatcatttatggcagggttggtggcatttactatcgccattacagaaagcaagagacaaaccacttaacactaacagaaaacaacccccacgacccaccaaacaaacaacgcaccaccccataaaatccacaaagaccccacgaaggtgacaaaacaaaagacaaaaagactttagactggagacaatcggaacaaaccaggaggaactacacagaaaaactcgaacgaagtcaaagaaaacacataacaaatgacccaggtctcactcactctctctctctct

SEQ ID NO: 187721 - DNA, 2258 bp, Cannabis indica
acatgtccatgagcgacttcctctcaactcttatttattcagataatgacaatatcttacgtaatacttttcttctttaattgtttcttttctcagagggggcatttatcttctgttgcttgtattatttcacaatgtttactatattaatacaagttgaggtgttgtttcaaatttatagtagtattagtaacaatgctgaaagtactattactgtattttgtgctttaatttcttatgtttattgttaccatggttttcctctgtgataagtgaggctccttaataaacttgggaggtcagtttaagacaagtgacatatgtctctttttcaaaaaatgaaaaaaaatagtagcaatatgtgtttgtcaaacaaatgaaccaagttgggaaattctttagtagactttaggtgagcagagaatacaaactattattcttctttggttcattggttttcaattttttaattttattggaaacacactcaaaaagatatgtttcaagtcttatatgagaggaaagagattcatatcccaaaatacttataaaaaaaatcaaaatatggatcttaagtatttagttttctcctatctttttatggcttaagtcttttcacctttccatttggtcattttttgatgtgtttgatctgttttaaccttcatttttagcagaaattatgaagtaagttaaagtactgagcaatatgcttgagatcctaccaaggattgttggatatacttttttgagctgaccaagggtttatagggttggtgcaacggcccattatgatataatcaatgttcagcttgaataatgtttattagcttatatatgtaatattttttttaagatttcatacatttgcttgtatttaattttaggaatatttcttattatcgttgttgagattatttttgttatttatcattttatactgttaacattttattgtgtttttgcagaagagagctggctaaggaagtagttgatctcttgaccactgctgcagatggtgctaaatccttgattgatgctagtgataggcttatattatatgttgaattagctcgtttatatggtactcttggttatgagcgtaaggcggcattcttttcaaggcaggtagctcagttatatttgcaacaagaaaataggttggctgctattagcgctatgcatgttttggcattgacaacaaaagcatatcgtgttcagagtacagcatctgtttcaaaagtgagtatataaatattaactaggagatggttttattttttggggatcttatgtcttaagcaccagtaattgcttatacgatccaattgacatgaggagatggtctaatttgattattggtggactctcatgtttcttatagttatcttagagatcttttatcagtatctgccatttatttaacattcttttatttcacggaccagatcctcttgttttgttgaacatatcatgtgaatatgctgttaacaagtttatttgcctttatcttacttggaactttacagaacgagactggatcaggtcttgctgataacacaaaaatgctgcaccagtccgtagtctctcttttcgagtctcagtggagtaccctgcaaatggttgtgctgagagagattctgctatctgctctccgtgctggagatcctcttgctgcctggagtgcagctgcacggttacttaggtcatattatcctttaattacacctgcagggcaaaatggcctcgccagtgcactttcaaattcagccgataggctgccttctggaacacgctctgctgatcctgctctaccctttgttaggtaagtatatgatatctttattaggctatttcaacaatatatttttttgtgctgtacatgtacagatacagaatgcataatgttcaagcaaagtagtgccttttttactcttgtgtattgtgaattgctgaactgatagacagattgaagcttaagttaaagctttccatgctttgtaaaataaaaagatttcatggtgtttatcttgcactgataatacattttgatttattttcttgattgttgatttttataattcaggatcacactaattgataccaactttcatgtgaatatttccttcactatattgaactctcaacggttgcttttgcttgattcacttgtgcacattactaaatgtaggttattattagagatggtactcttaaataagatagtatgacataaatgccgatagcattgtgttctt

SEQ ID NO: 187722 - DNA, 4234 bp, Cannabis indica
tttacctttgtggttcaagttgtaaataaaaggtataactaatgcatgtgtgaagcttcatttatgttataatttaactctattgagtttttcttttgggtcaaggcaccatttttttatgcatgaaactatggtactggcttttttaatcaactgatataaaaatagtgtttaagaacttttctcttcttttttttttttttttcaaacaccagtcagctatgctttgcagaagcttcaacacggcgtccagctgatctgttatcttcttttagtacaattaaggcacacatgaataccttatatgatggcctaacagatgttcttatgttactccttaagaatcaagacacacggcggcatgttcttgaattttttgcagaggttatcaataaaaattcttcgagggctcatatacaggtaccttttttgcctttatgcaatctccttttgagttgcagttgcaatttaagtagtcagtcaaggagatagataaaaataatgaagtattttaggcaagaaattgatgcaagaccttcaatgccacctctttcttcagttacagttgcaatttacttcgtcaacaaataccactaaccatccagggaaaaggaggatattttagtaaattgcctctaccttcttttccttatcaaagaactcaatttagaagtagtttatttcagtacatatatacatacacacacatatacataatacggttgtcacttgcactgttacatttcactatacataatattttttgcaggtggatgcaatgtcttgtgcaagttcaggcatgtttgttaatcttagcattgtaatgctcagactttgtgatccatttttagatgcaaatctgacaaaaatggataaaattgatccaaagtatgtattttacggtgaccgtttggatttaaggtaagaacttttgctttagtaataattttttaccgtgagtaatgaaatcttattgtagttctaattattggttgtgaacctgtatgtttgtggtagagggttgactgctctacatgcatcatcagaagaagtggctgaatggacaaataatagccaggggcagagtgatggtgaggatcgattactgcagtcgcaagaagccaccagttcaggcagtaattcttttggaccttctgtcacaaagtcatcaagtgctggtgaaaaaaataagtatacatttatatgcgaatgcttcttcatgactgctagggtgctcaatttgggcttgttaaaagcattttctgactttaagcatttggttcaggtataacatggtattttggtttcatcaaatttattttgaaatagttagttcttatgagttgtgattatggtttggttgaaacatgaaattaaattatttcattccaggacatctcaaggtgtgaagatcatctcaacactctcaaagctatgacgccttctcctcagcttaagcttgaaataactcgtcttgagaaagaagtagagttgttttcgcaagaaaagctttgctatgaagctcaaatattaagggtagggaagacttcttattttgtctctaactctatccgagtgtgtgcttgatggccaaaattttaaattgtttttatcatatagacttcagtttgtctctctcatcatgtctttattagtttttgctagttgataataaactaatgacttgtatccaattcaattttttttgcttatcttgttttccactgtaggatggaacgcttatacaaagtgccctttctttctaccggttaatggtggtttggttggtaaacctggttggtggatttaaaatgcctttgccatcaacctgccctaccgaatttgcgtgtatgccagagcactttgtggaagatgcaatggaattgctcatatttgcttcccgaattccaaaagctttggatggggtcttgctggtagactctttgttgatatcttctgtcctggattcatgcttttcccccttatatgcagttttttttatagtgtgtatgtttttcttgttaggatgattttatgaactttatcatcatgttcatggccacaccaaactatataagaaacccttatctaagagcaaagatggttgaagtcctgaactgctggatgccccgtagaaggtgctttcttgtctctgcttagttgtaaataggtttgggttaatgtactcgataaattgtttaaaataggtttaggcaagtgtatcgaaaaatgttatagctgaaagctaggtactcagatttttcttgtgttgtatttgcagtagttcatcagctactgctagcctatttgaaggtcatccgctatctctggaatatcttgtgaagaatctgttgaagctttatgttgacattgagttcactggttcccatactcaggtaaaatacactcaatcttatataataaaatcatgttacttcatcttctttatccttatgtggcttaaaaataatgcttgtttggttggtctcttttactgtgcagttttatgataagttcaacattcgtcataacatttccgaacttcttgaatacctttggcaagtccctagtcatcgtaatgcttggagaagggtaaggacacctcacttcccctacacttaatgaaatctaagttcattgcatttctaactgcttacataaatcttcatgctgtttcagattgctaaggaagaagagaagggtgtctacctgaacttcttaaacttcttgatcaatgacagcatctatcttcttgatgaaagtctgaataagattcttgaacttaaggagctggaagctgagatggctaacactgttgaatgggagagaagaacggaccaagataggcaggaaagaacccgactattccattcccaagaaaatgtaagtgtgatctctcttcaatgaactcccaatgctttgccccactttttaacaatttttctcccttccacatttaatgggagtcgtgtcaaatgtacattattggtcttttacagattatacgcattgacatgaaattggcaaacgaagacgttagtatgttggcatatacttcagaacagattactgctcctttcctacttcctgaaatggtaatagttttctcattttattcaacacatttaatttatggtcagattgtgtgttactgcttgtttctaattctgtctcgtcaattttaaacaaattgttgtttcatcttttccaggttgaaagagtagcaagtatgctcaattattttctgttgcaacttgtgggtccacaaagaaaatcacttaccttgaaagacccagaaaaatatgaatttcggccaaagcagttgctgaagcaggtttgtatcaactagtatccaatattcactattaaactaatttgctgccattactttgtgttcaatcatgattttgtatgctctttgcatgcttaagttgtctttgaatttcggtaagcttgtttgtgaacggttggattctatacacattctagggatgactagagcttaagttgaacatatttttctcatgcatgaaaatcgccagctaacattttttctttttggctaatagattgtctgcatctatgttcacttggcaagggatgattccgaaaatatattccctgctgccatttcaaaggatggccgatcttacaatgaacaagtaagaccatccaagttttgaattttctctcttctgaatttatagagttgacaatctaatgatttgaaatttgcttcagttatttactgctgcagcagatgttctccgcagaattggtgaagaagggaaggtaatacaagcattcatcgagctaggtgccaaagccaaagttgcagcagctgaggcaagagatgctgaagctactcttggggagatacccgacgagttcctcgacccaattcaagtatgttttctctttttctgattcccccatttttggatatccatttgtgaaaacaccatacagaaatctgactagtgttgtgttttttttttcggttgttatggcagtacactttaatgaaagatccagtgatcttaccttcttccaaaaccacgatagaccgagcagtcattcagaggcatcttcttagtgatagtgtaagttttccaatgctgaacttaagaatttgaaaaaaactcattattctcttgtgctattctaatttatacatctaatgtgattttgcagtacccgatccattcaaccgatcccatctcacagtggacat

SEQ ID NO: 187723 - DNA, 1678 bp, Cannabis indica
ttttttttttctctttttttgtgatattgattatatgtatttacccagagcaatcaatttttcttattttgtttgtggttgggcagacccctttgctgatgctagtgctgatgactcgggtgctgggtctaaagagtacgtgcatgtgcgtgtccagcagcgtaatggtcggaagagtctaacaactgttcaaggtttgaagaaggactacagctataacaagatacttaaggaccttaagaaagagttctgctgtaatggtactgttgtccaggacccggagttaggccaggtacgtttctaacaccgagcaaattggatacatctttatggtccatgttcattgtataggttctgcttcaatatcgaaatttaaaataagatgaaataaaataggaaacaaggttttgttttgggttgtcctagaacctaaatacaatagaagctatgtgaaactttgaactttgtttttgatattttagtgttggaaacaaaccattgaattttcttgttgcatttgttcacaggtcattcagcttcagggtgaccagagaaagaatgtttctaccttccttgtgcaggtaatgataatgaaagtgcatgtctttagattaaaattcctctatatgtacctctgtgtatggcctatctcatcttattttttttcttctgaacaggctggcattgtgaagaaggagcatatcaagattcatggtttttaagtcagcaatagcaagttgctacatgtagtcttacaccacctgaagacacaatagtagccagtagtagtgttactgcctcaattataatctgttatctgaaaacaaaagattgtgtttgttagttcttctgctttatgtggaagggttatatgttactccaagacatagtttgttactgctaatcttgttatgaaaagttatctgaaaacgtgagattgtgattgttatttatatttattatgtgttactccaagacttagtttgttactgctaatcttatcatgaaaagttatctgaaaacgtgagattgtgattgattgttctttatatttatacttattatgtgctattccaatgaaaagtcatctgaaaacgtgagattgtgattgttagatcttctgccttatgctgaaggggtatttattacccgttttcaatacatatttattcatagctacttcattgatctgtacggttatttatattttagctggctgtaccttttatctcttctcattttattttttggctgagttagctggccgctctgtgttgaacatggctggccattttttatataaattataagactataaatgctaaatatgatacaaaatccaattaccgaacagtcaattaaaaacaaagtagataagggggtgttcataaaaattgatactgactagactgtaactaaatttttggttcaaattcatcattgaatttggtggtcgggtggtcggttctgttatagtttttttgacacggcagtgtttctatttttgaaaaaaaaaaatttgttaaattgaaaattcagcaaactaaaaaattgcaaaaaatctccaaaattgtacttttgattttgtactggtataatttttaaacggtcaataaaaaattggtgaaattgattataactaattgaatttcaccaaaccacttgaggctagttcaag

SEQ ID NO: 187724 - DNA, 736 bp, Cannabis indica
tattaaattttaaattgctaatcaattattaaatattgtagatatacttattctaaaatcaagactataaggttatggccccatttatgaagagaaaatataaaattaaagattatttcacacatttacaacattcccataaaataaaataacaagaaagaaaaaggttggagttggaatgagagttcacaaacaaaaaggtatataaggttgtctcttttgttctacaatgaaatataattataggaagaaacaaatgaaaagttagtataggtgatgacaaaggtaggcaaacagttgtgtttgtgcatttctacatttttaaggtaaatttctggatagttcaactaatactactaaagtctttgctttggtgtataatatctgacatcacgattcatgaatatgaaaaatatatcaaaattttagaccaaaactcaaaataaaatgacctataaaaggggaaagagttacaaagaaagacctattaacaagctcctctatgataaattaaggttatttggaacagtttttacaaaattgtaatatatacttacaaatttgtaaacgttttacaaaaaagttgtattgctagaaatttatacattttgtttagaataaataataaacttcaatacaatatatacttttttttttatgtaaaaataagtttttatatatacttctcaaatattatgttcatattaccaacatgtaaattttgaaaaaaaaaaat

SEQ ID NO: 187725 - DNA, 1343 bp, Cannabis indica
gaattgtttttctttttgttagcagtctgttacttgtctaattagcttaattctagtttcccaattgtatagtttcctataatagattccttgttgtgtatatttatttgtaaaacttttcaatgaaaattgcaattgatttttcaccaaacataatatggtattagagcatttagcttataaaatttgaattttgctacaaaattaggtttgttcttttggggtcttacataaacaaattttagggtttattttgaaaaccctatttgtgttggttttccattctcaccacccacaccaagagaatcccagctgcctatccacgtgctggcaaagtccagtggtctaactccttaggcgtaggccccaccacatgctctgccacttgtgcaggcccccgtcatttcctttgagtttcattcttacaaacgtactccccaggcgggatacttaatgtgttagctacaacactgcacgtatcgatacacattgcctagcccaccgacgatagtttttgttttgtttcttctccatcgtgattctggttgattagtgcttcgatttgaccacttagtttttgtacttgcgactgcttgtatttgccaaggtttgggctttcgactaattttgcctttccctcttcatcggtatacctagttggattttggttgtcacaatttgtttgttggcttgttgggattgttgtttccatacttagttgtcttgttggcaaggacataacaatgtttatgcgcaatagattgaggtggaaaaaaacactctattgcgtgtgcctcagaatggtggagagaggcggacgccttagccatgtgaggcggtctgaaatgttgtgattgaaaaaccagaatttggggctttttttagcccattttaattcagcaattaaagaaaagtccaataacatttaacttttaaaaaaggcccaataacaaacaacaaaatcccaataaaactcaaacaaaaggcttttttaaaaaaagaacacaatttaaaagaagaaaacaatattttctggagtttgaacttagaacagctgtggccccctcccccctagtcgcacaaactagagaataaaaaaagaaagaaaattattgctccttactgcttcctccttcctcctctttcctttaattattttaattaaatatttgtggcttacgcctcaatttatgcccagtgcgctttaaggcttacaccttgcctcacaaaaaaatgcctttaggcttaaattcacaattttaaacattgggcatagtatttgcaatttattctggaaaatttgttcttatttctatagacgaatatgtcaaattcttacagta

SEQ ID NO: 187726 - DNA, 3518 bp, Cannabis indica
aaataaaataaaaaaaaatgtttttaaatgtttaaaatactggctaatattttttaaaaataatttttatttttttaaaacaaacttcaatactttgagactccgatatgaacaagacccgaccaggacccacacctagacctgaattcggactccagtctcaggcctgggccccaacccaaacatgaaccccaaaccaggcatcggaccacgaagtcagacttggactcggacccaacctcgactcgaacatgtccccaaccctggactcggcggtggaattggacccagacccagaccccagacttggaacctcgaacccgagcattggcccacatcagaagaacgacctgcaatgagttgaaacattatgctcaagcgctagatcgtgttgatgaagtattggaagtaagccagttgcttgctcagagaacccgactcatggattaacccataatattcactgaagaagatgctaaaaccgtgtattttcccccaccatgatccattggtcatcaagacacccatagctaataaggtagtggcccatatcctagttgaaaacgggagctcggtgaacactttgttccaaaatacattcctttccatcgacctcacggaccaagacttagcccctagtgactcataactcaccgacttcaatggggactccctcatccccatgagaaaagtgtggcttcctaccacattgtgtcttgatactcccaaaagcacattcaaatattatacatttattgttgtagacttccctacatcttaggacgaccgacgttggtagattttggagctataaatttgatccaacacctatgcctcaagttccctactcactccgtggggtggggacagttcgaggagacaaaaaagaggccagaaagtgttacaatgtagccatcaaacagtcgatcctagtagtcaaccaagatagaaatagggatcaaccagtgtaaagaagagaagttagaccttcaagtagggtagaaaaagcactacaaccaatggaagaaacagaagaaatttaaattagtgaccaagatttgactaaaattatttgcatcgagaaaggcctttatcccaacgtcaaaaaagaaatcataagcaccatcaaagagtcggctgatgtctttgtgtcgtatcacaaggatatgatcgggatagacccaaaggaaatttgtcacgtgttaaatgtgaacaaagacatgcctgtggtacagcaaaagaggcgtcccttggaaccagtaaaggcacactaaagaaagaagtggaaaaatgttaacccacatcttcatctgcgatgtgtattagccaaaatggttggctaatccagtacttgttctgaagcccaacgagacttggcaagtctgcatagacttcaccgatttaaacaaggcatgtcccaaggaccattttcacctgacaaggattgaccagatggttgacgccacctctgaacaagagttatagtccttcatggattcttactctaggtataaccaaattaaaatgcatgtggtagactaagagtacacgagtttttgaacagttaaaggattgtattgttacctagtcatgccattcagattaaaaaatacaagagtaacctatcaacagttagtaaactgcatgttttgaaacctactgagaaaaagcatggaagtctacgtggattacatgttggtcaaatcgaaactgctaaagaatttggatgaactcaaggagtggttagcttgatacaaaaatacgagaaagcttaacccaaagaaatgtacatttagtgtcaaatcgggtatgtttctgggctttattgttagccaacgagggatagaggccaatcttgaaaaaagatagaagctttattagacatgccatctccaaagaagcataaggatgtggaaagtttgatagggaaagtaggaactttgagacgcttcatctccaaatcgactgataagtgcatcttattcttcaacattttgaggaaaagtcaaaaaattgagtggaccagcaagtgtgaagtagcattctagagcctaaaggatcacatgtctaaggctccaatcttgttcaagcctatacaaggggaagatttatacctctacttggcagtttcaaaacacgccatcagtacggcactggtccatgaggaagacaggacacgacatcatatttactatgttagtaagagaatgataggtaccgagatccaatacccgctgattgaaaagttggcctactattttcttgtctcatctcgaaaactatgcatgtaatttcaagccatacaataaaagtctttactaattgtggaaagtaacgaaacagagataaatgtagatgctacagaaataattgtacccacttggaaggtgtacgtagatggagcagggaatgaaaacaggtcaagagtgggaatagtgttaatatcacctgaaggactaacacatcaaagctccttacggttcaagtttaacacctctaacaatgaggttgattatgaactttacttgcaagattgaggctgtcaaaagctgtgggagcttccaatattgatatattcagtgatttccaattggttgttaatcaggtgttgggagaatatcataccagcagggaacgaatggcttcatatgtctcaacagtgcgagaaattactcaaggaaacaaaattgattagatcctgagagaaataaatgcccaggctgattgcctagaaaagttggcctaaaaataagaagtaaaagatttgagggtagtcccggcaactatctctcggagcctggcatcttggccaaggccaaggtcaaagctacccacgaggaacccacatggatggaccacatagtcaagtatcagacatctagagcactaactacagaaaaagccgcttccaaaaaatttcagtatcaagatccatgatacatcatgatggatgataagttataccgaagaggattatctatgtcatatcttaagtgcatagcaaggtccaagattggggtgattatgggtgaagttcatgaggagttctacggagaccacactagctaggagtgccaatttttctaaaaaaatcttgagacaaggatacttttggcctaccatgaaaaaaattgtatagaatatgtccaaaaatataatccatgcaaaagatttgtaaacattctcaggccccaccaaatgagattaccttaatgaccagcctatggccatttgcagtatggggaatcgatcttgtcgaatccctctcgactgggaaaggagggttaaacacgcagtgattgcagtagattacttcaccaaatgggtggaggttgaacctatgaattcaatcactgccaagaagatgttggacttcgttgttaagaatatcgtttgccgatatggactatcacataagatagtatcagataacagaaaacagttcgatagagatcagagatgtttgcttgggatagctgtcgttaatcctgtacaccaacgataatctctctctctct

SEQ ID NO: 187727 - DNA, 3228 bp, Cannabis indica
  modified_base (3148)..(3148): a, c, t, g, unknown or other
  modified_base (3152)..(3152): a, c, t, g, unknown or other
ccacatttcccacgtgcccacctgctatttttctatttcccacatgcccacctatttcttctctattttccacaccctaaaaccaaaatcttaactctccaaaaccccactcacgcctccgcaccatcgccctcctctctcactgtcttcctccctctctcgatctccctttcttctcgtctctctcttccatcgatctccacccacccctcctccagtcggtctccctctcctcttcgtcacatacgtcggaccaccaccacctcccgtcgatgtccctctcatctccgtatcatacatcggaccaccagcatctcccgttcgtctccctctctctctttctctctctttgagctcggtataaatacagttatttatttatatactttttcatttattgtatatatttattttattattgtataaatttaatgtgatttaaagttagttgttattgtaacaaaattaattagttattttattttaatttaggaaaaattataaaattaatgcagtgtaagaggtcttaaatcacccatgtcaatcagtttcttcttcttaggaattaaaagtagatttgtatagttcaaactagtagggaaatagcctgaatcaaataaggatcgaaccaaattaataacatcacgaccaactacttgcaaacacttctggtaaaaacaagaggtcatacagtctagccccggggacttatttgggtgcatttgaaatagcgctttatgaacttcatcatccaaaactggtcataatagctccacgttctgcttaacagagacacgggattgaacactgctagtaacttctctccatcagtacgggctgtaaaaaaaagacttgtgaaataatccaccatcaccttagaaagactagaattccagtccacccaccttccagcagagtctttaagcttcgagatcaagttattgcgtctttgagcatatgccaaagcatgaaaaaacttgctattattgtcaacatcttgcaaccataatttcttggatctttgtcgccaaaaaacttctcgctgagcatagacttcagacaagtttttcttagccagcttataattagcaactaaaatgtcatcatgccccaatttccatctacgtacctcctatttgcacttgctaattcgatttctaaaattactcgtatactctttgccccaaagttccaactggtgaccacagaaaaaaaagcttcatttgaacaccatcctcactacacacctcccatttatctttaacaacttggaggcacaaaggttcaataatctaagaatttttgaatgtcaacctttgcacactttgttagataactgtggaggtaagttccatcaatatcgggcaatgatccgaggtagaaaactctaagttgtaaagcttagcagaattaaaaagattcaaccaagattgattgactaaacccctatccaagcgcacctcaatccaattgggagttcctctacctttttcccaagtcaatggataaccacataaatccatatcttgtaacccactatcattaagggtttgttgaaatcctagaattaaaaactcaggatattgctttacagcttgtttgtcttcatgagataacacattgtttaaatctcccattacacaccaagataaattcgaatgattagccaaagtatgtagtaagttctaagtttccctcttatgacccctattaggttcctcatacaatcccgtgaatctccaatcgaccatgccctcaacagagaccttcacttcaatataagactcaaaaattccaagaagagaaccctcttcctcgaatcgctagagcaacgctaaaccaccacttctcccttgcacatcaaccactacctttccttcaaaatccaatgatgccatttccatttgatcacgtttacagagtgtctcacaaagaaagataaagttaggcttcttttggatcagaagatcctttaggaactgtaaatttgatggattccaagcccatggtaattccaagataaaagactcataatgattggtgggcctggaaaccaacacccaccatatctccattttttgatccacttctagttggatcgaaacaatctcctctacaccatcatttggcccatcaagaaggcctagttctgtccttcttcttttagaatcgaccaccagcaagaaaccctcatcagcaacattatcattattaacgcacatttttcttgggtcaacaaatcattctccacaattcctgtgattagcactaataaattctctttgtcccgagcactgacccacgatctcctcaactatcataggagcatgattcatgccaactagaaccgtaaccgactctaccagagctagtctctcaatatggctgggaattgattgagtctctctaccatgaccatcttcatttgccaccatgaattactttattcatttagagccaatggagtgatttttacattggggcctcactctcatccattccccatatgattttactattttaccatttaaaacattaaatctacgtggacaaaatctttttgaatgacccataacaccacagataaaacaaaatgtgagaaggtgttcatacctgaaattagtccagaactcaatcccttctttattgcaaagctttatacgtctctttagcggctttgttacattgatagtgactcttacacgaaggtagtcccaccacatccccatgaattttttcttgtccgattctacaaacttgtcaatataattggctacattcttagccaccgttgctgctttgaaacctgaatgtaggtcatgtaatttcacccacatatccacctcattcaactaaactaatttcagatctttcccattttgcattcatttaaacaccaaaagaaactcattaaagtccacagactacgttcaatcacactttgaatatctatttcatgataaagttgatcgattggtatccaactccttgacaaatatccccttttcaagttgccaaagtgaagtcatcaaatgttgcatagcgccaaaatcaataggcttttctgtcaaaaatcttcccacaagacaccatcgatcatcataatcactaccagtcataaatactagcatcataaggcagaacaatntacnccttttaaaaacttcttcttatatatataataataaattaatgtatctccttttttcaaaaaccaaaaaaaaaaaa

SEQ ID NO: 187728 - DNA, 3078 bp, Cannabis indica
gtacattaaagacaattaaaaaaaaaatagagaactccattttcttcaatgacatcctctagacaatcacgtgattctagtccaaaataccctctatttggatcctttaaagctatataccaattacttgactcattttcccttgcataaaaagcttatttaacttgtgacgctaacacaaatggatccctaatcgattgggcttctcctatattaaaatttacaagtgtatagaactccaacttcttaacaccagttcgaatatttgcccaatcgcaccagaacagtggcaccttaaatgtacgataattaagcacaattatatccttgataacaccaaaatactcttctttatcattcaattgcccactgtcatgtgcttccaagtatacaccactgttttgatttgttttttcaactccttttttatggaatcgaatttcattaacaatgtaacctttataggaagtgacaccgtgacttggaccttcagccaattgagctaacatgtcatctgctttgttcaagtttgaaatctgaaaataaaaacatttctttaagaaatttgtgtactaatttaaaatataatcttttatctgggcaacagagtgcaaccttttcataaaaccatagaggaaaccctttggaatgtcgattccataacaaagtttgattattattcaagtttgaatgtctttctttcagctcatccatatggatattgagaaatggtgctacaatatctgagttgaacaacacataccgatgtgctactgccaagtttgcttggtcaagttcaaagcattctgctgctgatagtggattttcttatattaatgcgttatcatcattatcatttttcttaaaaaatgtttcataaaagcgtacacattcaacagcaagatagcgatttacaatacatccttttggccgtgcataatttgagacaaaacctttccgtactttcatgtatctctcaaaatggtacatccatccaaattgtactggaccacaaattctaacttctcgtgctaaatgaacaaccaagtgaatcattggatcaaagaaagaaggtggaaaatattcttctaatttgtaaagaatttcagcagcttctaattccaactttacagtatcctccttatcaacaacacactgacacaatccatgggaaaacttacaaagccgcaaaattatctctctacaaccatcttccattaaaccccttatagaaatagccaacaattattgcataatcacatgacaatcatcagatataagccctgttagcttatgttttttcacatccacacaattgttaatattagagttatatccataaggcaatttcaagtcatatagccttttacaaaataactccttatcagattttgatagagtataatgtgcagcaggaaggcgagtaacaccatcttgttcatacggatggagatgaggcataatgcccatctctttcaaatctaatctcgagttgtagtgatctttagattttcctttgcaatccaacaatgtgttaagtatgctttcacaaacattcttttcaacatgcataacatcaaggttgtgacgaacaactaatatttcccaataaggcaggctaaaaaaaatagactgcttcctccacattttctcagtctcagtatcacgactcctcttttttccttttccaaaatcattagtcactttgcttaactgctctgttacttaaacacctgtcaatataattggacattgaggtgctctttcccttgacttagcggttgtatatttcttctttcgataacggtgttcttgtgggaaaaatctattatgattacaaaaggccatctttttgctatgctttaaccaaacaacatttgagttctcgccacatataggacaaccatacttcctttagttggacatccagctaagtttccatatgctagaaaatcatttatggtccataacaacatggcccttaaattaaaaaacttctttgtagaagcatcatatgtgtaaacaccattctacaattctagtaactcatctattaagggctgtaagtaaacatctatatcattcccgggttctttaggtccaggaatcaacatagatagaaaggtaaattcatccttcatgcacatttcaggtgccagattatatacaacgagtattatcggccaacaactgtatgtcgaagtcatatttttgtaagggtatcccatctacagtaagtcctaatcgaaggttattaggttctactgaaaactctggccatctcttatcaactgcatcccaagcctctgaatctactgggtgctgcattttcccatctactcttttattggttgaatgccattttaagctagtgtcaagttaaatctaatccctattttagaattagaaagtcaaaagtgttacctataggtgtatgtagagagagagaacgtggctgaaagacttgttttatctttccaatcgagtccctaaatggaagaaaaaagattaccctagaaaaaatcaagaactagatgcctaaatagaggtgaagagagagtatcaaagatggacaaaacaaaattcccagtacaataacagaaatcaaagcacaaaaggtccccgaaaaaattaagaacccacaccttaccttctctactcctgttatgcgatatgaagatcccacacgagaatggacgaagaaatgaagacttcaagccccttctaatggaagcttcaacaaattgaagaaaaaaactacccaaaccccaccaaatgaatcctcaacgaattgaagctagagagtgagaaaatatggtcagaacaaagcaaatggaaaaatataccaagaaaggggaaaacaaaaatacttaagttttttttagtgcctttagtgaaaatacacttagcgtgaattttgtgaaaagatatcgccttttttttttactcctgattactataacccttttaattgtttcctaaaaataattgccacctattttattggcctactataatactttttggaaaaagttataagtttgtgttaaggaaagggttatttcttgtagtggaaga

SEQ ID NO: 187729 - DNA, 3016 bp, Cannabis indica
ttgaagaaaaaaaaacaaaaccgttctcactctactctttttcttttttaattttttaatagtttaaatcttttcaagtttttttatcagcaaaaacattgttcaaatgattaatataaaaaaattatacaatgtacgctttaatacccattctgttttgacattcaagagaatttttaagtctaattttcttttccataatcgtgtacattgtaattattttagacatcttacagaatttagaaaaaattaatacgctaaaaagaaaaaatactcatgaatggtaaaaaagatacggtgcatcggtgcacctttttatgggggtgcatggtagaaaataattgggtataaaaaaatgctatgtaggtgccaatctgggggaatacttcttgtgctggaacacacttggatgatgctagtaaggcattttgtagttgaacaactctccctcagtccctcccaagaggaggaaagagcactaatcataattgctgctatgctatgctatgctagtcaccctatcatcattcttccatgaagcatcactacaaattaccttgtcaattccacagttgatcaccatctgcaaatctggtttgaattgtcttaaagacatcatggacatacaactataacataaacatttccagagtgattcagcaaacccaaaaacagtttccccaatccccatgtgaaccaaatagctctagtataagggcactgagctttccaagatcaataataagattttgatatcattactcagaacataatttgtcatcacatgaacaaaatccaatcattctattaatggacaatatgtgcctatttgtaacatttgaaatttaattcaacacacttgataatcatataaagccaaagattacacaagtatacagtaattaaagtatttataatcagaaatgggaacataacagttaacattcactgtttttcttcttttttactttttcaaacaaaataaatcactatttaactctggtacaacttcaataataagttatacaaacactgagcaagaactaaaaacatgctcaatttctcaagagaagagaccaaatatcaaaataatccaccaacttgataaggcaaagaccctttcaaaattcaattccaatccacctcccttcacacagcagcattcaacccaaatgacttaacaatgttactaaccctttctgcgaaagttttggaggttatctttttgcccggcacatgaaatgggtttgaaactgcatctacataagcagcatgaaatctcctaaaaaactgtttgaacaaaaacaaaagtttggaacaagttagaggtcatattccagagtgataaatttatgctctgatatacaaactgcggtaacataagacagtaattgcaccgaaactgtttgaacacattgaggagctttttaaaccatgactctgctaagcgaagcttccattcagttccaaagaaaatataaatgtaactacaggcttttatatcagcacctatacctaatctttagcaaggctcaaggattcaataaatatgtgtctgacgatttagccacaatcggcatagcagagagggacaaaagcctaagattacacatggcagaggcgtttatataagtcatgttcaaatcaaagatcttatatttagaatcacctaatgacaaattgtaaactaaagctaacagaagttgccatcgatattttaagtaatcctatatgtaaactaactcaatgagccgtgactagttggaattattctcttaatgaactgcactgtcccaatcggtgttgtctatgaagagtatgcaattaaagtcaagagtgtaatcttcaaaataatgaattacaattgagagtagagctcacatttctaacatctggatctctaacatctaaatctgtcgtcaccaagatgaacttgacctttgtgttagttaagtagccatacctggaatcagatagaataaaagttaggataaagcagacctaaaaaaaagggtttccaatagcataattgaaaaaaatacataaagtacttacactttgtaattctcagtaggataaagcagacctaaaaatgtctcgttcaatgctgatccagactttttgggattgttcactacacccatacacataattatatcatacatcaatcaagccaaaaaaaaatatgtttccagcaaaaaaaccgtaaaaaaatgtaagttccacttccactaacaagtccactctcaacacttaaaactacataagttagccaaagatcaaaatgatgagagcattcccaacccaataaaatctgagattttaaacaaaattgcgaaacacagattccgaatttccattccaatactttacactcctattaacctgaggcaaaaatccaaattcaatgacaaagcaagaacgtttctataaccctaaactaaattcatatgctaagcagtgaccaaaaccattggaaggatcaaaaccatgagagcattccaagttcgaacacaaaaaaatctaaatttagaacaatctcaaaacccgatttcatatacaaagaaatattcaaaacccagatcctaaaaacgcacacgaacaacatcacatgtctaaaaataaagaaagatagaaaaagagtacccacctcgctcatcaacgacatcgagggaacaatggacgatatgatgaagcttcagagcgtcatcggcatcggtgaagctctgtatgtagagtggattgttctacacgaattcaaattttcaacttgatgagttaaaatcatacttaggagaatagaaattagtgaaaacaaaggccaatcagaagagagctgcacctggtggcctacgacggcgacgcagacgatcatcttctccggcttcggttctttgcaatttgattttgattcaattcaaagagatcggaatgaaaagaagtaattataaaatagtctgttttcgattttacacctaatttcaatagctacattatactttttttaattattatt

SEQ ID NO: 187730 - DNA, 4527 bp, Cannabis indica
attttttaaaaaatattttttatgtggacccataaaataaatggactctaggcgcaaacttaaccaggataagttgaaaaatacattttattttcattaattaaaaataccctcatattatattttttttaaaatatatctatttttttgagtgagttgttcaatataccttcactctctacttaagtctagcatatattttcattaacctaaggaatttaatgatgatatcatctttaaaaattggtatatcttacaaaatatgaaaatagaggtaaaaatgaaaacacataaagtaaagtaggtataccagctaatttcctcgacgtagcctgcctatatttagggctgaccctatctactaaatatgcagtatagtttctattattttttcttattaaatcaatgtttgttcatactgtgatcaccatcaaattatttttcctttggctaattaagatttgtcttccgaactttaatagatatgtcctagatcatgtttttttaaatttttccagccgttaaaaattcttcataaactattaagattattaaatttaaatacttttatcatattttactaatggaagattgatgtgaatgaaagttccagaagtacaattcagtacatttaaaatttgggggcatgatttgatagattttaaagtttgggacgcacgatttggtggacatctaagttagggtacacgatttaattagtaaaatagacaattgtcgcattaataaaattaaataaaattgaacaaaaatctctaaatctaacaactttaataattggagaaattttttttataccctaaaaaattctagaggcatgatcataaaaataaccttctcttttcaagtgttgaaaagattgtttccctatttagtttaaggttgatttgcgagattacactatatatgtatgtgacaatagtccacatagagacacaagtgatcataattaaatagactaaaatgagaaatttccttacaacttctcaatatgaatttaattatttgacttaaaattgtaataataagtaaaaatgaatgtagaagaaaaaagttttgtaagcacaccctatttctatgttgatgattacaatttagaaactcccatgaaatgccaataaattggaacttttcatggcacacccaatttctattttcaagcacatctgcatacatcacatatcactaataatataaatgaaatcatcattgatatgtagctttaccaatactagtactatttatcatattattaatatattacttgatatttttcactataaatcacatgccttattttttgtttattttatctatatatatttgttggtggagccatatatttatttacaaagtagtacaataataataatggccatgatgatgatactccctatattatgatatgctctgtatttttctctttataaaatatcatattaacacgtagcctacacggctacacatatcaacttttacatatacaaactatatatatataacaattaacaccatatattatatgtacatataaggataatctaagtgtaattgagagagaaaagtagaagaagaaagatggttttggtgacctataacaactatggtactggtgtttcagaagaagaaaactctggttttgtctcagaacttgcaactcaaagactctatcacaccaacaaccatgtatgtgtgtgcctttattaattaattgactaactttggtcatggattttctttaatattacatttacatgttcaatgtgtatataataataatgtttcatgattcttgtgtttattgttgagaattatgagattctatgattatcccacaatatttctgatggtaactatcagagtggacatagtcactgtctgcatgggtgcaaatcagacagtgtcacatgcccgcaaaaaatatgattctgatacagaatgacgagatttcaaaactaattctcaacaatgatatatagtttcttcttaagtcatataatgttgcaacaatttgaccccttatgtttatcaatatttctttaaacacttctacatttttgtttgttttgttattatagaatgaaatgactaaacttcttgtgagtctacctccacttggcttacatcttcgaaaggaatcatctttgttagacttgattgaaacaaggctaaaccctcaacaagtactacttgatagtactattattaatcataataatattaataaccaagtcgagcccatactaaaaaaggcttcaaaactcaatgcttccctcatcaaaatcggctcatggcaggtcagtcaaatacatataataaaaatatatatatatatatataaatgtatatatttaattaattaatgcataatgcagagagtggctgtacatgaagaggacgtggtaacaaaatgttactttggtaagaaaaaactggtgtgggaaattctagaaagaggtttgaaaagcaagattgaaatacattgggagtgtattatgggaatgagagtctctcttcaaaaaaaccaacctgggattcttcaacttgaggtatataaatctatatatctatacattttgaattataaattaatatatattatggttaattatataatttgatcagttaagtgaggcaccgttgttcttcaaagagacagatcctcagccaaggaggcatactctttggtcttcagcttctgacttcactcatggtcaagctacaatatgcaggtacgtacgtatatattaattaactttttcaacactatattatatttttaattatttagttaaaaacaattaattaattaattaattaatacgtcaaaatttgattacacgggcagagaataaaaacaaacaacttatttagatagatacatatatccaataaaaagtggctttataaagattgagacatatatatgcccctttaattatctctctaccatgttaaatctaattaaatatattttaacaaatatatatatatatcaaaatttgattggatagtaagagataaagacaaacaaattagagtcatcactttacaaggattgtgacacataaatatatatatttgtattaattaataaatgttaatattaattgattattgtgttgatatatctcagaattcatcatatggaatttgctcctggtgcttttgatagacacttcgagaagttagtagcttttgaacctcgattccttaatttatgtcgagccccttttccttcttctaaccaatctactttcttctattcaaatttccctaataattataccaaccataataataataataatattaattatggcaccaaacaacttcatcaacaacaacacccttgtcctacttcatcatcaacaaacatgtcttattttccacaacaacattatcaagtttgcaatgaatcatctacaggtatatttatatatatataaattaataaagaaatttaatttgtttgtttatatagttacttattataaattatttcttgttccaaatttttgggttatctttgtagaaattatggaactttctcaagctaattatgatgatgatgaagatgaggcttgttgggctcaaaaaatgaccaataataataataataagatgaggcaaggcttatgttctactattgtgacagtaacaccaccacaaaattattacaatgaattaggagatgatgatcaacaagtctatgatgatcaattccaaagtggtgatgatcaattattgagtttcacagatcaggaagtatgccattaattctaatatttttacacaacaacaacaacaggtcatgggaataagtatcaatcatccatttggttctttgacaagtatggaggaggccaggattaacattagtcttatggatcataattattgttacaattatggacaagaaaattattatcatgatatatcacaagaatatcatcacttcaagagataattacttgaaatatatgcaaattttgatccatgtaatattaaaacactcttaagaaactctagctgctgtgaatgatttttgttgttttcttcttataattaacgttcctaattataatgatcttataaaaaaaaacaacttcattatagtgggacatttttttttggtggtcaatttgtctaattactcactattataaaaattattatttctgtcggtcttcaaaatatttttttttggaccgtcactacaaaattaaatgagtgtttgaaacagtcaattaaagtagattattctcaataattttcaactgtcatgtacttttctgattggtttaaaagagttacaagccaataaaagaaatgagattttaaagggcatcttgactgtttaaaaatcgtcaggatactatggccaagtgtcagccatagtatcccgacgattttaaactgttggggatttttctctcttttaataaaaccccaatgtagatctaagttaaaatcatttcctctctctcaaacatagccttaaaccta

SEQ ID NO: 187731 - DNA, 5111 bp, Cannabis indica
atctgtttgagtcactccttgagttgcattgattgacatttagctgagttgcaggttcagcatggatggtcctatcccgttcgtttgtggagtattgtatttggggttgggacaatctaccaagaactcttcttatgtactacacaaactttgtttcttctccagagggctattttcagactgttatatgcaatgagccagagtatgctaagactgcagttaaccatgacttgcactacatagcttgggatatgcctcccaaacaacatccccacactctcacaattaatgacaccaccaagatgattactagcaatgcggcttttgctcgaaaattcaaacaagatgacattgcacttgataagattgacaaggatttgcttaatcggaataaagaaggctttacccctggtgggtggtgtgcaggtagtcctaaatgctccaaggttggtaacccaaataagcttaaaccaggccctggagctcagagacttcatcagcttgtaagtaagctagttttggcagctaagtacggtcagaatcaatgtacataaacttcattaaagattcttacttgaagatgggaaaaaaataatgagggaggagagaaagaaggggaaaggaaaatggttttctgagaattttgtttttccatattagttatattttagtatcagattttaacattattctgaacaaaattatgattgtcacgattttttattctttcggtagattttgtccttagctctagtaaatgagtataataacttagtggaaacttcaattttttagattcttctattaatggtataatctgggttggaaaagtccgtagtaaaggggaaaaaatcgctatattatatatctttttttagtatttaatattggtataaatctcattctccatcatcaattataatatatgatatatttaatgatgatgctaaaggcgttcacttggtttatgttatcagtacacatgtcatgccgtcctcgtcacataattacaaaaagaatttattgaactaaaatctaatcgaaaacacagctgactttatctagaaggtaaagacttccaagtagtgtattatgatgtaagcaaattattcaaatccttaatgcctacacaaaagaatataacgccacttttgttctttttcaaaatatataatcagtaatttgatcaataaaatccttgtgggtttggtgagagagcgtgactctcccatggctcatatagggtacaacatgttcacagatggagcgttttcattttactttgttaaagggaaaatctgacaaaatacgtaaagaacatctctgctatttattttactccacttggaccacttacaacaggaagatttgtcaaaaaaaaatgctgaaaaattctaaataaaatagaactgagtttattaatgaaattatacacactagtgtctcataataagacttgctcatctgcttattccggcaactaaagttgtttgtggattcaaaatttcaaaggcaagaaaagtagtgaaagattttcgaatgagtcacagaaacatattctattttacggccattaaatagaaaagaggaaatgaaaagggtattcagtgttattttaagttgatcaagaaaaccagaggaactacatttgccaattatgttcatattgtataaaccaaatttgaaccgtatagttttatgttcggaaattaaataccacacatttttacctttctcttttcctttgaattatatctacaggatttttttaaacaagaatgtcctcactcatcacagcatccaaatccgctataatctaataccaaaatttttgttatgttgcttcgaaaacttccacttctgtaggcgttcatcggcttcatctcttacctcgcctaaaagctacataaggttgtctggtataagattgcattacatcattttcctgttcaataaacaattccctatccatgctatgtccagatcatgaatcaatcatcaattgccaaagttcacaatcaaaccatctccagaagtttaatgttccctgcagaatttgctgcaactaaagtgttggactggccgcgccaacaaacagaggaaataaactggttggttttatccatttcgttgccagaatgcgggtcgaagttgttgaactggaattgtaatgctggcatggggaaagctttgtggtagataaaaacctgtccacagaatatgaaaatcagtgatcttcaatatgtttataatttgtttgttattttccatcctatgctctacacaatagaattgctattacaaagcaagttatgttaaacaaagtagtccagccaagaaacaaataaagaacccaacaagcgtgtggaacctgactaatatttgttcaattcataatcgcgttacctcatttgtctccgagccagtagcaatgtaaccatcaaaaactgacaatcccacaaagttctgcaacaatgaaaagaatgcattagatatcaactacatatgagaacacaacattcataagtgtagccacaagactaatataatgacatgaataactaacactatgtatgtaatgtgcattttctttttttttggtttaattctgtaagaggctctcatacatatgctccaggtagcaccaacaaaatcctggtagtgaaatttgaaaacattctataccttaggatgaaatcacagttgtaacatgggaaaaaatgcacaatccaagtaatatttcatcaagtttgattcatgtaaaagcagggaacgtcattaatcctaatgtaggatttatgcaagatagtgaagtacctttacattcacgtgacctgtgaaggaatgaactggagtgtcaataacacgagatgtacacgccgacaaatcccaaagcttcaatgagttatcagtggatgccgacacaatatttgtactatctacaaacttgacataactcacagtcttattgtgtcctactaatgtgcagagaggaacctttgcattgcgcagatcatagtaataaattttatgatctgctgaaccaaacgctatggaacgaccagagtccaagggaaactgaacgcagcagacatttgcctttgttctgattgtaccaatgctcaccccctgcagtagcaccccaagtaagagaaacaacttatcatacatccggatttaagtatacacaacacggaaatatataactgcagtacgtttagtttcaaagctgacatccaccaaagtggaaaaatagaattgcctgattgatactccatagcttaacagaaccatcatcacttccgctggccaacaatgttggatctgccgaggaaaagtcaattgaccacacacgcctctcgtgctctctcatctccatttgcacttgactcctcgtcacgtcccataactggaaaggccaagcaaaagagttaaaacaaaattatctaaagccttaaacaataaataagtttaaggttgacttacctgaaccacaccttcaaagttacttgaagcaatctgactttttatatagctattccagcatatactactaagcttcgacctagtagctatttcaaccactggatagtgaatatcacgatcctcgtttataattgtgttgcattcaaaaactttaattttcttattaacaccagctgtggcaaacaattccccatcacgatcaaagctgagggagcatactaggtttgaagaatttagaagatccccttgctttaaatctgctttgactttcaatttactgaaagatagatacttgcacaaaccttccaagaaaggatttatccaaccactttgtcttctctcatagctcctatcttttgatgtcaaattattgacaaaacttctttcacttacaatagcagaacccttaccatcactacttattggagtttgtctaatcacatgtttccctgctagcttggcaggcctgcatcttgttgaaaaatatgcagactctagctttttgaagttcttcatcaatcgagaattttttaaaagaatgttatcttgatcttcactgtctgacttttgctcaccatcaatattatcatcacattcctccaactgaagattccttaatcctggtctgaatctttttctggatcccaagctagtagaatcatcattaataacaatattcattgaagggagacttgatgttgagttatcttccttcactagatcaggacatgaaccgccttttttcttcaaaattgattgttgcttcgtaacttcttcaatatcagaacacaggaaggaaagagtattttgcaacttatctgcagcctctagctttctttgttgaattagtagaagaaactccaacaacagttcttgctcctctatttgctccctgagctctatggctgcttcacgttcttctaagtcatctcgtggctcatttaagaactcactttgtaacaattcactgtcatagatggtatgaaagtagagtaagtaagcttgatcatattgaagttaaattacatgttaatagatgtatgtagcaagtgcttctattataaaaccctgtaacaagttcaatgagggcatgtacaataaggtaatgagatggaacatatttaaaggtttagagcaaattaaacaaatttaggaaactctacaatctttggaagacagtaaattatagcaaaatattaggcatgtcctcacgacgaatcaccatgaacatgacccacacatgaatcatgatgggtgaatttgtgtacattctaagttggaagaggaattagagattcaacagggtcaattttaaaatggaaatgaattcgagtgttttagaaggcattttgtaaggagttctcttaccccatttttggcctactagttggttcaggatgtagtagccataagcaaaatgaagcttctttcggccatttcagtagcaactgagcaggaagaactcgatgccttagactagacattgttctacttttttcttctctcgaactcgatggacagaataactaatcaaaaatagcaaaaccacatcagcatacaaagaaacaaacatgaacgcttcaaaattattgtttcaaattctattgctacgtatatcgaaaaat

SEQ ID NO: 187732 - DNA, 2572 bp, Cannabis indica
tttttttttacttaataaagttaataatttttaaatattatatacattctgatattaaaattattcttacaattttgctaaaaaataaatcaacaaactttaggaaaatattatgaatttaaactgccacaagtaaagaatttaagagatatttatgctattttgtttttttttttgaaggtcctagctgtatcatttggtcatgtaatgttctcacttattttgtaaagaacgataacgtcggttaccgaatcacaacttgataatggcaattttttatattatatttattttaaaattttattattgaatattaatagtgactactactagtattttttataagaaactatataattaattaacgatattttattttttaaaaaatattatatgttttaagagcatctggatagattagattgggaattgcatattagaatcgtcttgccatatatgcaatgtggtctaattttcaaaactaattttatgcgaagtgttgctcaaaataggcaatgatctcatgatttttttttaaaaaaaaattggttacttaaaaagtcattaatttaatgtgatttgagactatagtaggtaacttgagttgttaactattgctaaaagttactattagtgtttaatactctcctcattattatactatttgtgtaataaatattaagtctaagtatttaccttaatgctcttttttaaaaaagagaagatgataaatctgatgtgtataagagaaaataaaaaaatatatatatatatatttttagataatatttgtattttagtaactataaatattatatattttaggggaattacttactttatatactgttttcttaatttttttttttaaatttacggtttgacttgctaaaatgattgcagcgctatttgcaataaaagtttctatatagaatttcataaaaatgcataaaaataaaattgttttgaagtttaaaaataaaaaagcccttatattttaagttataggagatactgagatacaatagatatatggaaaaataaataatatttttaacatctctttttattttttcttagtcgcgtttggtccgtgtggctagtcctataaaaccctcccttctcttccaaaccaaaatccatatcgttaaacaacactctctaataccaaaaaaacttctctcttcaaactctcactcttacatatcagttaacccaagtttcttttctagttaaccatggctgaagagaacaagagccacgattacgagggttcatccgtggagaccaaagatcgtggactatttgatttcttgaagaaagatgatcacaaggaggaggaaaagaaggctgatcaccatcatcatgatgctgctataagctccgagttcactgagaaggtcaaagtgtctgaacaacacgaacctgttaagtcttctcatgaaccagtcaactatttcaacgctgaagaaactgttaatgaagaagaaaagatgaacccaaatccagctaaactccaccgttctcacagtagctctagctctgtaagtaaaaaaataatatgttatttgttttttatattgaggttaattggttttggttttggttttggttttgattttgattttgattttgattattatagtctagcgatgaggaagaatgtgaaggagaagagaaaaagaagaagaagaagaagggaattaaggagacactaaaggaaaaattctcaggtgaagataaaaaggaggaagagaaggttcatcaacatcatgtggacacaagtgtgcctattgagcacgaagttgaagctcatcacacaacacacgaaggtcctcatgggtacacatcaacagagactgtggtgacccctgttcccaacccagaagagaagaagggtttccttgagaaaatcaaggataaactacctggtcagcacaagaaagaggaagaggtagcagtggtgacatcaccagcagcaccaccaccaccagttcaccacgaccagccccattactcatcatcgcatgatcatgatgatcatcatgaaggtgagcctaaggagaagaagggtattttggagaagatcaaggaaaagcttcctgggtaccattccaagactgagactactgaagaaaaggaaaaggaaaaggaaaaggagagtggttcacattattaagaaaaagcttggctcatacgctggccagtattttggtttgataaaatgatggtgtggtttgtttgttaattaattaaaaatcctatctttcatgatgggtcctattctgctttctttctttctttttttctttccatttctgtctgaaaaaatatatatgtaatataagtgctttattgtgtacttatacatatatgtatgaatgtttaaaattcatgatgtattgaaaatttggactttcttttgtatttataatgtatcttcttttcttttttttgctgaatatttatggccatatatatcttcttacaatcttcacttttacggtaagtcaatagtgcaaaacagtagaagaatagaaaaaaaaaaataaaacaaaaaaaggtaagaacg

SEQ ID NO: 187733 - DNA, 2934 bp, Cannabis indica
aaaattagacatttttggccgtagatgatgatttaacagtgaaaattagcttctgatagtgatagtcatttattaaagtcctgctgggcccgttgtgggtaacctagagtttattttcgtaactcccttaggggtgaaatttgaagtcgatagcttcaagattgtgattgaattttgagtcatgacttgatagagcattgtaatagctttgaaatgcaagttaaatcttattaatcgaatcaatattaagtgagttatgatcgttttactgaaggtagttcatgaccaagtgctaggttgacatccagcgcccaagttgacctcctatagcgcccaggtcgacatatgacgtcaacctatacgttgggtaagtgaaaaaaaatcgaagggatgtactttaagatgcttaagtgatattttgacatcacttagtttgtatttgtgtttaggcgaagctggtcaccaattcttgaagatatgttattctacgaaaatgagagactcgaaactcttcatttccgagtgagtatcccatgctggagatgataaatgcaaagttttgaattctacttctctgacttcatggctcttagttattgttaaaaactagacgggcggtcgaagcaaaatcataatcgaataagtaaaacccagcgcaccaggccatttattaacttgggcattgggtaccctatttctaagctctcgtgtttttgttttgatactttcaagcttcttgaactttaggatgagatcttctatcccgttttttatcattctagattcattggtcatataaattcggcatttaagtgatcgaaaccagcgcaccaagttgattgtcaacctgggcgctgggctctgcttccaagccttcatgtttgtggttgtcttcccaagtttgcttgaatctttattgatgacgaaaaaatgtccagaacacttttttcgataacttgattggaaacaacccaagttgacaatatgtcaacctgggcactgggtccatgttatggcccttcgaaagttccattttgtctccgaaaatagttaaatcttaatctcttctgaaaacgaagaagatgctcagatgagttctcgaaaaacaccatcgaaatcgccccatgttgacaaaatgtcaacttaggctctgggccttacttctggcacccaagaagtgttgtctcttcttcaaaaatacttatttccccgtttttgatgaagacaaagatgatgcaaaagttggattgtcaatttgatatttggaaggcacctagattaacaaattgtcaacctggccctgggtgcccgagcatcaggtgctttgggtgctcaagaataaactttctccgaatatgattctgatgccttaaatatgttcgtggcatgtctagttcatgtcccaatgcaaaatttgactcatttgccctaagacagttccgaaaattgaaaccctaactaaggatgtcaacttgagcgctaggtgaaaccctaggtgcctaggggtactcatggggcctggattttgttgattcatgtcttcatggtatagaatgctgaaagatagtgagttggaaacgagttatcgtagtacgaacttctattctggagttcccgaagtcaacctgggaacagggctagggagcctccctaggtcgacctgctaagactcgggactactcaactatgagatgtcatctttcttgtcacgtaatattaatgtctacatcatcaatccatacacacatatattaaagattgaaaaaaaattaatataatatttatagctttataaatagtaattttctaaatgtagctaaatatattataagctcgtttgatggagcatgatttttcatcatattttttgtaaataatttaactatcaactattttattagctactctaatatgagtgatcactaaaatagttgagctataaagctaatcacctgttgcttgggtggtccccaaatatggtggtgttactgctgtttttagtggcttgattcgatacttcttcttctatgagttttcttggtaaactgtatcagattggaaaataacaaatagaattggtgggtatattgtttacatgttttgtggtatatataatacactcatactgtaacatgtaatgatattgaaagataaaataaaaaatagttaagtgatggtggtccaaaagaactttgttagataaatgtatgactatttatatatatgatatatgcgcatgtgttaacatcaatcatttgatgagaagagagactatatagtgaagtaattgaattggtgtatgaaggagctccactcatccacacaaaacataataggtatagccaacatcttatccatccttcctgatctatagctacatatatatatatagcagctaagactatatggtcaaaagaaaatgggaaagactatactactggaggagctatcaaccagagactcaaatcttgtgacagttcacttacttttatacaaagcaactacagcgtagttttttgttgacccaagaagccaaaagaaacatgtacactcacttctagtcgtatatatatatattgatatctctgatcaatggctgaaattaactcttgaacgaagagatatccaatcaaatagtagtatatatttatgtatatataattaataaatactattgggaccacacataatttttatctatctttaaagatgatggatcaccaaagcattatatatatatgatcatcatcatcgcagttcacagtatgtactgatctttccaagctttgaatctcgcacatcacggaacttcactacttataaaacttgtaaattatgtatatagtgaacgtcactatctatctttaactcactaaatgtgatatatgcaacttagaagcaatacataaatatatattttatatatttatatat

SEQ ID NO: 187734 - DNA, 3154 bp, Cannabis indica
tttatagctgaattcacctaccaactcgaggagttagagcatgaagaagtggtagaggaggacacccaggatgagacgggaagatagaagtgcatgtggatggggcatcaaacgacggcggcgtaggcgcgggagtagttatgaccgcgcctggagggcagaagatgcattgcgcagtaagattcgggttcatagcttctaataatgatgttgagtacgaagtcttactagtcggcatgaggttggctaaggagttaaaaattgctatatttatagtgactcgcagttggtcgtgtgccaagtcaagggagaataccaagcgaaggggagtagaatggtggcgtacctaactaaggtaaaaaaattactcaagacaactgcaacactacacaatggggtagacaatccatgatgataatgtccatgcatcatgctgatgcattggccaaattggcatcaacacgggatattgacacctaagaatcaatacttgtggagtacttggagaagcctaccattgaagaggagcaggcatacgtggtgaccagtaaaggctcttggatggccccctacctcaactatatccaaaaaggagagttcccaactaacaagaaagaagctaagagggtagtgtataaggcaacctgttatgtgttgatgggtggggagttgtacaagagaggattttccacccctatcctgcgatgtgtgagcaaggaagaggcactaaaaatcttatatgctatacatgagggtgagtgtcggaaccatgccaaggagtactggatgtctcaaaaatttttgaaacaaggatagtattggtcctccttggaaaaagatgccactgagctcgccaaaaagtgtgataaatgccaaaggcatgctaactacgaatgacgtctgcctgctgagctcaacaacatgaccagcccattggccctttgccatggtgggggatagacctaatacggagccttacctacaaggagggctgggcaaaatatgccatagtggtggtagaatactacaccaaatgggtggaagtcgagctgctggtgcaaataactgccaagccagtgatttcttttgtcaataagttcatcatttgccagtttagagtcccctataataaccaataacaggactcagtttggtgatctgctgagagcttactgcgacaagaagggaatacgccaagggttttcggctatggtacacccccaggttaatggtcaggtggaggccaccaacaaagtgatcaagaagaatctcaagaccaagttagaaaagttcaacggggaatgggtggaggagctccccaatgtgttatgggcatacaaaaccactccccgcacgaccactagagagacccccttctccatcgcttacgggtgcgaagcagtgctccccattgagatgcaaataagctccaactgggtgcagaactctgaaagagcacggaacaaagaagtgttggcatgaaacttggacctgttagaggagaggagagagaaagcacaaatgagggtcgctgtataccaacaaagagcagctcgatactacaactcgagggtgcggatcagcgctttttggattggagacttggtgttaaggaaagttttcctgaacactagggatcccatagcaggagtgctaggggctaactgggaggggccttactgcattgcccaagtatttcctccaggaacgtacgagttggcctgcatggatgacatcgtagtgccgcgagcgtggcatgctaagcacctgaaaaagtactaccagtagaaagacagttatcgtcgtctgacatgaagtaagaaggatgttttatttaacttgttatcaatcaaggggagacattataaatgtcccccattctaatgtaacttgagcatgattagttccaaactttgttataatgcatgatatgataagttttattgagataattatgtagatcattcagacaaaagaataacaaaactcaagtgtctactagcctcaatgtcagcacacgcttgggggaggagaacactataaaaaaaagaataaaaaacaagccaaaggtttttccttaggattatggggagtagatacccccaccaattagagaaaagaaagaccctagtaaaggcatgtcgcgtacaccccaaagtacataaataacgaacatatgcagaaggtcaagttggttcacggaaccatcatctcccttaaaaataaggtataataaacgcatgctagaggtcaattcggttcatggaaccaccatctcccttaaaaacaataaagataaagagaagaaaaaccacactataaagataaaatccaaaattcgtgagatccaataaccaaaaacaacaagtaaagaaagagtcactagcaggaggatagggtaatgccccccgtaaggcgctagctattgagtctagaaaaaaagcggtgaaaataaataagttaagtacagtcacccaaaattataacagacacccatactaacataagctaaagggtgtcaccaacaaaatatatggtaatggcaaagaggagatcaactcagaaactgcccccaagccagtcgaagtaggccctccattcagcgacccactgaactactttaggaccacaagagttgaaatcagtgttagtattggtacgccaaacgttgtacagagcctggtccaccatgacaccatcgtgctcatttgacctttggttggccggcttcagctcttccctcaattcccgaacgtgagattggagtttgccaacttggcactcaaggttcctcttgttcttgtgggcactttaaatcgatgtgttgctttgtccttcttaggcgcagcagtagcaagctgtgtgcagatgtcagcaagctgggaatgagcgtcatcttgctccctcgtggcttcatcaagggacaggtttaatgtcaccttatagtcaccatagttagcaagagtcgcggctacctgcttctgggcctccttttctctgtaagctcaccctctaattctcagatgcagcatcgtgggagcccactgggtaaaaaattcggtccctttcccttttgatggactctaactcgctcagagtgcatgacaggtggaggaaaatcccaaggctccaccttgtgagagcacctcttgag

SEQ ID NO: 187735 - DNA, 2606 bp, Cannabis indica
gttcttagttttcaacctttatttattttgtatttcagtttcagggttttttttatatatttaattgattaagggatgacagctaatgttaaatcatgagatcttccaagaaaggaaaaggtgcaagctataaagtggtgataataaaaagaattaatgaaagattatcaatttttacattgcttatttactggggatgttggtaagaagaaggagaatatcagagtggaatgtgggtatttttgcaatcatttggaccatatggtttagaaagaatagtcttcaatgacatggaagcgaaagcttgtgttatttgggatagagttaagtttgggtggctatatggttttcaacactaactaaggatattagtgtttttccttttcctatgctactcaatggttggtcattatagttgtgatttgatactaagctataatgacaacatttttttcttattagaagtgaaaaaaagacttggttgaacaagttgctgatgtatatttggccatatctttatgccagttcttatctgtattctaaaatatagagcttaagagaaaatttcaaccttgggtatttcttgtcctatatcttctatatcaattttatatattaccttcatgtcaacaaaccttgtgctgattaagcttattacgtattttcaggttattaaggcacttctagaaattagtaggaagaattcttgggcagaagtagttcactgcaaacttatttctatgttggcaaacatgttttatcatgtctctgaaggacaatcagtggcagcaagtcccccgttgttccttgtagaacagattgatctgattggtggaattgagttcatttttctcgaggtatgctgattatgtgttggtcagataatcttaatcacagatttaaagacacctttgtaatgagggtactataattacatttaactatggatgttattcttattgttgtgttgggttttcctatacctaaggttatgaaagaaacctcaattataagaaatttgtgtttacatgagcataccttatgggttctttgcgcttactaagttttgggtgtaaaatatttagttttttaaacttttcaagagaacttgcaagcaatgttttttatctgatgctttatggaagttaatgaaatgatgatgctctgttggtgcagtatacccttgcaacctcaagggaagagaggagaagtctgtatttggtcctttttgactttgttctgcacggagtaaatgaaacctatacatgtacagggggcacggagtatagtgaggatgagatacagcctcttgcagctctgctttctctagcagatgcacctgaggctttttatatttctgtaaagctcggggttgagggtattggagagattttgaggagatcagtttctgctacattgtccagatatcccaacagtgatcgattaaacacggtaatgtctcagaagtgttgtttatggcaggtttagttgtcttctaattattataaaagagctattattcttttgtttatttttaatatatattttttattccagccattactactgtgagagtagtggatgcaaatgtgtccaatcaatatttaaattaatttgactgtaaattatatcattacatttcctataaattctgacaaacgaaaaattcatgccattattagacttaggatggtaggttggctaatagtaactattagagattttcagactctactctttttgttaacaaatttttgtttattatgtggcttctattacttttcgcttctgactggtttttaaatggattgctgttattcttcatcttcatagacttgtgtccttttcatttctagaattcaatttaatgcaacaatctatcaaatgttaatgctatctgaagttcaattgactttgcagctactggagattgtaacagagaaatttgataccattataagttcatatactcatttggacaatgagttttcccatatgctccagacaacaaaatcttacaagctcttgcagagcattgaaggcgaagttctgagaaatggtattgacttgaatgtatcacacgcatgggccactttacattccctgcttcattcagaaagaattgcttatcggcagaatggatatgtttggttgggggatttgcttattgctgaaattcgtgtggaaaggaacgcaatatggtcaaatataaaaaccctgcagaataacattgcccgtgcaggtgttcatgatgcatcagttgcttcagatgtccctttatccatttggctgatgtgtggccttctgaaatcaagacacaatgttatcagatggggatttctgtttgttctagataggcttcttatgagatgtaaatttttgctagatgagaatgaaatgcagcattcaaatggtagtgatactgggaatgtacacagggatagccgccttgagaaagctaatgcagtgatagatgtaatgagcagtgccttgacccttgtctaccagttcaatgaaaccgaccgcatcaatattttgaaggtaatctctgaaaaaattacgaaatcgtccaaataggcatagctgaaatcttttgaaaaagcttt

SEQ ID NO: 187736 - DNA, 2836 bp, Cannabis indica
aataaaaaatatacattttttaactaaattaaatggatcttaaaaaaaaacctaatcacttaaacaattttcaaaatatgaagcaggtaaatttacaatcacggttgcaattcaactaataatttgaaagtaagtgttatagacgcgcttcatgagggcgtgattctaccaactcttcacaaaccataaagcaaccaaccaggaatagaatattaacatactattactactcaagttaggtaaagtgtttcaaaatcaacaaattaaattaaccaacaaaatataacatcaattttctttttttttttgtaaaaaagattctcccaatcaattgatttttttttaattgggggtcattaaataataaataatcactaattttcttctttaatatttcctcatccaagtaaagtctaaacaaaaatcccaacattttcattagtttcttcctttaaaactttcaactttattttattaattttattatagctcatatcctaatccatagctatttattatggatcacattaagtagttaaaaaaaaatcttctttttcccttaattaattaatctttcttgttttgtatgatttgagtttgactcaacacacaaaaataaaaataacaattcctttttattttattttttaaaaaaattattttcctattgctgatccttttgtatttatttattaataattttaccttaaatatattaatttttatatgtagggtatctttgctcaaccttgtaatcaatccacttttgttcagtcttccacgttaactccatttctgttcttatctttctcttcacccatttgggtcatcattgatcttgttctaggtaaagaaattaatcttcttcttctttttttttccctcaatttcgatttttttttttactgttgggaattaattgtttctattttttatttaaaaaaaaaataaaaaaatctgggtcgagtggtggacagtgaggtctttagggatcaatggaggatttggtagggcctagattatacagttgttttaattgcagaaaccatgtttctcttcatgatgatataatctctaaagcttttcaggtaagaaatttactttttattaagtttttttttacatttttttttgggtgatgatcattgttttgaaagggtttaattgtagggaaagagttattgaaatgaaacccatgtttagtttagatctttgttagagttttttattagtttacttactaattttgtttagacgtttctaattcatgctcgtattcataaattagtagtgcatgcactcagagtggatagtaaattagtttagatggattcaatgtactactctcttttcaatgaaatgtttgttcatttttttttaaaaaaaaaataggataataactttgtgatctttgtgcactcaaggaaacaagtttaagatatcccaaatttagataaagaagagaacttttgtcatttatattacataaatttggattaagattttcttagggtgcatttggttattcaaaaaacaatccttttaacttaaaaaagttacccaaatttagatttgaacattgttatataaccactaactatgtttggtgttatttgatttggttgcttataacacaaacaccttgtttaacccttttattttcaacacaatttttgtacacttgttagggaagaaatggcagagcttttctgttttcgcacgcgatgaacatctctgttgggccaaaagaagaccggcatttgatcaccggtcttcataccgttgctgatatttactgcggcgattgccgtgaggtgttggggtggaaatatgtaagagcttatgaggcatcacagaagtacaaagagggaaagttcatatttgaaaaggcgaaaattgtgaaagagaattggtaacttaaaaaactaatggcttttcttctttaatttctatcatgttgatgaaatttttatcaaggcttttggtttgattcttcttgtacagaaacttgtctcactcacccatttgagatttctcattgttttctttttttgttcatattctcttcttaaagttggaagttgtaaatggatgatcaatttaagtgtgaatggtattttgtaaactcccaaggccattttcatagtcaatttggattagtgaagtgtaataggtcaattgattatttctttgcagcaatttaggatggaatattatgatgttgcttaagagattttaagcttaaaatttgttgtgaataattataatcataaccaaactatgatgctcagatcatcaagttgaataatttatctggaaacatattctcaaatctcaatataatgcttggtttgagttatagaaaatgcgtattataagaggaacgacatgtcgtttgttgtcgtttttggtacggtgactcaattatatatcattaattcatgttagatgtcgtttttacttaagcagtcagtttaaacttgttagataataaggtatggtttattttctctctttcattttctttttaattgctggtctcccagctttttgttgtgattggtcaacacttaagatctaagttttctaagctcggtcaactcactaacactaaggatataacataattaactaacaattttgtccaagcaatccgaagtaggcacctagtgtcaaaataaactttattaaataatcagctaatcgagttgctcatgttgttgctaggcatgtttattttttctctggttgtagcattttcgatcataatctttgggctgacttaaaggccctcttgtatttagaatgcttttaattcaacgaagttgatatttca

SEQ ID NO: 187737 - DNA, 4022 bp, Cannabis indica
aaaaattaattgaaaagtgttaccaaatattttaattatttaattgaggtgtgacgggtgcatattatacttgtagttatttattttttctccatttttagtttggaaaaagaccctttcttttctgacaaatggaaaaagacctcgagtatggtaggaaaaggtccacaaatcacgatttctttgttgcaaaatgtgtatggtatacaaaataacgtgtagatgtagtctattatatagagaaatacgaccgacgttacaatggttctatctaatctatcggtggcataattgatgcctatgctaatgctatggtccttaattcttattttatttttaaacggattctgattttatttccaagaaattattttattctattttattttatttttgggaaagaaatatttatttgcttaatattattatttggttaggattgaccaataataaataacacaaaatttgactcctttctcaaataagggtgtcattatacgatactagcactttgtcctagagtcactcacctttttctgtgtacaaaaatgataaggaagtaggaaccaaagaaagaaaaattatgtgggctacttggatccactcaatctcaactccaacatgtgttctatgttaaaagcgaagcttctaagccaatgaactaatttatgaaagttcaattttttttctcaacttctcttcattacccatttgtctttttctgactcctttcttgttggtgtttggtgttgagcagaatttacatttgggtttttgatttcagagtgttttttgaagatttcggtttctgggtcttgcttacagcaatgatgtctacttaccataatcttgatttgggaaggactgttttggatttggttgcttgtggctgttcttctagctcttcattcgaaaggtcttcagttagaaattactccaaggtaatttctaagggaaatagtagagtttatggagttcggagattggttaccactcgtcgggaccggactctttgtcgagtctcttccatgaaaacagttgagcctctgcttgatggtaataacgcattatagcttttcgtttatatgtaactttatgagatataatttgtaacttaaatacttgtacttgaacctatacaggtgctactcaaggtcctccacgagttttgaatttggaggagccaaaaaagtccatttccttaacaaatttgtttgaagtggttgctgatgacctcctgactttgaaccgtaaccttcagtcggtgagtactttttgttggagttattctgggatgtttttgtatccatgtatgatctatgtcgtgttgccattcaattctttcacagctattttttatgcctgctaagcttggcacagctccaacttatacttttggagttagttatacttttgtggtagatttgtatatagaaaatgatatcaacggttgtatgattgtctattcataaagtctttaagcgaaatcacaaggcagttccaatcttttctcatgaatcaaaattcagaaattggttcctatgctcctgacaataccctgtataagagacagaacatatcttgttttatgagtgtaatttgagctggtgtgtagaaatattagagagcttatttgaggtactacataagttactcactttcttctgtgctggttggaattcttacatgaatacctaaatatatcaatggctgcctacataatttggacttagttacatctagtatgtcactggcaccctcttcttattatcccaacagaaatcgttcatcatttgtccttccttaagcctaaaaaaaagaaggaatcagatacaatttacaaattcaataacatcttgtttgttggtgcatagtgtattggggcataatgagctataaagtggtctatgattctttctttaatcttttgacatattactttagtgagagatagacagtaagttcatctggaatttgaagtgtattatggcatcagctgattgtccaatgtgatttgcagtagaatatatagattttaacggaatatgttgatatgtagatcctcgaaaaaatatactgtgctgcattgtaagaataagctcagttcagttacacccttgataatttatttgatgaaaatgcttgtgtaggttgttggagcagaaaacccagttctgatgtctgctgctgagcaaatatttggtgctggtgggaagagaatgagaccagctttggtgtttttagtttcaagagcaacagcagaattagctgggctgaagtgagtattttcaaggtatcttctaatatttcgatgtcgtatgtccaactgtacagaatataagcttcatttaaaactgcttgcttcagggaacttaccacagagcacaggcgtttggcagagattattgagatgattcatacagctagcttgatacatgatgatgtgttggatgatagtgatatgcgtcgaggtatgtatttgcatccttacaggaaaattcatacttgagtttcacttcagtcaaaacgctcatgagtactgcataacctagtgaatatgagtctttagagacaactccaagatcttgtactgctttctttcaacttgaaaaacttgttggtttgatgataatatcaactgaactgcctagattcaattacatcctctgaacttctaccctttattttgcttatacactctgctcgcagattttcccttatcacattattttagtttttctgaaagtcagtatgatctgaactgtacagggaaggaaactgttcatcaattgtatggtacaagagtggcagtacttgcaggagatttcatgtttgcacagtcatcatggtatcttgcaaatcttgaaaaccttgaagtcattaaactcattagccaggtaaataaattgcgttgaatattcatattcgggaagcctgaatttataactacagagtttcattattgatttgaatcttggaaaggccattccaattcgatttcaaaccatggaattagggcgcattcattatttaacctataatttatatgtaattattttagttctttggcaggtaatcaaagattttgcaagtggcgaaataaagcaagcgtcgagcttgtttgattgtgatgtcgaacttgaggagtacttgatcaagagctactacaaaacagcgtccttaattgctgctagtaccaaaggcgctgcaatttttagtggggtcgaaagctatatagctgggaaaatgtatgaatatggtaggaatctcggtctgtccttccaagttgttgatgatatcttggactttacacaatcagcagagcagctggggaagccagcaggcagtgatcttgcgaaagggaacctaacagcgcctgtaattttcgcacttgagaaagagccaaaacttagagagatcatagagtcggaattcagtgagactggttctcttgatgaagccattgagttagtcaagagttgtggtggtattgagaaggcacaggagttggcaaaggaaaaggctgatgttgcaatccaaaatctgcaatgtcttcctcagagctcttttcgaagagctttggaggacatggtgatgtttaatcttgaaaggattgactgacttagccaaatttcaaacctacgaaagctctgatgggaaaaccattattatagaagaagaagaaggtcctctggctttgaggaacaagtatcagtgagtcttcttctgctgatggcaagctgcttgtgactgtttgtacatttatagaaaggggtagctcattatattgtttactgaaaatacatttttgttgcagaattgaaaaaaaaagtgaaaaaaagaagaataatttctaaaattcttgtagaataaatctccaaggtaataattaatcaataatagtgttcagccattttatcattccattaacttgttatatcttccccatttttctccagcattggatgcattaatcatatagtgaggaaaacaattgtgtagtgtacaccaatgacccttgc

SEQ ID NO: 187738 - DNA, 1816 bp, Cannabis indica
accacttgtcttagactggcttctactcgaatttattgagagcctcacttgtgggggaagaataccgtggtaatagaaaggtaaaacacaaacaaggaaaaacaaactttgcacttaaacctagtacaccaacgttttccactatctacacaagtctaagaatgaaaatcctcaaaatgtttagtcctaaaaaccaagtaattgtccaaaatctaattttctcccataaaccctccactgagctttcagttccttggaatattctgttatttctttcaatccacactgcccacaaaatggccaatattgctgttttccaaagtttaattctaagtttgcaacaatcaaggcatacttctagaaaaggaacaaacttacgtacaacaacagtagttattaagagaataatatagcataaaaagagaaggcgcgcattcaataaataaggcaaaatttcaaagagcgactcagataattcagataatagagagaataaaagaaagacctacaatttatgatatgatttcttttagaataattttccctgctggcaatagctgaattttggaacaatcagcacccatattcgactgcatttgatccacaaaatgcttaggcatgttcctaataccaagttttgttaactttgttagatactggataccagagggaacctcctcaataagtgggcaagattccataaacaatcttttaaggagaggcaacgttcctctatctatcttcatcaacttcaactttggcaaatgtgataagcagagctcgtggagccttggaaagctaccttcctcaaagtgtagcttctctccttcatatgagttttccatcagatgaagacatactagattaggcaagcctttcagatacttcagtggattctctgtaaattttgagaatcgtaataccaaccctaccaaattagtgacatctgaaaaccaatgagggaacttgtttaaccgaccagacaagacaagtgtatgcaacaatggaggagaagatgatgaaattggttccaaatccaaaatctcatcaacatctccagtactcaaaagcaaactgtggaggtgattcaacttcttacatacttcacagatggctctagaagtttctttagacaaatttgaaatgcccaaaatcttcaaattgctcaaattctccaactcctttgtgaaaccaaccacatcttgatgcacctccacatgcataagaatttctaaattctctaaataactaaatccttcttgtatctttaccgcagacaaattgattagaggatcctctttacgtgaagcaaaaatttgtcggagactggatagcttattaatctccattggaagctcccacacaaaggcttgcaaaatattcaaaacacgtaaattacgaagcttgccaatggattttggaagcttctccacttgggtattctcaagattcaaatattgtagatcatgtatcttgcatatagactcgggaagaactttgatatttgtatctttcaaattcaagtacctcaattgaaacaaattccccacttcttttggaagataatcaagaggtgcattttcaaagtccaaaactttcaatagctttaaattttgaaacaaagcaataataaaggacttgtcaatcaactcagtctcattgacgctgaaaagtaaaatcgagcgaatacttgtgtaatgttggatttttttagttatagctgttggtatgcttccacggattgacaagcgacgatgtttgttttcaccaaattctgaatttttttggctcaaaatttgacaaaagcataaatcat

SEQ ID NO: 187739 - DNA, 2207 bp, Cannabis indica
attgtgaaaccaagctccttatccatggcttccaagaccatgatgattccccacatcttaaccctattatcaattctcgcaccttgtgtagattcagttgttgaattcaactatccagctgtttttaattttggtgattcaaactctgacactggtgagcttgttgctgcttatgggtccttccttaactccccttatggccaatcatacttcaaaaacccatctggcagagcctgtgatggccgtctaatcgtagattttctaagtaaattttctcacccttttactgaagtatatatttatatatgtgtgtacactaatatgcatgattctgcactaaaaattgtattagtagagacccttttgcaaagtgcatatagaaggtaggaagataactttaaacatttgttttcttactttggctcaccaaaattaaaagcaaagtcatagacaactgactgatgaggcccaccaggccaccaccagaagatgttaatacttccatagtaagagatttgttattattttattttttgggttgttggtacttattataagagtgaaaactgaaaacccaacaaacttgtctctcatttgccatggctaccaagactttagctctcttcatcctcaccttggttcatctctgttttcctctggccaaatctgttgagttcaacttccctgctgtttttaactttggtgattctaactctgacactggtgggcttgtatcttctgggattgaaaccattaatcctccatatggacaaaactacttcaaaatcccatctgggagatactctgatgggcgtcttatagttgattttttgagtaaacaaatatacttttatagctccctttatgctgcattcatttctatatcctctgtttttctctgctgttttagttattctctgtttagatttttaacatctacgagtgcaataatgcagtggatgcaatggatcttccgtttctaaattcctatctggattccattggtgcgccaagttttcgaaaagggtgcaatttcgcagccgcgggatctactgtgctcccagcaactgcaacatcagttagccctttttcatttggacttcaggtgtctcagtttggcagatttaaagctaagactcttgaattgctggctaaaggtgtttatattttcttgttcattttaattattttagctataacagtgcaaaaatgccaaagtttcctctgttttataaggggtttcagatagaaataagtaaatagtttctgagaaaattttctttgacaaatttaggtagaaagttttccaagtacattccaacagaggacgttttctccaaggggctatacatgtttgatataggccagaatgatgttgctggtgcattttactccaaaacgttcgatcagataattgcttcaattccaacaatattgttagaatttgaaaatggcataaaggtaagcttcaacaacacaaaatttagtcataaacatcagtattgattcctgtacttttcttaactttgtttgtttactattcagtatctatatgatcaaggggccagaaatttttggatacacaacacaggccctcttggatgcttgactcagaatgttctcaaattcggaactgacccatccaagcttgatgaacaagggtgcgtcagcgcacacaaccaagccgctaaactgttcaatcttcagcttcatgctctatctaagaaattacagggccaatactcagatacaaatttcacttatgttgatatcttctcaataaaatctaaccttattgcaaactacagcaaatatggtcagtatacataaaaacgaactaaactccacttgctttgatttctgttgaggtgcacggattagttgatttttctttttttgtaccaggatttgaacaacctattatggcttgctgcgggtatggaggtccgccattgaactatgattttagaatttcttgtggacaaacaaagatcttgaatgggacttcagttacagcaaaagggtgcactgatagtactgactatatcagttgggatggaattcattatacagaggctgcaaatcagtttgtttcttcacaaatactcactggaaaatattctgatccacctttctcagacaaaatgcctttcgtcctgaagctcaagttctaaacacaataagaaacagttattattattattatt

SEQ ID NO: 187740 - DNA, 3872 bp, Cannabis indica
tttttctttttatttttttggttttttccttggagctgtcactttcatggttaaggactcaactgttgttgattgtgttctctacaggaatctcgcaaaaaacaatcttagtgggaatcttccttactccatttcaatcatgccttctctaaattacttgtaagagatttgtctttcttgtataagtttttccttttggtgaaaatctgctgcaacatgttgtattgtagctgtctttgttaatgtctgaattgttggtctcaggaatgttagccataactcactctctcagtcaattggagacgttttctctaatggttctgctcttgcaaccttgtaagatatcttatctgatcacatgattatcatcatttgaaatttcattgacttaagagtatcattttagttgtaaaattaatgttgtgtactacattctcacttaatttatcaccattcatctcatatagggatctctctttcaacaatttttcaagtgatctccctaatgcaatgggttcattatccaatctttcttctctgtaagtgtttttacattgttttatagaaataattggtatgagattaactttgcttagattcttattatctctaatattaatgacagctatgtgcaaaacaatcaattgactggttctctcaatgttctaacgagtttgcctttaactacactgtgagtttctcttcacaaacttgagatgaattgtattgtttgatattttccatcttgttatcattgtatactgtctcttcaacagaaatgtggcgaagaaccacttcactggatggattcccggagaacttctttcaatcccgagttttatgtaagcattttacaattttcaatttcttgccagtctgttcttaaagttgaactcctacactgtacttgtttcaaaataaaacagatacgacgggaatacatttgacaatggtcctgctcctccgccgccaccatttactccacctcccccaggaaaatcccatggtaaccgtaatcatactggatctggcacacacaaatcagattccaatggtgaaggtgaagtatctcattcaaatggagggctggcaattggggctttagttgggataattctaggctctgtgtctcttgccctcattgcattacttattcttgttgtttgtatccgaaagcataaacggaaagatactggtgcaagaacgtcaggggcaagtctttctgttcgcacaaatagtggtataattttcttaatctgcaattcctttgttctcttacatttgcattacatatcggtatgtatatagttggctatttagactattaacttcctctaaatttaagattaagtacatttctgaaaataaatattgcagtttaagtggttactggctacatttttggtaagttatatgattctcttttcgtgccttaatctgtaaaatatttattttacatagggaaattgatgttacatgttgattaatttttatgtcgcgtgacgctttgattgcagtaaatactgatatgcaagaacagagggtaaaacccatggctgctgtaacagatctcaaaccccctccagcggaaaaggtaatggttgataggctgcacgggaaaaacggcactgcaaagagagcaaagtcacctatcactgctacttcgtacacagttgcttctcttcagacagcaactaatagctttagtcaagaatttctaattggtgaaggttcccttggtcgtgtttacagagctgatttccctaatggaaaggtacttgctttcaattttgtttttttttgtccttttcttttctgtatctagtcaattcaatttatttattttgtgtctgcagataatggctgttaagaaaatcgataatgcagcactatcgttacaggaggaagataactttttagaagctatttctaatatgtcccgtttgagacacccaaacattgtgacactggctggatattgtgcagagcatggacaacgtcttctagtttatgagtatgttggaaatggaagcttgcatgacatgctccatttttccgaagatggaagtaagattctcacttggaatgctcgcgttagggtagcacttggcactgctcgcgctctagagtatgtcaaatgtgtttatgaattgatgtctctccctttatgtgtgtactaagtgtgttgattaagggtgctaagttggtgctgtaatggatattacatttttcaggtacttgcatgaagtttgcttgccttctgttgtacatagaaacttcaagtcagcaaaacattttactcgacgaagagcttaatcctcacttatcagattgtggagtagctgccttgacaccaaaatccagaaacgaaaagttagtacattgtgaaataattatggttgttgctagattaacaagtttatgctattcttttattcttgtacgctatgctggcattactaagaagagagcaacatcttctttaaatgttttgacaggtttcaacacagatggttggtcaatttggatacagtgctcctgaattcgcgttgtcaggagtctatactgtaaaaagtgatgtttacagttttggggtggtgatgttggaattgttgacaggccgaaagccactagacaggtaaaccagcttatagattaccaagttgtcaggtttatgtttgttaatgtgttcttctactgattgatttttgttttaacgaatgtttagttcaagagttagatccgaacaatcacttgtgagatgggctactccccaactccatgatatcgatgccttagccaaaatggttgatcctgctcttaatggaatggatgctgcaaagtctctctcacgctttgctgacatcattgctctatgtgttcaggtactaatccaatgactcctattcttgcttgcttatctgtatttgaatcacttctaatgcttggttatttttatagccggaacccgaatttcggcctcccatgtctgaagttgtacaggcactggtgcgactagtccaaagggccagcgtggtgaagaggcgttccaatgacgaatctggtttttcatacaggacccctgatcacgaagcgattgacatgtcgttttaagtgtttcatatttgcaattttgcaacataatagggagtaatttctttgctaaaactcagcacacagaacaaaatgttgtgaggacaaatcgagatcggctacagttgaacgaaacgaacatgcacagatataaggctactaaaaaattaaaaacaaaaaaaaacaaaaacaaaaagaaggttggcaataagctagcggagatttgtaattatgatccatatacaattgtgtccattattgatactcgaaatggtattgagggagaggtataggctggagtttataactgtgtatttattttgtattaacctttttattttggatacttggatgaacaattacaatgtaggtgcttttcgcatcacaataagattttatttcgatttttgtataactaaactcaatcatcatttggccccctaagtgataacacaaaagtcagctcttgccctctctattaataaagtcaagttattattgacatttgctttaatgaaaaatgattattcgtaaattaattgaattgaagctaataatgtttgacaattcaacatagttgttaattttaatcattttaggaccttgacaaaattggactaataataaacctgcaaggacaataaattttgcttagccagaccattcacaataaattacttgacattatttattaattatgatttgtattttttaaaagataattaagatttttgatctctaaatttgaccaatatcaaatttttgtttaattttattca

SEQ ID NO: 187741 - DNA, 1731 bp, Cannabis indica
ctatataaattatatatatctacattttgaagaaaattaaaatgtagtattaagtttcaaaaacatttacaattttgtttaaaaagtcaagttgtttatggataaggagtaaggatcatcaccatcatcatccacaccacttggcccacctacccacctaatgtgtcccactccactccacattgcattgcattacacttcactcttctttattatatcaaaaccaaaacaaaaataaaaaagtgtactttaatcctcaaaagtctcaaactttatcagtagtttccttgccttgtatgtatatcagtatatgtgtatctacatgacacgcttcacactctctctttcacagtgagaccaccagttcatgcagtatcactcaaactcaccactgcccaccacttaaagtaactctctttattagctcaaatagctcaaacaccaaaaatttgagttgggttttgaaatggggactctggcggcggcggcggtgttcttctctatggttatgttggccggagttacagtgacccaatccaagtttatggtatacaacacttctcactctgttgttcctgacaaacttaatgtccatttggttcctcacacacatgacgatgttggttggttgaagaccgttgaccaatactatgttggttccaacaattccatccaggtttttctctctttgattatatgtggatatatgtatattttggcttctttgaatgtatgataactcttatggaatctgagactattttcctgttcttttgttttttgattggaaaacaaaagggggcttgtgttcaaaatgtgctggactctttaatccctgcattgttggctgacaagaatcgcaaatttatatatgttgagatggtgagtgtttgggatttttagtgaattacttatgaattggtatctataatgtatatatatgtgtgtttgtatgtttgtatgacttttgtgctgtgtttttgtttgattgaatcaggcattctttcagagatggtggagagatcagagtgaggcaatgcagcttgtggttaagcgccttgtcaactcggggcaacttgagttcatgtaagtattgggaatttgctaaattaacaacatgaaagttgttaaaataacttaatttggatttcttagtgtaaatcaacggttgcttgaaccgcctcagagttgttttatggtcgcttagtgtaatttttggatcattgggatggagctagattttattttgcaagtaatttcttttaaaaagttagtttgctaatacatatttgaataaataggtattttgcctcctgaactattattaggcactaataatcagcaattttaccccccaaactataactaccatcatattttgctctctgaatttttaccaatgccaaattaagctctttttatttaacagaagttcagagggcacggcgtggcagtggtaaaaagtttgggggacacgatcttattagtaacaaaagttaaggaggcaaaaataacaatttggttttgaatgtttttaactaaattctttgttgcagaaaatggggccatgtgtatgcatgatgaggcagctactcattatattgatatgattgatcagacaaactcttgggcatcaattccttaagagggagtttaatgtgactcccagaataggttggcagatcgaccccttcggacattctgcagtgcaggcttacttgttgggagcag

SEQ ID NO: 187742 - DNA, 2270 bp, Cannabis indica
aataaattgtacggatggagtcgttccaagggtatggactaagaagaagaacaaaaataatacttgcggtagttattaaattacgacgagagagcttaataattcagtctatatttaagcaaataaaaacttgaaaaatcaaaaatgaaaaaactctattaaagaaaactcaatataggaatgaaacatccaacatttattgctttattgtgcccaaataatctcatcacaattgttattaggaaaacctcaaataatacaacataagtactacatatgtatatgtatacattaagaaaacgagcacactaaaatagaatgtaattgtgcagaaattgttgatggtggtgtttttattattcttgcttgttttgttcaccttgccatgcccaaacaatgtcatttaaagctggtcttatatcccttttcataattcttttgtattccaatgtatcaccactggacttgcttacctcaaccaagtgaaaggcaggtgtgaattcatatatctcagcttgaattgaaattaatccttttctgccttcctttgctccctgcattttcaaggatcccctgtcctttttcactctcagctttaggtgttgagcaatgtcctccaatttcgacatgattgaagaggcggggcatgtggatgtaaattgtgtcactctcttgtcatccttttctgtaaacaaaccagaaagatcgaatccagttgagagagaaatgatatcaaaagcattcaaattggtaggtttggctaactcatgttttgcctctgagatggtatcattgtgttcacaatggccaaatgctgcatcagaatcaaatggagttatttctgtcttacttattattatggcttcacaattgaacccttttgtgaaccatggattttccataattttggcaatcgaaatcctcttattcgggttaggatttagaattctagcctgcaattttctcacttctagtgaaaaccaattaggacatttatagtttgccttgcctatcttcttatacaattccatgagatttgtatcatggaaaggcaaataaccagctaaaaggacaaacaagatcaccccacaagaccatatatcagctttagccccatcataccctcttctacacaaaacttcaggagctgcataagcaggagttccacaagctgttttcagcataacaacatgttcttctggcctagactcaacaagtgcacttaacccgaaatccgttaccttcagcactccattctcatccaacagcaaattctccagcttcaaatcgcggtgataaacacctctactatggcaataatcaacagcactgatcaactgttgaaagtacttcctggccatgtcttcctgaagtttccctttggaaatcttgttaaagagctcaccacctttcacatattccatgacaaagtaaatcttagttttggtagccattacctcataaaactccaccacattagggtgtttaaccaatctcataacagaaatctctctcttggtctgctcaatcataccaactttcataatcttttccttgtcaatcaccttaatggcaacactctgcccagtctcaaggttcctcccatggtaaaccttgccaaaatttccttgacccaacaatttcccaacatcatatttctgcatcaaaacattcactttatttatctccatcacacccaaaaacttccaatcctataaatatgtacctgattatatataatctcctgtaactaagctcaaccgtcttcaccaagatcgagcttcaacttaaaagaagctccttcaatgaccacccccatttgcatatgtttctcctcttgaaactcagccaaagtttgtaaacacagcccagatatgaacactatgtcaaaggttttggtgaatgtaatacaagcattgaacacatctcttctctgcattcctatgctttgatgaagcttgtccactacataaacaaaaaaaacacaaatttaagaaatccatggtacattgcacaaatgcatacatacatacatacaaacatacacacaactcaagaacaaattagcagcaaaattaatggaaaatgaaaaaggagaaaagagaaaaagaatgtacctttggagaaaggacactgcttgtaaaagaacaaaatgaaaagagaagagatatatgaaagacatggaagagcacaaaacaaagtgtgtggtctgtccgttcttcattccattctcttacaacttataaatactaaatagttgttgaagacct

SEQ ID NO: 187743 - DNA, 1659 bp, Cannabis indica
agattgaggattttttatctttttatattgatttgtaataaactctgattcttgttaataagagtttagtttcaaaaaaaaaaaatatgtattttgaaatatttgtttaacataatgcttggcccccatgaggtaattttcgcataagattaatacatatatcttttcatgctgtttcctttctgtctctagtaagattcaacctaataattattgtaaataaatttcaaatattaatttttgaacagtttaattcccacatttggaatcgtcaaaatattgaccgaaaaagtgtcgtatacccacgactattgaccatgcatgcgttaagtaaaaaggctttaaactaaagcaaaaggcacacatgacatgagtaagttaaagtatagtatagataatagacgtgaagtacgacaggccagagaggcactgcactacgtacgtacttattattaattagctgatcacatatattatatttaattcatagctactactactactagtgcttgtgacaaatcacaaacatagggttgcgttttctaagttttcctttctcatgatccaaacacaaataaataagaaaaataaatcaattgggaaaaacttacattgcctttattacattcagagtaacctacccaacacctaaatgttcaaggcaaaaaccccatgcgtgtacaatatatatatattggcactttataattttattagctcattgacacttcatatatttatatatagtgacttaatttcttcttgggttcttaaaaatctcagcagtactactgagtaactgagttaaaaatcagaagggactcaagatgatcttcagtgattcccagtactatctgaactaagattctttcaattggtttggtttatgtaaatgtgataggacaatacactttaattggatatatatcactgtcagtggggaaaataaaagctagagctttatgtatatattacccgaagaaaactctcttctctataataacttggtaaaagggtctaatcttttgtaatcaaattaagcttttttatggtaaaaaagaaaagtaatagaactttaacttttcacgtaagaagagataaaatttattatagcaacaatggattctgtttctttaaatagcacatgatcttgagaataaatattcttaactagttcactaataatggtataagggaatcacatggtaatcggtctgttactgtgcttttaatttactaggtgaagcctttattaatgcaagaacatatgatgagtattgtacagtagtactattgtacgtctaggctattgatataatacattcttatgagattttttttggcaaagtagtctacatgatatatatacttagtattttttattaactatatatactgagttattttcctcaaaaatatttatatttatatatatatatatatatatatcttagttattagcaggaaaggaaaagttaacttaaatgttagagttgtgattatatatagttagtaatatggaatatatgttaacttagaagttatatatagaaatgttatattttattattatttaaatataataataagaaattaattcaattgtagtgtaattgagttatatacaaaaatataatttattaaattttataaaactaa

SEQ ID NO: 187744 - DNA, 10031 bp, Cannabis indica
aatgtttctttaaagtttgtttaaacgatctgcaaatagggctgctcattgtcttgctagagagtcttgtttttcgtcagattgtgtttttaatcagcataatgtttctgctggttttaagtctattgtaatggctgaaagtgtttaatgaaattctcacttttactcaaaaaaaaaaagaaacactcagcaaaacaagtgtgactttgattatattaaataaatttatcgacaaagtcttaataattgaaggccatccacaaaataaagcaacaaattaaataacaataaataaaattatattacaacaaaattaaataattatgaaagaacgatgacaaaacaatccataatataatataaaaccatctatatcaaatataaagacttaaaaatatttaaaatttaaaactgaaaagtcgttgaaatagaagtcctgaacacaaaatggatcatttttcttgccctatgagtctatgaccataccacaaaactaccctaaataattaaagacaaattataaaaaatggcacaacagtcgtaaaaagcacaaaatccttatcaaaaacattaaattattgtgcaaaaactagcttagttttattagcttgtatactttaaaaaaatattaatactctttgaatagtaagtaaagaaaaaaccaaattattaacttatttttttgaaaaaataaaactatactttttcttttttaccctaatgatacgtttactaatgtgtaatcagaattgaaataacagaatgagtgaaatgaaaggtattaaacaaataaaattaatattttattatgttatttactaaattgactagaaaagttattattattttatttacaaaattaggaaaggtaatcgaaatggtttagatagactaaattaccttcactaaaaatatttattttttatttctttattttaaaactaaattcataaataattagagggtatatatgttaaaaaaatattaagaaaaatatttttaacggtaataccattacttgattacataaaatggccacatgaccgttcttaattggtccatattattaaatttttttatttaaacataccaaaaagaaaatcacacatgcatattaatttgacacttgaggtctagatacttacaaaaattttaaaaatataacttatacattattagtatcaaaaattaaacttaaatatttataccgtaaattattctaaaatattatattttcaaataatatgaaattttttaacaccatgaaaatatcacatttagaaatactcttactacaattctggtggtattaagagtacttttcacctttttattattttatttttattttaaatatgtgtgttgttgcactggcgaaacgattcgccacaggaaggaaggaggagacgacatggtccgcaatgcgcacacaatgcccaagataatgccttttatttatttatttatttttaaaaaataaaataattaatatatgaaattaagaattatgttgttgttttccaaattaactaaatgaaataataataataataaggtgggtgtttgggaagtttaagcaggaaagggcaggcaaaattggtggtgattggaaccctttttgtgtctcccactcaatttgtcttgttttcattcgaatcccatcccatgcgtagtttaaccttagccaatccaaatccaatgctgcttttaattttaaccatcaccaccctttttttcttggttaatgtcactttctttctttcatttgtgataataatttatttttataaaatcttatttttgttctttacaaaatggatgttaaaaagagaataaaacatgaagtattgcatataaaattacttattattatgtttggtaatgagggcatgtcagcaaaatcttataaagaataaatcagtggggtttatgctgacaaatctactaataataatattatgattaaacgtgttcaaaatctatatatttcattataattattaagttaccttttagtacaagtataattggtcaaatgattggttagaagttgaggattataaaaaccaaattttttgacctaaaacttcaactatagctaattaacaacataactcaatcaaaaacaacatttaaaaagtgcactaattaacaaagttggtttataaaaataagaatgtaattaaacaaaaacaaaagaaaaaaggtccaaacaaacaaagaaacaaaaacaaatggaatgtttccctctagtctctactctactctagtctagtaggaagaaactcaaacataataagctccttattatagggtgggctggggaaaaagcaaacatccctttcatttactttttggtgttacaaaggcagatcctaatggattctatatagagagagaaataaagaaattgctatggtggcctggcccatggaggccataacttatgtgaggccaatggggagcacaatattactattacttgaagtattaaattatataataataatgaaaaatcaaagataatttgtacactataaaaattaaaaaaataaaaaagaatgactatggccatggccatggccaaatttcaacattcaggtttcccacggtgtaaattagtataaactataaaaactacaccaggaacatgtcagagtgttttcacctcctcagtatcgagattaattaaaactaggcttaattatataaattaataattaatcaaacattactaattaataaataactttttattgattaattaatgttacagtgtattctcaatagtactgctgaatatatatgttgttagttgttaattgtatttgctcttacctaacaagtaatttattttaaaatggatataattgttgtaaagttttacagttgataaaatcaatgctagtgtactgtattattctagtgaaatatagttgtccatgaagtaaattactcaataatctttttttttttgattagtggttaaattggaaccacacccccaaacaaaagcagaacaaacaacaaacaagaagaggaaactacagggcgtgagaggccatacaaccaagcttaaaaaaactgtctaaaatagaaagttaaaaactaaagagaactaagctaaaaaactaaagagaactaagctaaaccatgaccatccgcattagccagctgcgggaaatcattaaaattggccaaatcgataaacccaaacttgttgttgcgatttgcccattgagccacataatgggccacaccattgcaggttcttggagtccacgtgatctcccaaagattgaacttacctgcaattgtacaaaacttgtgaaccttgtcttggatattaaaatgcaacttatgtatgtcggatgaactgcttttagctgcaatagcgtttaaagaatcacactggaatacaatatttctgtatccaagatcaactgctactgctgcaccttcgcacacagcagacacctttccaggcaatgggtcacagtggttcagccgaaaggaatggattctcaggatggttccagtgtggtctcggaacacagccgcccccgttgattgattatgtcctatagcaatatcggaattgcaagccatccagccttcaggaggaggcttccattccaattgaagagagtcggacgagttataaggaggagagagttcttgaattctgttgttgatgaagttgattgtgattgcaattggggtggattttttgtcatgtagccgcccatttcgttccctccaaatgctttcaaaaactatggcagcccccccaataattgattgaagtcgagattagggggtctgttaatagcattcaaaaaccaagcaagccaactatcccaatttgatacagaagtgacatcgactcttaggctccaacaacatccaaaccagattgctcttacatagttgcactcccaaaatagatgaaagatgttttcaacggaggttgagcagaaggcacatattgtatcatgaataggtatagtagagctaagtttttcttctgtggggaggcaattagcaaggattttccaccaaagcattttcaaccgattgtggatctttgccccccagatggtattccacttcctatccccttccacacttggattactattctttagcattctgtatgctgacttgattgagtactctctactaggattcggcagccacaaccaagaatcatgtaaggttcctccaggcaataagatgttaaggattcatttggcatcatcatgcctaaaccatctcctaatcaaatcttcattccattgatggttgttgatgaaattacttaccaaactaatccccaccgcatcgtctacacgagggattggttctcgattatcccccgaaacccacggatcaaaccaaattgaggtggaattgccatctccaatcttccgacaaatacctttttggagatcactccgcatacggagtattactttccataaaattgagtcagacggcttagcttccaaatcaaggaagttctggttcttgatgtacttatcagtcattactcggcgccacaaacaatcttcacttgttaaaatcttccaagcccacttcatgaggaacgctttgttcataatctctgtggcacggaatcccaacccttcatcacttttcggtttacagaggcgatcccaggctaccaaatgaagctttcgttttagctcagtatccccccaccagaaatcactcaaaagtttatcaatcttgttagccgtcgtggtggggattacatatgaggaagcaacataatttgctaggcttgaactgactgccttgatcaggcaagtttttccagtgcttgacagaagccttactttccaaccctgtattctctttaacaccttgtcaattatatgctttgtgtcctctgttcgcttgacagatctaaaaagagggagacccaggtatgttgctttcctattcatctgtctcatgccatgaatctgagcaataacttgagcctttctacctgccactcctctcgaaaagaacacaaaggactttaaaaaattgattgcctgtcccgagcagctgcagtaggagtttaaacagtccaagaaagatctagcctcgcggactgtagcttccccgaatagaatgatgtcatccgcaaacattaaatgagtaaccgagcctccatttcttgtcagtttaaatcctttgaggaggccttgcctctccttctcgatcagaagacgggacaaagttccagccgccataatgtaaagagcaggggacagagggtcgccttgccttaggcccctctccagattgaatttccctactattgaaccattcaaaagcttaatttcagcaaccgaaatgcaaaccttaatccaatccgtgaagagactattaaaaccgatttgatgtagcaccttgatgaggaagctccagtcaagtttgtcatacgccttttccagatccaattattagcatgaacccacgtttgccttttttcttgttcatcgaatgcacaatctcgcgggcaatcattgtattcttggcaatatgtctacccttgacgaaagctgcttgattagaagatattatttttggaaggatatctcttagtcttgaggcaatgatcttggaaataatcttgtatgccacattacatagagcaatcggtctgtagtcattgactaggcttggggagtcttttttcaggaccaataccagagaagtatcgttaatgaatttaggcagctcctagtgagaaaagaaatgtaccaccatctcgactagatcctcattgactgcgtcccaatgatgtaagtaaaaacttggtgggaagccatccggacccggggctttgtctttccccatgtcacaaagggccgccttgatctcttcactctgcggaataccattcaggagattattttcttgttctgtgataattggttcaaatatcccttctctgagcggtgtgaggtcggggtcacctttcttgaatatctccttgaacttattgaggaaacattgagcaatttgatcctggtctcgtatccaatcttcgtccggagtatgtttgatgtattgaatatagttccttcgtcttgtcacaatggtagacgccataaaaaacttagaacacatatctccctcttgaagccattgcactctagacttttttttccaatgtatttcctcccgaagtaaggcttcagaaagaatttgcctcgcgttttaaacctcaaagccattgtcgggattcttttgctcagcctgttgcaagttggactttgcaagctgtatttgccgagagagatgagtgaattgatttttgttccaatttccaagttttctgcccgtagctttcaccttcctgtggaaattgatcataggatttgtgtgtcgccttcctttccaagcttcctttactacccagaaggatcggggatctcttgcccacatgttttcatatttaaattgttggcctttgcacttgacccctcccatagtgtcaagcaacaaaggtctatggtctgattccgtagcggtgaggtggttgatgattgcattggggaatagaattcgccagtcagttgatgcgaggccacggtcaagcctggctctcttcattgccccaccaccatttgaatttcttccccctttcgcccacgtgaaagaagggccaagatatcctaagtcgatcaatccagctctgtgaaccattcctcgaaaatcaaatgcatattgggaagcattaccattgtagttgaagcattccttgtcattgagagttccattcatgtcaccaagcatgagcatggggacttgggaattcagagcaatgtcacccacgtgcacccaaaaattctctttatccgatctgttggggggcccgtaggtgcctaatagcatccatgttatcccggggggatcagaagagatttcacccattattaagtatttggaagaagcttgaaccttacattgcactcctttcatccaacacacggcaagtccccccgagagcctgaatgggggaacgtaatgcaagttcataaaatggagtttggtacataccctggtgaatttgtcaagaggaagccaagtttcaaacagtatcatcatgtcgggtttatggtgatgcaccaaatgcgccaattggcgaactgtcgcggagttcccgagaccgtgacagttctaagctaggattttcatggcgacattggagacttttctgggcaagtctccatagccccaaattgaaaatccacctcaaaattctccttcatctcttgtttgccttcaacaatttcagtaattgtacaacttgtgcttggttttttctgtttttcaatgatgacaaaatgattatctaagtttacctttagatcaaatgttctatcctcccagtggttaatcattgtagagttgcctcccaacttagatttggtattcttccctcctttgaaggacttaggagtaacagccaggggagaatgattttttgggggtctgcctcttctttttcgagcaccattttcgacaggagtcccatgaggcttggtcttccttcttcctctcctcgcagatggcttttcgtcctcatttgatcctggtgagtagatgctttcaattggcacttctgagaggctcacgggtgtattagacttcaccttagtattgtctgtatcagatgcaatttgctgggagggagaggcagtatcattgccagccctctgctgggagagacaatgtattgaattagatgaacttggtgatgagttgggctttgtattggggcgaaataacagtccatctgaagccttcctttttcttggcccatgtaaatgctcttgcactttaaagtcttctatgtcaataatagggttaaaaagggtaggctctctatgaaacttatccatagttaaggcccccataagtgtaactctcgggctttgggctgggcccaacacgcgtttgaaggccagtcaatacattgggcctggcttcccaggatcgagtgattaggatccatcaactcatgacgaggtatactatgattggtgaagttttttgctctgttatatcagttgtcgtcttccccaggggcttctcaaaagagatatcggtttggccaccttttgcattgcaagtatttgtttccaccaaagaggaattatccccatttgtccccatcacaagtgctggcccatgcatgcttgatgatccctggtcaccatcgctggctagtttctttttggtctgagcggctgtatattgttcagccgcctcctgcaattcttgaatggagaccaattttgaattattaccaaatggggcaatttcaccaatacccgggaggtaaactaatgggagttgggtaatgaccagttccgattgtgagtcaccgccggcctcctcttcatctgtaacgatcctcttcttccccggatattgtcttcggcattcccttatttctgcagcttcaccattttgaatggctttgtgtaccttcatctggttccgaaggataggatcatgacataatcgcttttgcaaaacccagtcttggaaccatttagcaagagggttgagaaggttgatttctctgaagcatcattttaagccataccccaaacattggataggaattaccattcgcatccttaatgattgttggagatttgaagcatacactctggtcatgagtcagaacaccacatttaaaacaaagcttgggtaggcgttcatatttatactggaggcacaagtctttaagtctctgtcgcctcaggaagaatcccgaaaaaagtggtttattaatgtcgattgtggcttggaatcgaagggtactcataccaattgcgtctttaactccgggagggagttcatacacaggggatgccttggaagccagttctttaagattagaaaggttccagtagaaggggggatgctttcaatgtgaacccacattggggttttatcaaaccagacttcagaaggggagagccatgcaggccagggcgtgatcactattaaggctccacagatgaaccagggtctcctagcaagaacatttaatgcgtcctctctgcgtgcaaatgtgaattggataatgccatctccaatttctttccatttccagcctttaatggcattccatgagagtttcagagagccttggatggctgcttttccaaacttgtggcggctaataatcttacccagtaagacttggttagcttcttagggttcatcaacttcccctgggttgagggcaaacgtaatgtcatcatgggatgtctgcacagagtcttcgaacaggtcacagaccttcaacggatccattccaaatggtgtcaacagtgtgaacttcagaatgggagagagcaaatctctattacttcaatgaagtgagctcttggagagcatttattacaactattactcaatatctattacttcaatgaagtgagctactagagagctcctggagagcaaatctctattactcaatattctaactacaactattcctagctactattatgaaaatcataaatatatatatatatatatatatattcgtattattatggaaagagcattgttataagactgatttttgagtctcatatatacattacaaatcttttatttaagctaaaagaaaacaaagaatgaccatttagtttcactttcactatattattattattattattattattattattattattattattattattattattattattataattaaggaaatttgtggcaaaagttctcaaaatgtttattttgttgtagattaatcctcaagctcgaataatagcggcaatagtcctcaagatcacattctttataagtccgttgatcataaatttatatacttcattaacttattcaaagttgccatatgtttaaaccttattggttcaaataataatttaattaaaaataatttaattaaaaacaaaaataaaaaataatattataaaatcataaaaatt

SEQ ID NO: 187745 - DNA, 2143 bp, Cannabis indica
tttttttttttttgaaatttcaggcatcttattcattagtatatatataacatgtctatcaagcaatggacatcatgcaatactttttatagaaccggccctaagttaaaataagtagtaggtaaaaatttttttagattcttacaataaagagtatttctaaaaattattaaaaaaaaatatataatatttttaaaagatttttttttttaatttgggctcttaaaatgagtaggctagacacagacttagctcgccttaacttagagccagccttacccctgcaacaattattttttcaggccaataatacatcacgacaagttgttttttgatgttttttttaaacaagatgtgttttgaacactaactatacaaaaaaattatatatgacatgcaatttaagttatttttaaattttgaatattattgtttttaataacaatatgatacatatataaggatgttagactcttttaacaatgctaaatacacacctaaagtacacacttattacataaagtgatgtataataaatattagttattgatatttttaagtgagactatattacttttaattacatgaatgtgattagttgattaaaggtttcaaacaaaaaaaaagtttcaagttcaaacttctaaagcattagtactattcaaaataaatatatagctttacgtcttaataaatacgaaaaacgtaaccccattaaattacagaaattccagtcgataaacaatcaaaaagagctcaattgttttcttattattatttagaatatcatatatatagatttatgacactttaaaacaatgatcatagaattagcatgaatgatttgaagtggcaagacacaagagtaagagacctctaaaaaatagtagacaaactttgaactaacttacaaaattcttccatttgattttacaggttggacctagactgaacaaggatagagaaaggttccctccaaataacattcttttgatgttggcgggggctggattgttatggttaggatggacaggattcaatggaggagatccttatgtagtcagcatggatgcttcattagccgtattgaacactcatatttgtactgccagtagtttgctcacttggctcgttcttgacattgtgtttttcggaaaaccctctgtcattggcgcagtccaaggaatgatcactggcttggtctgtatcactccagctgctggtaacactcccaaattaacatatttgaataatttcaaaattaataagagcatatttggtattgttttctgtttttgtttttaaaaaattatttttagaaatgagaacaaaaatagtttttgaagtttttaaaacacaagtcacgtttggttagtattttttgaaaacaatattgaccaaaattcttgttttttgtaactttgttttctgaaaactgttttattaaaataaggcgaaacaagttaaattgttttaaaaaaaaaaaaattactgtgtttaaaataaaaaacaattttttagttattatgccaaacatgcactaatattgtctaagcataaatttttttttcttttataggggtcgtacaaggatgggcagccattatcatgggtatatgttcgggctccatcccatggttcactatgatggttgttcataagaaatggaaaattcttcagaaggttgatgacactatggctgtacttcacactcatgctgtcgccggaaccctagggggacttctaactggcctcttcgcagagccgaagctcaattttttgttctatggtcactataacgagtacatggggttattttatggttttcagatgggaaaagtgagggaaggatttaggcaaatggggtggcaaatttacgggatagtgtttgttgttgtcctaaatatcattatgaccagccttgtttgcattgtggtgagattaattgttcctttgaggatgtcagaagaggatttggagatcggagatgaagcagcccatggagaagaagcttatgccatttggggtcaaggtgagaaagaagcgaatgctaataaccacaagtatggaggaggtcacattgagatggcgtaagtagaaatttcatgtcttgcatatggatgattgagctctctctctctct

SEQ ID NO: 187746 - DNA, 8014 bp, Cannabis indica
agagagagagagtggttaagcatgagtggaggaataggtttggaagaagagaaagaagaagcagagtaccacaacaaagacttcgagtgggaagagctcagagcccacgttgaaaacgccccgtcgttttcccatcacttgctcccttatcaaccccaacaccaactgctccaatccgattcagacgcctggaaaagctttcacatccgtcattcttccggcaagttcttcaaggttcgtcttttaattaattaatttatttatttgcttttctcaacaaaaaaaaaaaaatcataaaattgtttcaatacttgcactcccaaacattagaatttaaggtagagataactatccgatgaactagcatatggtgccatatgttgataagagacattgttttaaagcgagcaatatgtagactcttgtggaatcattatgcttgttgtcattatctaactcctgtttattttaattgggatttctcctaaatgtaatctttgtttgacaaattattaagctttggcttgtttacatagctcttttcatacacacgcctctaaaaagtttgttctgctgaacgagttcaatacccaatagagattatgcagagtgcttactaaatgttgattcctttttccatttgtcagttttgtagtttgatggaaagttgatttacattttcctgttgtcattcattgttagtattactattgcatactgaaaaattaagaagtataaccattgcatacttaagtttcccgagatagtaattgcctagtcactgtttgtattgtatgctttaattaatgataaaagatgaacaacttaattgttttctagcatagatagagggcagagacacttgcacagtgaaaactcatcttcaacattgttgaagccaatatcattcttttgcttcatctccctgctgtgggggctcttcttcactctcactagacatctaatatgatctcaattaagcttgttatgaacttcatagagcaaaatactcaccaaggggatcaaaacaattagagaaaaaaaaattaatatggtttgcatgtctaaggggaaatcgtcatctagcttcatttcattagatactgtagaatggagaagatacctgcctatcttggatgatgtaaatcagctaaattacgaattagcccatcaataactacactacttcaacatgcaatctttttcactccattgctttccgtaacttccctaaccatatggaagtgattccacttctcacaagtagtatatataatagacaaaaatccatatccaccatctgtcttgggctctgacttgtgcaactctcttgaacctatcttttccatgtttctatcagcattacaagcactaagcattgctccccaaatagaacgacttagtttcattggcatctactcgatcaaataatacaccctaaccaatctacccgaacaacctaagagatccacctagcatttgtagtgctcaactcttggttcaatgccaaattatgagtatgggcggtaagaacaccaataaatgtaatttcatttggtgttacatcttgctacatctaagaaaactgatttgtaggtttgtttccataaccataaaaagcaagtgattcattgttgtccacatagtaacgtccttctttgttactctctcaaaaaccaaaaagctcttttaattttgccacacctgtcatacataattattagtggtgagcctgaaaaggcatctacttgcttctgattctaacaacaatgttgtgtatcccacttttttactctagtttttgcagtagcagagaccaaataaaccatcatgatgttgttaggcctataattacaaccatgcttctaagtagattcattatcatcttgtaatgacccttaagggcaaagctagctttcaatgaattctatgaaactaaatctttcctaggtaatttttgaatcaacttagagcaagttcaatactccggtcttggcatatacagtagtcaaaccttattcaccaaccttcaaaactagcttttcaagaacaaatggtcatttcttttaagtgtatcaaagatggatatgatacaaggttgtccatgtctagtctgtattaaaaagagagtcgtctctcgctctctcatgatgctccttggacataggctaatgtggtcaaaccatgtatcttggttgttgtttttattatacttttcctatttgtttcaattttcggcattatttttcaaatcttgaaattatatgatgtataacaaaactcaatacaaaattattgtggtcatctcaattcaatttagtcgatctcaacaacctcaaatgaagatatcatagttgaagcttttcctattacaataataagagaatgtacatgttatattattgtttttcggtaagacatgtactttagtagtcaaagtagattcaaataattgaacaattacctcccattcttttttcatattaatttcatttgactcgtgagaaaactaatttgagtaaaattcttgaattgatttttaacttgaagctatttaatttatttatagatgatccctcgagcattggccaaactgtcgtatacgcatcgttatggacgaggcctccgttttttgagttcaatttcttcaagcaacaataataccatatgggatccaactgtggcacttaaattcagtcacccaactcttatttctcttgagaaatgtagttcaaacaatcaattcaagcaaattttagctcaaataatgaggattgggctcattgggcagacctttcccatgagcagactcctcttatattcagccatttcccacccagagaatttggacacggcaatcctacttttcaatcactgtactcctcatcccaacctttacatttataataccatgatttcggctttatctttctctaaagttcaatccttttctatgtacaactccatgctccatttgggtatatacccagataaaagcaccttcctttatttacttaaagcttctccatgtgtatcagaggtgaagcaggtacattgtcatgcaattgtattaggctttggctcgtatggatacttgaaaaactccctcatgaaggtttatttggagaaaggatcaaaagtgcttgcacgcaaggtgttttgccaaatgtcaacaccagatgttgtgtcgtttaatatcatgattgttggtaatgctaaggaaggattctccttagaagctatcaaactttttcatgaaatggtgtctttgggtcttaaaccagatgagtttaccatgctaggacttatcatatcttgtggactatcaagagatgcaaagcttggtaagtctgttcatggatggatagagaggaggaaggctagtaattgtttaaatttgatattgagtaatgctattctagacatgtatgctaagtgcaatgaatttgagcttgcctcaaagatttttaatgcaatggaaaagaaagattttgtttcatggaacacaatgatttcaggatatgccaaggcgggacagttggaactttctctatatttgttcaatgaaatgcctaataaagatcttgtttcatggaattcattgatagctggctttgcccaaaatggtcattacaagatggtaatgaatctatttggaagcatggttgtagaaaatgttaggcctgataacatcacgatggtttgtttggtctctgctgctgcagaaattggagcattggaccaaggaaagtggatacacggaattgttgttagaaatcatatgcaagtagatgcctttttaggttcatcactaatagacatgtattccaagtgtggcagtattgaaagagctttcttggttttccaaggagtaacacaaaaggacgttacagtatggacaacaatgatcacaggacttgctttccatggttatggaaacaaagctttggatttgttttctgagatgcaactagaagtaacaccgaacgaagttacttttgttgctattcttacagcttgcacccatagtggacttgtgaatgaagggctttacatattttacaatatgaggagaatatttggcattgaaccacaagttgagcactacggatgcttggtggatctcttaggtcgttcgggtaggttggttgaagcatatgatttgatccagaatatgcctagcaaaccaagttgttctatctggggagcaatgcttagtgcttgtagagctcatggaaacatggaactagcagaggtagcttcaagagagctgttcaagttggagcccgagaaagagggtggatatatattgttatctaatatatatgctgcttgtgaggagtggaaccactcagatatggttagggaagtcatggaaatcaagggagtgaagaagactccaggttgtagcagtgtagttatcgacggactagttcataattttatagcagccgatttgcaccatccaaaatggtcagatatcttttctattatgcagtatctaaataatgaaatgaagccggaagatgatttcctcttagacatgcaaatgtcgatgtaaccatgctgaattatttttgctaattgttgatcctcttggtgggtgttctgtactatgaagttgacaccaagcttaatgaggtcatttatatgcgcctcttaagagagaaaaagtaccgcacaacattgagatgaaacgaaaaataatgatattggaaaaaaaggatgctggcttctacaagatgagtttcactgtgccagtgtctctatctgtgccagaaaacgttaactggttcatgtttgccagaatgtttacacttctattaaagcatataacagtgactcagcttttactatctcagcaaatctagcttctcattatgctacaggtaccactactattgagccacaacagaaaagtatacattatttttatttcaaactacaaaactgaaatcgcataaaggaatcaaaattttctgtagaaggagcttgagaaaatgttgtaagcattctacaaagtctatattcagcagaacaatttttttagagagctgtatacaacaagagcgatctatacaagccaaacaagcaacttaataatttttcttacatagagcccccctttttatcttcaaaatattgtattgtacaccatcttattagaccatctatgttccaaaacattttacactatgcaacaggagatttaagacaatagaaatggtttgggctatgcagtttattgaaataatgctgtaattcatcacctaaatagtagtaacgattgagcctttttgttttgttttgatctttgtgattgtttaacttttattgctttttctggttctgtcttttttcaggaaagacgttatttgttgaaggaatttcctgaactggtttcttgcaaagaaaactccaaggttctggaggtggggtgtggtaatgggagtaccgttctcccaatactacggtaaacttgattcacatgactttgaatctatatgccttatcttaaattcatttttctattgggtttttgacagtttcatttttgttaagatgtgtgttttccttttaacttcacaacaactgatatcattgctgttgttggactttgtacatgacggcgtttccttttcatagatttttacattatcctcacaaagcacttgttttttgttcttctttattgcagtggcaatgaaaatatcattatatatgcatgtgattgtagtcctgagattcttgaaagggcaaaacatattgtagatgactctaatgtagtagctctcagacaccgtttccatccattttattgtgacttgtctgtgaccggatttccatcttggttggcctgcaaccaatgccgagatttaaatcttcaaacgcatgagtcatgtgtatcaggttgtttgcttcattcttttatcttatacaattgaagtggtcctacacccaatatagagcttaagacttttcttcttttctccagatgttagaattaataataatgaagcaaattctgatgacgcgtattcattggaagggaatggatgttgcaaagggggagttgattttattacattggtaggaaaatttgttctgcagataagcttaaatttgcatgattatacaaaacttaggctgaaatattgtttatcatttttatataaagcttttctgccataatagtaataatgtttatctctagcagttaatttataaataaatgatgattttcttcgaagacctgtttgaattaataatcttttgaaaggtataatactaatgtgatttaaaatgtttttattgatttattagagttttcaagaagttttgaatagcatttatttgcttggtgtgatgtgctagatattcactctttcagctataccacttacagagatgccggtttccattaaagaatgcttttctattttgaagcctggaggtctactcttgtttagggactatggtactatcgccaactgtttggataattagttcagaactaaatttatttcatcacaaatctttgcacccttttgaaacaaatttctgttcattgaaaatcaggcctctatgatatgaccatgcttcgatttgagaagaaacaacgagtggggttcagggagtacaagcgatcagatggaacacgctcttatttcttctgtttagatactgcgagggatttatttgtggctgctggcttcattgaggtaaagaaaaattctctaaaagtctacaagaaatgcctagtataacatttctcattatgcattttttactaagccaaatgtattttgtcaaattgttttcacttgaatattgtttatgttatgcattgaagagcatttcccattatgcatttcttctgttctggtgctaggtggagctcgactattgttgcattaactcagtaaatcgtcgaaagggaaagagcatgcaaagagtgtgggtgcatggaaagtttcagaaacctatttgaagttattgctaaagctcttttgttgaaatatcattcttaaaaggtggtgggaacttgttctctgttcactttatatattgtagaatggtacaaaaagtgtttttctccattgcttttttacttctcattgtgttttacttcttccttttctatctactttattcccttttctattatttttcatctttctttagacttacaccatggaaaaaataaacttcatgttcatccgttggtgaaatgaatccattagcctaagatttacttcctttaatttaacaaattaggtagcttgctggctttctcatttggtccatgtaaaattaaaggacacccttttcaaagatcaaatttcaatgtagtacagtgaatataatttagaagtcaccataaaattaatcttcttttttcctcttcaatattacaaatgactaataattcagaacccatggaccaactaataacactcaacatttattactttatttaccagaggttaccattttcagtttcatcatttcttgtttttaatgtgaacattttgaatatggcgtagaagataagtctttcattcacatccaactaattaaaaattgttacatattctaaattagtgaaatttttgtactgaaaaatataaaagaaacaataaactaatacgaatattatgatttgacagagaagagtgacacaataggtctgatttgattcctcttccttcttgcccttgtaaattaaatcaataatagttttttttttccttaaaaatagaaatatttgttactgtttgttgccactactactgaaccaaccttaaaaatagaaattttccttaaaaataatgagctatttggatatattttaattatgatagtacaggttgaacactccacacttctataaaaaatatataaaactaaacaataatgaattaataataatgtattgtagctttgagattcttgggatatgaaaaagagttgtttgtagatataaagagtttttctagcaaaaaaaaaaaaa

SEQ ID NO: 187747 - DNA, 1920 bp, Cannabis indica
ttttttttttccaacccttccccctcacagttctgattttaaataaataatttcatccttagctagttaaaaatgcttataaacatcattgtatgtgtaaccttatcaatagaaaataaaatgcacccttttccccacaaaacatatgagatgcaaatacacgaactgtcctataaatatataaattctcaatgcctacacaagcaaattctttgcttcaaactaccatcactggaaaaccacaaaaaggtagagacacaataaatcatctaaaatcatataaacctgcacctgcagagctatgctgagaagtaaaaagtcgaagacataggtgaggtaaagaaaattgcatgttacctcacaagtgacaaggacaacagttgcatatggttctcgaaaccaaaataagtattgctcctgcggaaaccggctgcgaagtctcgcatctgttgttaaaatgaattcggcaggcaaattctccacaaacacaggattccgggtcttattgttcaagcaggctcttttcaatggaaaacgctcctcaaaaccagtcttcacagtgggccataaatcactcacatcttcaactgaaaagcaccaccacatgtgttttattcaaattatattattgacttttaaggaccattatgataactgcattaccaatacatttcttcaatcatcttccaaaagcaacagaaaaaaccagaatgtaaaacttcagagggacaaacacagttaagtgagatttgcaggagcgtacttaataactctccatcaacttacaataaaagttcaacatacacaaaattaccccagcctgcttcccagtaaagatatataatcaactaacagcctcagatgattcacacatagctcgcaaagtaaaaaaggactcatgctaatgatgccatatggttcttaaactaattacgctaaacagggatacgtaactgaaatcactgagtacactcattaagaaatcccgaataactcaatattaaaactacgagaaatcgaagggggaaacccaatctttgttactatttttacaaacatgatcagaaaatacaaaaatttattcttcaagcatttccataattcagtattaaataggcccacattctcaaaacacgtaaattctatgatatttctaacttatcccggattccaaattctgaaaacaacataaaaagcgaaacgcaatacctgttagcactctcattcataatcccaattagccattaacgtctcaaactattttttagctcaaactatgatccttagaattgcaaaggaaccattcaaatctagtatgtatgtctaaacacaatctgaatcgcaataagatcggtagcaggggaaacaaaatcaagctcaaaattttgcaacctaaaagctaaatttagtaaagaagaaaatagaatcgagtaaggaaatgagattttaccagcaatgacgaggtgatcacaggaattcttgattgtctggaactgagctagaaaattcgccatgttcaacctcgatctacaccaacattatacaaaccgtactacacatggatgatccgaatcatcttcttcttcttccaagtgtagtctctgacagagtgtattgtgttgttgtgaaagtggaagggagaagcgagaaatgcagagagagagagagagagagagagagaagagtgtatgtgtggagtttggggttgaattggtatggtcccggagatctagtgcttcgcgactctataacgcttgatcactgcgcccaaaagatctgaccgtcggattagccgtcttttttatctccgctccatggcccagcactgtcatgattaatggttagtagtatttgttgtgaaaattggttgaaaaaataacttctcaattaccatttacatgtttacaaaaaaaaaaaaaa

SEQ ID NO: 187748 - DNA, 2425 bp, Cannabis indica
aaaatctaaaacaattcataatttgataaatgcaaatgtcaggctatataataaagataagaatgatttgagttgacctgaggaataatatcagaagcatcttcagaaatttctctttcttgaagaggaatccttctcagacgtaggaattctacataagcttcctcctggaatgaaagaaaacaaccacgaaaaccatcatcattgaaatgacacccgtaaccctaagaacaaaattaaattttactcaaaagaatgaaccatttcaaatggatataggagcgaggaacatacctttggcaataagaaaacgattgaatttccttctctgcccatgcgagctgttcgtccaactctatgtacaaaaacattgggatcttgagggggatcatactgcaaaagcagaatgttgaaagaaatgcatagatagatagatagccaatgcaatggaaatgaaattaatatgatagatgagttgcatgcccaacttagaagacaacgtaaacaaacataacctacagtatttgtgtacttatgaaatgaaattacctgaatcacaaaatcaacacctgggatgtccagcccacgtgctgcaacatcagtgcatagaagaataccactcgaaagtgatctaaaacgatccaaggctttctcccttgcaacctattggacacaaaagttacaaagaagaagaataaatgattagaagatgatgaatgtggaatttacttttgatcaagtattccaaactccaaaactttacctgcttcatatccccacatagtggaataagattgaaacccttgagaggagcaagacgcggaagaacaaggccccaatattgaacacaagcacaagtcatgaagtatctacaaaaggagtgtcgattagcatactagagtagttcattccccatcataataagaatacgcttgaacacttccatcaaacttacactataatcttttgactcttgttcttaacaagaagatccacaagctgtgatgattttttgtctgcttcacactccaagtactgcaggaaaaaaataaaggcatgtgggtgctgtaatttaccattatcattcaccaactacactccaagtttccaaaacacgatccagcatacctcaaggtgaagactggaaggtgttcttgaagatgcagcttgttccgatgatactgtaccatttgccggctttgtttcggcccgtacttcaactctcacaggatttctcatccctgccttggcaagctcttcaaccgcctcagtttgagttgctgaaaagaggccagttctacgaagcttgggtaagcgagatataattgcatttatctgcgtttggaatcccaaatccaatagcctatctgcctcatctagaattaaaacctgtgaaaagcaacaaaaaccatagcattttaaagcacatgtttcatactattgcagcataccacaacgcaatgccatcaacaaaacaaacacaaagttctcttcagaaatttaaatgacattgaaccaaacctacaaactaaattcaattctcctaaaaaatcaactacaaacaaagcgtacactacagcattcaattaaaaaggaataactaatcgcctattttgcatagctccttaacatatttagattaaaatctagaagttgaaccgaatgaataaacgaaaaagcacagaacttgggctgtagagaaaccaaatatatacctcaaagctcttatagtccaaaatttccattctttccataatatcgtttagtcttccaggagtgccaatcaacaagttagctccttcctcgtctatcattgtcatgtctgctttcacatcggttcccccaactaaaagtatggacttgaaattcgaaagcgtcgcaatgaatggctgcgcaactttatatatttgagacgctagttctcttgtgggagaaataattactcccattacctgcacaatccaaaccaaaaagagtgtattattctctgttatttttctcggcatccaaacagaggttaagaaacgagtagcggaataagacgaacctggtgaggttttggaggggtggaaacgcgacggataatctcgacgagtggaactacgaaggctagagtttttcctgagccggtggcggcgtctactgctacgtctttgaatttgcatagcaaagggattgtagcggcttgaactggagtgcagaactcgaaccctgtttgagataaggcttcgagaacggactcagagagctcgggcctgaggtcggaaaagcgggtctctgtcagcgcccggttaaggttttcggggtcggcgcccatggcaacacttcactgctctcttttggcggtaggttcagaggcagttagttttagggttttatttctgttttaaaaataaaactagattatatgtaaatttgggaaatt

SEQ ID NO: 187749 - DNA, 1041 bp, Cannabis indica
aaattataacttgttacaactataaaataacattaaaaataatttattatttttactaaaaatctaattttataaataaaaatatttaaagcataaaaataagaaaaatcatgtgttgacatatttgtaatttttcgtatattatgtaaatttttctaaatatttttttataaccttgttaacccttattttttttctgaataagtatacattcttatattttacttatcatatataagatataatggaccaaaaaaatataacttgcactttgccatatgagattggtgaccttattccacttcaaatgtacatacaaaatcataaaaataaacctatattacacttcaccatccccaaggtggggagtgagagcaccagagaaaaaacagagcttgtaaagacataatagtaccttgaaattcaaggatcaagtgaatttcaattacttagaaagatttgtggtatatgctttttcccccaacacaattagaacttaaaattcccttatacatgagataattgagctaaaagcctaaggctgtacagaagagaaaaaaaaaagaaccaaaaacaaaaacagccccggttatctgacagacattagaagattaagtcaatcaatcactcaaaggcaaagaccttcgagggaagccagtggacatgcccagaaagggaccgtccaagatgttaggctgcaaagctggaatggagaacccaccggactgcgcgcccatgattgcggggtgttgaattgaactgttaaaatggagaaggagaaagattgtaaagcacttctgtttcgatcacatggattagtagaaagaaaaactaatgttgaatcattagataaactacctacctgaaagatagagaaaaggatgtttctactggggctcgaatcccatttctctccggtgaaatcagtgaccaaaaaactggaacacaaagttaagagaaacaaatcaatcgcgataatagtaatctttcttttagtgaaaatttaatgaactattttatcacctctaagattagtatatc

SEQ ID NO: 187750 - DNA, 3473 bp, Cannabis indica
ttccttttactttagatgactgatggaacaagaagaacaaaatacattaaataaaaatgtaaaactgtttctggaaagtaccaagtgttcggcgcccttgaggatcttcatcattaaaggcctgaacgcttacctaaatattcaatcaaatagatcacatctgtatcagtaacatgtaggaataggaaaaaacacataatttattcattttttttttcaagattaatacccttttaagaaagaaacagaatacagaaaacagatacaggaatatgacagtcatatttattctttgttgaaaagaaaaaaatagtctactaccttccaaaaagaaccagcataaaatacttcaggggagtgtttgacttgtccatcacttagcctatgaacatcctcaaattgaaccctgtaaagaatgcaatgcaagcacatgacatgttttctacatcttagcagtcaaatcaaaattaaaaaggaaacacaacacaagaaatgattcttaagtacaaggaatatcaactgatcagaataaagttgctactgatttctaacacttcagtggtcaagctagaagatcaagaaccacaagagaaatccttttaatgttaacctaagctgtcaaccataaataagtgaattaacatacccaaaccggaaaggagggaagtgagttaagggagttttcatatccagtgatattgaggagctattagaattttcccactcagctccaattgcatgctctgatgactgcaccatctgcacaggaataccactagttctggatggccccgtcatggaacttccagacattctgttttgcaaatccatctcataacctctctctatttgctctccgttgatattagccgagttgcttcctccttgacttaacccaaccaaagctgttaagccatcaccagaaatgtctacattgtgatcatttctagtctctgaatcatcattagcaagagactgcgggcaatttctgtttcccatgccaaatggcacacgggagaagacaaagcgtgttggaggccaagcagttgcgggcacaaaagtagttccacgtccaatacctgcaagcccatcaataggccccctaacatgtacccgtacaggcctaaataggccattcccctcgctaggggcagactcagcaacatatacatttcccacgttgcttggagagttattctgatcatgctcttgcatgtaatagccagacgttgcaaccccatggttgaatccaaatggttgtctgcagacgcatgccatactcacaaagcagcaacttttgcaagtatcagcaccaatttcttgaactcggtgactaaaaagcatctatatacggtcataaaatattgtcagtcataaaccataacaagattaaaaaatacttgtcaaaggcacaagcaaagacaccatttttaaaaattattaattgattaggatgagaagcaagttcaagcatctaatatgtagcaatgacaaatcagtaaaggagcacacataaagattttaacacaaatcagtaacagacctgcagccaaagaccatcatttacagctttgcaagggaatcccaattcttcaagccgcttcctcacattcaaaagtgcctcaaaagacatgttgcaatataagagggatcccccttcgaatacattgatgaaggagtcgtacatttctccatgaatcccaatgttcccgttagcatgatctttaagctgtcttctgccaacagttctgccaccccaagaaacagaaggcatgccacatcttccccagtcatttggcattaaatcactagaggaagtgttcattgatgtgcagttactcgagtagtcatccctggaaagccacccattgttattcaaatgaaagcatgatccttcatcagatggaccttccctagtggcccccaatccacttgctcccacactaacttgcatttcagcatatgagcatgaggtttgtattgcatttctatctgaaaatgagttgctcgaagaagacccctttgcgttgcaagggtaccctgactccagctttgactgaggatatgcgatttccctgacctgtttcctagaattggaagctcccacctggaagtcagctacacagtcagcaagttcgacgagaaggctttgagatgtattatggccctccataccatctttcagggacacatttcctagttcagattccaaactttgtcagtgaaacatctgtcaaattctttccttgtactggaagatcagatgagaatccattcctgcctcagagttacttcctgctcagaatttctgtttcgcatgagccacatttgtgagatatgtgaatagtgccaattcaaaccttacgaaaagaagaaaacacagtcttatccatctcatagaagcccaaatcatccacaactgaaaatgagaaaaagattttcatacccttaccttttctcttcactaggcacccacagttcattcgatgttaataaagcatgcaaggtttgagcagatagtcttggaagcaccttaagcagtggagagaataaatatgcataaattattacaatataaatgagtgaaatcttatatatcataagttaattgcttcaaacaaagaaaaaattctaattttatcgaatcgtatcataaaagacaaaaaataataagataacataatcaactaaacaaacctgcaacctaaactgcatacaataatgctacttgtacctctttcaattccatggcaccactttgacaaagatatccccagcaagcattccgcacacgttctccatgtataccgtaatcttgactctctgcaaacacctgaaacacaggtagtcatctcaataactaagcaaatggataccatgttggcatcatataaagagtgtggacaagcctttaaaacctggtaggctaagaagtttgaagtccacaactcagagataatgaaatccgtgcatattgcacataaatcctgaaaatgaaattatgacaagtaatgtaagacagatgaacatatgaaaaaaacaactagcattgaccaaacttaagtgaaaaagcaataacctgaaggtcaagaaaagaagcagcagcaagaacacgaaatgcattattgtcattaagcttagggtggtgtccatacaaatatgccaaagctgttgcaattgcctctccattaacatttttatcatctacatgtaagtttacaacaggagcattggcttctttccaaggaccatgaagcatgttcctaatagtaccaggaatattagatctccaatgaagcagcaagaggccaaaaaatgaaccataacttcttaccaagtctcagaatccatcgtacaatacagccacattccataacgacaaagaaatttcaatacaatacgacaaataccacattaaatcaataaagaatcaaacccaaaaagaaaaatccaaattgaacattgaaaactat

SEQ ID NO: 187751 - DNA, 1614 bp, Cannabis indica
catctttgaattcgcccaaccatcttgccaatgagaacatcacacttttgagctgagattttttggcacatattgggattcccaaataccgatatagcatagagctttgataaaaaccagaagcacccagcaaccttgcaatctcttgttcctccattctaccacaagaaatggctgattttgcttcacttgggaataaacctgtggttttggaaaataatttcaaacccttgtaacatgaaataggctgattgaaatcaccgttacaaaataataatacatcattaacaaagctcaggtgattcaacttaagctcatcacacctttcatgaaaccgaaagtcattcttatctccaattcttctcattatgcgaggcaagtactctattcctaagacaaacaatagaggcatcatgggatcatcttgacgcaagcctttttcagcctcaaagaaaactgtgcatctctcaattaaacacgagggacaatttttgagtctaaacacagctcataatgagctttgtaaactcacaaggaaaccaaaagcatccaaaacctctttaatataaaatcccattaaacggtgtcttaagctttcttgagatcaagcttaatccaacagctctatttgtaactttttctttcatattgtcgcactagattttgacaaaaatcatgatattgtgcgctatgaaatggtcgtggacaaaaccaccttgactcacagagattaagtcaggcaaccctttttttttttttaatcctggagcaaattatttttgtagctaccttgtataataccttacaacaagcgatcgaccaaaaataacctacaaatttagggaacttactcttaggaataagagtaagagttgtagagttgatctccttcaaaattctgccagagtgaagaaaagataaaatggcctcactattctcagcgccaataacatctcaatagtcttgaaaaaatagctactaaagcctttatggcctggcgcctttatacctagaatagagaagacacattgctttaatcctccattgtataaggctccattatggtttgaatgtgttactctgtaactaacgagccaagattcaccatttttttgttcaccttcattctagcactcattttactccccaataaagtattatagtaggataaaactgttgttgtaacttcctttggcttgtcaattctaactccttctgttgtgactgagtagatttggttttgagatcttctatcacgaaggtaagagtgaaaaaaccaatgttctcgtctccctcttggagccatctaatcttacccttttaatgaagagtcgcccgcaatgtttttttgacatcaaccacctatttttgagtcataacctcctcaaaaatcaagtgctcattatatgaatctttcacttatcatgcctagtcagttaaaatttgcacaactttcaaactttcagcttggagatcacaaaatcctttcctagccaactcttttagcctttatttttaatttcttcaattttatggtaacgcaaaacataacagttcctttccaccttattcaagatgtcattaaaacttaccacgtactagccaaggagtgtt

SEQ ID NO: 187752 - DNA, 2446 bp, Cannabis indica
tcaccactgatgcgcttttactcttctttgattgttcagctccaccaataataccagaagcccatttcaaaaagttagagttccagctgtttccctaaaaaatttaaccaggagatatttgtacaattacacaccgatataataaacagttttcctgatattagcagtaaacaataaaatgcgaatgaaaaaatcactaactttatcatcaacgtctgtgctgtcatcatcatcagagaccagcaatttctcatgttccttgcccttcttcttcatgacttccatatgaacaaccttaccccgcaaatcatttatggtgatacgcttcgataattgtttgttctgatttccatcaccatcatccttgagaacataaagctcagaacttctacctggagcaagttgcaaataccaaacaccaggagagactttcatttgccaataccctagattggccattacaagtgtatcaaccaagtgaggcatagtcttggtgccaagaatcagctgaaggcctctgggtggatcttgatctttctcagaacaatgacctacgtagacaccgattattaaagcataatagaaacacagcaatctttcatgtcatcatttccaccaaagtatatgaaagagcaaaaattttatgcaatcttgaaaaaaacataaccataccagtgagaacaagagcttcaagttcaaatacagcttgcagtgttcgtgtgtctccaacattctcaagtaaaatattatccatatcatggctgtcaaaaattacagctaatgaggaaaagttaaatgaaacgtttcgaaagtttaatagcactgaagcagttttatatttgtacagaatagagataagaacagtgctacgaaattaaatacatgtgtgtgcgtgttataagaatcgagaataagaaatattatcaaagggagagagtaaaaatacaaagttgacataaaatcacctaaagttactattaagcaatataaaggttctttcatctctcttaggatgagtttttgttttgaaaatatatatacatatatatatattaaaaaaaaaaaaacatacacagcgattacaggctcaaccagccatggctcaggaacatcaagattcattgtcagggttttagataagggcatgtttgcaaaaaatgctttagggccatctatcgtgtaatcagtgctactaaagtcgtcctgcatatagtatcaagagttaaataaataccaaacaaatggtagacagtttttcaaaagtaaaaaagtttgaattcactgaagattagagtcaggcatacaatagatggtactacatatctgtagtaattcttcaggggaagatccactacggaactctgcaaggaagacaaaatttagttactcaagatgtgtaatcttatgaaaccatgatcaataaaagtatagcatgtgctgaacattctaatcaaagtagtcatgattatgaatgaaatagcaatagactcaccaaagggtttagtacaattctcatgcttggctgtacgtatttccataaaacacgaagaattgaagaaaccttctgggcagattgactcaaaggatcgatgactgcatcaatatgaatacttgcattttcattgcctaaaagaacggcactgcaaaggattaagagcagaaaatatgtaagaagatgatagtaataataataataataataataaaagtagtttgttaattcaccacccaaattaaaattgctattaccacaaaactccacataaccacaaccatttcttactttcaaaagccaattggttttccgatcaatagagaaaaatatgaaaaagcatgatttcactttcatgaaattgtgctttccttatttagaaaaatttacaagatagtgtaccactcctagcaaacatgaaatgaaaatcttcacttttattttgtaagaaaaatagaattttgtcaggaaaagtataagatccttaaagaaaatagcaatacctatgttctgcgagcaaaacctcaaatcttgcaccttcagaactacgatctcgtgtagccattgaagatgaaaccaccatagcaatatcactaataaatttgctgcattatgaatatcatcataaactccttaggcattgaataaaaataaataatgaacagaccatgctgaaaatgcttggaatattataacacaaaaacaatgaagataacttaattgcaagagttggaagaagtgaagtacttttcatatgaaacaaaagttatattaataagagatgattcgttatcatctgcctactgacaagtatctttctaccaaacaagccccctaccctaaattcatctcataatcttcctactcctctttttacttccacttctaacctcctaacactataaatggtgtgctttctttgaaagcaacaatcaaaatttaagttcttattta

SEQ ID NO: 187753 - DNA, 3232 bp, Cannabis indica
atttttttattattatataggtattctcgttaataaagaaatgaaatttgtttcacttgaatcataacaaataatactacatatatttttttttgagttaagtagttatttctcgaaaaaaaaaacacatgttcaagagaaatgttttaatatttctcgaaagaaaaagagacatgttttaattatatctcaaaaatttttcacgtgattaattagtacgtttgaattaaaacatggattattactgatttattttcttccaacaaatggattagtactaaattattcacgagttgagatgagattgggttatatactataccaggtgaagtgaagctgttattaatataaaacacgttttactcaagtctttcaacaacattactaattcagatcttcacgtgtgtatgtaattattattattattataaaaaatcatcatctcatcaaagacactcaaatttcggtctaaatgcactaattaaacatgtacagatctctcatttacctttattacccacagtccgagtaaacaggccaatattaccgaattcttcgactagaaaaactatgaacaacgtgattaaatagacacactatatatcataataaaaataagaatatagtaacaaaaacgtgagtaaacaaactaaaagtaaaccaaatcactatctctaggacaaactactttctctcaaatttattataccatctctatttcgtaatattttctttagtatgctatcttgagtttaactataacattggtgttttcttcttcagttaagagggtttcttttttgattaccggatttctgtcattgaatcaaatcaataataacagaggtaaaaatggaaccattatgtgatttttgtgaggtggtgagggcagtaatatactgcaaatcagatttggctcgtctttgtttgcaatgcgatgtttgtgtacactctgccaatcttttatctcgaagacacgaacggtcattactgtgcgacaattgcaatagacaggctgcgatggtccgatgtgtggatgagaagatgtcactatgcgaaagctgtgattggagctatggtggcggtagctgctcagccaccggacaccgccaccgccagcccatgtattcctacactggctgtccttctttagccgagttttccaatatattcgagtcatttctcaacgagccttgtttagatactaatcatggttggggttctaatgtaatagagcctaataaagatcaagctatcaaatcatcatcgtcttctattgctatccaaaatgtagattgtatgccttattttcaagatcaattacctttctttggtgatgactctgttctatccaaggtacgtacacacctgcagttaaatatgatatgtaaagattatatagggaccatatttctgtaatggttgggtcacattgccatattatgtatgcgatagatatttgaggttaccaattgttttgtttactttcaggatcattcaaagctcaaggaccagaatattaatattcctgatgggaatgatctatttataagcctaaacatggatgcaatgaactttggaagtaataataatgaaatatttaactcttcacaagcttgtatgaataggtacccgtttgagagtggaggactggatagtactatactaatggataaaaacttatcagctacagaatccaatggtcatactgaaagtgctatggaggtaatttctcccctgtttagtgctatactaatgtttttatgtttttataattgagctagctagcttgaacttttgtttgtgctttgtaatttaggcatcttcatcaggtcagcagcaagattgcatggcttttcaggcttctcaagtgtgtggtacagctaatgtgatgcaaccaacaatggatggtggttctaattgcttgcttttgaatcctactttcacttctggccaagttcatagctctggcgccatttccctatccaacattaccggcgaaagtagtgctactgattatcaagattgtgggatgtcaccagtttttctaactggagaatcttgggagtcatctctagaagttagctgcccccaagctagagataaagctaagatgagatataatgaaaagaagaaaaacagaacgttggttcctaaactctaactctcattatgaaggccaagagcaaaaatgttgttacattaaagtgatttttatgtaacactttctttttgtgtgtgtgtgtgtataggtttgggaaacaaattaggtatgcatctcggaaagccagagctgatactcgaaaacgcgtaaagggtagatttgtgaaagcaggagaagaatatgattatgatcctctaatgacaagcagtggtgacttttgatcatggataggatcatcatcatcattatcatcatgaatcctttaattttcaagaacaaagtctagttctctcttctatcaaatcttcattcacaccatttcctctgtccagaaatttcatggtttttctagtccatatggagaagcaaaaggctcactcatttgatgcgcaatttacatggtacacataattataaaacagttttcagtagtaaaagaaaaaaaaaattgtttattaggcaggcactaaatttttttattgttagctagtaagtaatacttttatttttgtgtccctctgatgtaaagtcattagacaaattttgttaaagaaataatatgatcatttacataggaattttctcaaaagtaaaaagaatttacactggaagaatatagaaataacactaattaagttatacttatgttatcttagccttgtcattctgtttcatatggggacaatttcaatagccgaataatgtttttggttaatcatttgtaaattagaaaaggggtcactattaatgggagaaaaaatattcttaattatcacaaaagttaataaacatttttattcaaaaaaaaaaaaaagttaataaacatacatgtgccactctcatgtacagcttataagcacaaagtaccttataatttattagatttttttactgaaccttattaatttatagtttatgaatttgatttagtattgataaaaacaatacacctttgacacataatcttatagtgttatatcaaattatataatttttactagggcgtagaagtaataatagatttcagtaggactgatattatattagttattacatcacatgacttgg

SEQ ID NO: 187754 - DNA, 4567 bp, Cannabis indica
acttgccacttataacataaactaagacgaaatggaccataagtaagtgcaaattttttacccaagagtatgggcagacttgatggctgcaacaatacgtggatgtattggagctttgtgcaggcactcagcaatatctgagggagtctttccttgtgaatgaagctccaacatcatcctgtcctatagggttcaaagtatcaaatcagatgaatatgtgatcaagtaagaaagacccacacctaataatgattatgaaaaactgctcactatttatagggagccacatggtgcttaataacaatgctcaacatgaaaaagttctctctaaaaccctgatgatttctataagaattcacatacgtttgcaaggatccaaatctcatgattttgttcactcaattactatttagaaagtaactaaattttgggaaaaagaaaaaaaaaagggttttaatagataaagaaatcacacagcttggccaagcttaaaagagattctctctatatatttgacgtgaaaagaaggaacaaacgaaaaaaatcatgaatttccctttgtcgtagaccaacatcaaaacatgtagaaatttcaataaagtaaatcgattagatagcataaagagaaaatagaaaacacaataatgaattagtacaaaccatcaacgagttccaagacaaagtagggcgaagctcttcgaacagctgggtcagacccatttgtgtgacaacccagcgatcactatccccatcgattattgtccggtcaaagtcaaaaaccaccactgcctccgccattacgaccgccggagatatttcccggcgatcgatgatcggtttctcggcgagccagaaagcagtttccggatacgaagtcgtgaatgtggcgagagaagaataggagagatgttcgagggctcgtgtcgagtgaaaagagaggtagtttggttcggtagagaagtagttatctggtggaacatggaatagacttggttctgtaaacctgaatgatttacagccgttggattccttaattaagacaagactagcaagtagtgtgagtgagaatgcgatggcatacttgacttgagtggattcttattaattttattgagaaaatatgtaggacaccctttagcctttacactactttaagggtgtgctcgtattagttaccaattcactatatagtgatgttatagatttgtcataagttgattgtaacagtgtcccgtatatataaaaattaaataatatatataagatgtataattttttttttttaattatactatacattcatctaattatactaaactacatgcttttatattataatatggtatcagagtcaaactaaactctaacgagtaactgattcaaattaaaaataaaaagatccaaaaagacgagccaaaaaaagctacttgtgatttactaatagaaagctaaaaaaagccaatgtgagctaaaaaaaccacttataatcgaattgtgcaagattggtaagcataaaaataatcacaattttcagagaatgttagagagtcgaacacattaataatattgtggaagctaaatactatacataaaatgtatgagttactcctcttattgtcaattggttttgaaatggaacattttaccatacactcacctaatcatacttttttaaactacacacttcaatattctaacattacttatttgtcttgtttatggttggaagaattgtcacctcctctaatgtttattgtattatgatattttatattaatatactaatattttatatataaaaaaagtgttacgatagatctttctatttgtttcgtcattcttctaatttattatagtttattttttttacgattgtgtatagtgtagttatttaggattacttgtaaatttttaggaaattccgaataatttacaatgacaaaaataaagttcaaacaattacttaccgcaagtataaaaaaccatcagtgcgtgcaataaaatatttaaattttatttttaatattgtaaactattcagaatttttttaaaatttacaagtaattctaaataactatagcataaaattataaaactttcatataagttgaaatagataaatctaccgaaatatctagggtctccatttttatttagataaattggaaggaataaaaaaataagaacacataattcatttataataacaacaaagaattggataggtttgtaacattaaataatagctactagagccaggaatgaaaatgatcacttcacttacttcacattttaagaatgaaaaggataataagagatgatgattaatgatttataattaatgataatattatcattcttgagttaggtaaacaataaagtagggaatataataaaatgatttaatttccaaaatatatttttattcaactcatgaggtgtaactaatagtgtttgagtgtagttggaataggtttttgtacaactagtcatgaacaatgggaataatccctttttattgattcccatcaactaaagattccaaaaacttcacactataatctccaatatgaatagcatatccaaagtccaagttaggatatgccatataggtgcaaaaatatagcctaattaaattgccaaataataataagcagaacagaaacttattcattgcccatatctctcttcttatcatacttagcttcccaataatgctgatactgactttaggttttgagacacttccaaaaccagttcactcttagggctaattataagtctacacaaacatgtctcgcaccacccataaatacaaccttttctttttcttctcatgaggggtccagcaaaaataattgaatcgatctgacaaaatatatggggttgatttgaatagagacagagaatgagacacatatattggaaaaatatcccattttttgattagacagctagccagccttttatgttacctaatttctatatactatcttctgtaatctatgtagttgatttcattgcctcaaaagaggaaaagggtttggggcaatttgatttgagaagacatgttaggagcatttcacatgtgtaatgtagatctttgggaacataatattgcaagacaatgagttatgatttatgatagaaatgaattagggtcacaagagcacaaggctttattttaattaagagcctaattatataagtttttgtttaaacatttaatagtgatgacaaaaggaaagggtttggtggtaacattaaaataagacatggaatctagtcgttgggagtacaagttcatggactcttttttggtcggatgtatcgaattgttggttaaacttcttttgcattagtttaatgaattgataaaataattctttgataacgcatacacttaatgtggcaatacaataagctgagaaatacaagtgattatcatgaagggcatgaatgactttaaaggttcctttttttaaaaagagcctaatattaaatgtggtgaaatgggtgtttgtcatttgtggggtttggacgtattttcaataaaaaatgtgtgtatatatggtagtcatgtatacatgtttatatttgttgagttgaaaggacagcaaagcaatagatctctccaaagattagatgtttcaacaaaaatgcatattttaaatattggaagaattgatttttgtcgttttcataacacttgattgaaatcaaagtcttgattgcatgaaataaggatttttggagtttatgtatatatataaaataatgtggtaaatttggtaaaacattgaatctcataccatttttaacccatcaaaatgcttgattttaaatcaattattcattcccttacactcttctttttatatcgtaaaggagaaatatcataatattctcattcatagagtgaaaaattgcaaattagtccacagtagagcataagtgacaaaaaaggaaatgtgaactttttcataattaaaccaaaaatggtggtaagtaaattagttaggtgaatgaagattgaagggagtacagcaaggacaaacaaaatcccaaaatatgcttaataataaataaataaataaataaacaaacaaaagtggtatatgatgataaaaatataataagaaaatcatgattagtgtgtggaatatgattaatcattgagtcaaatgaaaggcaagcaaccctataattttgttacttctaagaccctcaaaatataattttaattaaaataaaaaacaaaggaagacaatggcccacgagggtaaatttgggacccaataaagagcatccaatgacaggtgtacatattttacagaacaacaccaacaaaacaaacacttttagtcaaactcaaatgataggtggccgtgtcactcatcattctctctggtcaaaaattcgaatcccaataaacttacacgtacgccccaaaaaaaattcactatttatggttaatccgagatttgtgctgttaaaaacttaaccgagaaaaacgacgacgttttagataaaacgacaagtcgttttagttaattagagggtagaa

SEQ ID NO: 187755 - DNA, 1222 bp, Cannabis indica
gattctgatttctctcccgctggtaccttcacggctcgattgaagacttggaatcatggtggtcaggtgtgtttgctcttttcattccaagttgttttgatgagaaaattcacgcaaaataagttaccagtaagaggtatttggtttaaattatatgtttctgattgaatttcggtatgattgaaatgggtatattgttaaactaatgaacgagttcaaaattttgattttgatttgaattttagttttgcttatttggtaatattcagaagagagttaaacgttaaacaatttgctcggcaggagaatttgtagatgaataatggtggatgcttctgtttatatctgatccatttgccaatttgcagtagaaacaatagcagaatccttgttaaggattcatactcaaaatgaatggttcttttctaacattacttgtatctatagtgctccagcttttgtgggcatcaaattgttgtttgttcccacaaggttgtaagcgttttgcacgatatactatttatttttcagcatttatttcaaatccactctccattccatgtttctgagtttctcttgttactaagtgaaaaacgttgaggtgaatgcctattggctgactgtcgggttaaatttttgactttattgtaacagactttaacaaagctgcgattttcgaggaatgcattttttgcagaggagaaggaaaagttttcggtgatttaaatttctcatgaactttctttcttggggtttttcttaattaagaagttttaaccatactcatactaatcttttcagaagctcttgcaagaagatgatttttatacgataagattgccatcaaatgttttgagtcctcctgggagggaatttgttatttcatcagtgaaagcggtgagggctcttgcattattagatggtctttgttttgcatgttgatcgtatactataatacttaattgcaatttgttggcaagattgtttttcaaccaagccatctggccatgctaaaatgattgttatgttataacttcatatcattaatgacaatatttatgtatttcagagatgtcttccacgagatggcttggatgagcatattgttatcaacactgtaagtttcaatctcaccgatgtcttctaaattctctctttatttctctcctgtttaggcacagttagattcatgtcaacttcttcattacatatgacattgtgc

SEQ ID NO: 187756 - DNA, 2574 bp, Cannabis indica
gtgcataaaccttagcttagcaatcaatggcgaaaatggcgaagctcatacaacaaccaataataccatcatcttcttccactaacgacttcctctttctctccactcctttcaacaatactcgtttatgtacccgattgggctttcaacgccgctctttcaaatgctctgtcgagtacaataacaataacaacaactactacttcaaccaagcggctgcagcggcggcgttccctcgacctccggagattcagtggaagaaggagctgtgcaatacggtgcagctgataggcatcgttggtgttcctgttgaaatcaagcacttgccctctggcaaggtcgtcgcttggacccgcctcgccgtcaagaagtcttccactgatacttcatggtaactcaattcccaattctcaatctttctcttaattatattctgttttgactattgaaatgggatttttagatattgttttcagaaaattggtgaataatgggtagtagcaagaaacaaaattgtaaaaaagaaggaatctttgatggaaattggatgattttaaattcaaaccaagaaagggataagtaaaattgagaagaggatagtacaccatcaacttaattgagttccttaccttatttgacactaaattcagtttaacaatccctcaatatatgatcatgatatggtgtagtcatgaaatcaaatatgactcttcatcattatagggtgcttatttattagaaagctcaaactcttgtctttcaatctcatgatgattttatagctatgccatttgaaaagtattggctttgttaagaggttacctcattaatgttcctttgaggacagggatttcaagcattctttctctacttgataatatccaggatcaatctgacattttgggatgaactagcaaatattgcttctcaacatgtcgaaaaagggcaacagatatatgtctccggacgtttgatttcagatacagttgaaagcgatgatggtaaacagcagacatactacaaggttttgtgtgatttgatctcctactgtgtctgtcacttcatcatatctaagtatcttcaccagcttgatcaactaaacaatggtagtttgtctgtcattttctgcacaggttgttgttcagcaactgaattttgttgaaaagaatttctcatcgggttctgactccacaacaataccaggcaagtcatattgtttgagccaagttcgttggattctcataccttattttatttatatgaaattcttgcaggtagaaagtttggaaatgctaatgcaaatagtgacgaaacagtagagcaattatggcaagcctactttgctaatccagtggaatggtgggataataggagaaataaggtatgttgacaatgacaacaagtctactttggttttgtttcaactttgagttatgttaattttgcgttttgttgtgatttgcagaggaaccccaaatatccagactttaaacacaaagacactggagaagccttgtggatagaagggaggtcgaacccgccatgggtgaagagccagcttgccattctagattcaagaatgtcttttaatgaccaggatagcagcagaatggactcaaacttagtggttggagaaaacttctctcttttctaattgctccttaatttatggtattactattatcagctattatattatattctaatcgacattttgttgtataggaattatatctgagtgagtgagttgtaatttgttcttgttacgtattgcaaaattcactaactagacttttccatcagccagtataatacaaagatttgtgtttgttgtcttttaattaaacataattatcttctttggacgacaacaacaacaactaattagctgaagagattttgaagatttcatgtttgttatttaatattatcacttattttttccaattttctgttgttcaaaatcaaaattattttctttgaaatcaacttaaataaacaggttaatattcgtagaaagaaatgtttttttttttttgtttatataaaatcaagtgaaaaatggtggacattggaatcaaaaatcatggttgatctgttatatatgttccatactgaactgtattactattacatttatacaaatcaaacattattgaaatgtagtgtatatatatttttctcatccaaagaagattagataaacacaaaattgggaaacttattttatatatcttgttgttgttgttgttgtatgtaatgaaattaatcttatacaataatataacctactatatattactatagtaattttataatcctctctgtacaattgcagatctctcttctttttcttttatataatattaaaaaaaaaaaaactcaaatcttgattatgaattgatgatgaatattgatcaatgatcgattaagtagaagaagccagtcctctagcttctgaacccttcatgattctcatccttttgcatgaacaaacaaacatactgcaaatcacacaaaatatattagttatgagctctatgatctattctataggatatatatatatatata

SEQ ID NO: 187757 - DNA, 7790 bp, Cannabis indica
acaatttggctaaaatgtgaatttagttcaaatattggacgaaagtgtcaatttatttatttatttcttcgaaagggcataagtgttattttacccattttaaaatcattcttaggctgaggaagaagaagaagaagaatagaggaaaattcagaatcgaaaccagtttaatctcatcaatcgttctctgattcaaaatcaaaagcttccccctttggtttttttggtctcgaaactctaagaactcaaagtcaaagagaaagattgctctcatgggtaggcctcccagtaatggaggtcctgctttccgtttcacccctattgaggtattttactttctcctttgttacttattaacttcaagttccaattttgttaatgggttttcattatttgagctttttattgcgattttgagtttcattttcttaaatatttaatcttgaatttggggttattttttttctggaaatctgtttgcattggcatttttacacacattttgtattgctcactgattttgattttgtctattggattagggttattttttatatatatttatttaagataattgggactgtattatttgtgggtttaagggttccttaacagtcattattcattaatttttttttgggggaattagctttagtggttttagaaagctcttgaaatggattttcaagggttttggctaatcttttactttagctaatcttatagccaagtaaaatgttttagtttattttttcagtttcgataattattatataaatgaaacatttttttttatgaaatattcttttaaagtgttcggatatcattaaaaaatgatttttggagaagtcatttgaaaatagcttctcaaaatgatttttaaattaaacaatataattgtttttatccaaacatttgtagaaggttttttttaattctaaaagctaaaaaaagaacttatagaagctaagctaacggggcaagctaaaggaaccgttacaaaatgctataaatgtgtttatatacttgtattttgtgtataatatgtgtatacattaacaatatgctataagcatttctacatgccagtgtgtgtgagtgtatataaatatatatatgtatgtattcacttgtatttgttgaatttaaggtggctgagatggaagctattctacaagaacacagtaattcaatgcccggacgtgatgttcttgtaggtcttgcagataagttcaggtacagcttagttatttgagactcggaaaaaaaaaaatcagctctatttattttaagtcttttaacttgtgccatatgttaaattggggtatttggtcttgtgccacagtgattcaccagatcggaaaggcaagattacggttcaaatgaaacaagtacggttattcgcttagtttagtatggaaaattatttagaacactctttaatattatgattattattacaggtttggaactggtttcaaaataggcgatatgctataagggcgaaattaagtaggaaccctggaaagttaagtgtctcgtctatgcctcgggaggatccaatgccaatgagaaatatgcctcaaagtttaactgctcctatgcctaatccttcaggtaaaatgcactctctcattggttgaagttatccttatttctttctcctaaattgtgtgctttcatgtctagtcttattgttttatgtaccgagattataagcccttacatttgtagtttgaagtgtgaattagttccattttctgtcctgtgagatagttttactgtcaaaaactatatattgttaagactcgccttatttatcaatttgggcacacgccgggtcgttaagtttaaaggataaacactcaccttatgagactagaatgctacatattgtttgtcatgtatattttgaactttactcaacatattaaagatttcgatagatcttcttttaagtgtcaagtttcaaaaagtatgttatggcgagcaaatttagtcatcatccgttatatgtctgtttttttttttttttttcgttataggtatatgcattgaactataaatatttctgcgtcttgacaatttgtttaccctttattctttctcaaccagtttcaggcgcgggaagagttacttcagaaaattctgtaatggagtttgaagctaaatccgggagggatggtgcatggttggtatctcttgtcattcatgtctacacattctcttttgtcctttcaggggatgttaagttcgtaacggtaaatgagtgatcagtaatgcaattcatctttttgagagttataacgcgtattaactgcaaacttaaaatggtcgtgttgggtacccaaaaggggtagctcaaatggtcaagcatgtggtctgaggttcgagtccctcctcggtatctacgtagcaattgctatagttttctggtacccaaatattgtaggattaggcagggatcatagtttaaaataaaaatggttgtgtcgggtgggattgcttgactgcttcttaggaaaaagttgatcaatattaggcgactattgaaattggataaaacaaattcaagtatctcggcacaattttattataacaggtcttttgccattgttgtctgctatattacccgcttagtaacttgggaaaatccccatattacattattaattcttgtcttttacacaggtacgacgttgctaactttttctcccatagatatctggacagtggtgatccggtaattttcaaatctatcttctccggggatgtgtagcttcatgttttaaagatctgctggataattttatagacatatatatttttttgtctgcagaaaatagttcaaagatggttgtagttgtcattgagtttgttagattgtgctcgtttctaattttcattagttgtagtggagaagattgaaatcagataattcgattaggtaagatgaacataccattttcttttgacctggtcgaattttgactgaattttggatgtttgagatatgtggatgctgttgcgaaacttagaattggagatgagtatagtttgttagtttggaaccggtaaagagacgattgattagatcctagctgctctaagtacaaggtctttactttttaatatgttttagtaattatatcggtaacaaattttacgggccttacttatttctctgtcgaattcattctgtccaagaatttctttcgttttatgttgaatttggcacagctgttacttgctcgaccgttctgaatgctttctttttggttgtttaggaagtgttgattcgatttgctggttttgggcctgaagaggatgagtgggtcaatgtaaaaaagcacgtgaggcaacgctctcttccatgtgaatcctcggaatgtgttgcagtccttcctggagatctcatactctgttttcaggtgaaactcatttagagttcttggaaattatattttaatgaatactctataaagaagttaacaaccaacccctcttttcgttttctttaacatttacgcgaaaatacattttgcaggaaggtaaggagcaggctctttattttgatgctcatgttcttgatgctcaaagacgaagacatgatgtaaggggctgtcggtgtagatttctggtgcgctatgatcatgatcagtctgaggtataatattttagttttatgtgttttattttgagtaatttgcggcataaatacttaagcttaacttccagttgcagataaatacttaagtttaatttttaatggtaacaaggcctaagtttaagtacctgaacattaagtgtcaaatcaatgaccaaatgatagtctctggtttgtccatgtcattaaatttttattatcaataagaaaatgacacgtgaataatgacttgacaatttatagttagacacttacggaagtttcaaaaaaattatttaggtattattacccatcaaaaattaaacctaggtatttatttgcaactgagagttaaacttaggtatttacgccgcaaattactcttttatctttaaattttctattgtttcatactgtagacgtgccgagggaaacgattgacaaactgtgattttaagagttagcatggaataagatttgagtgggttgtttaagttaattgggaagtttttgacaaatcctttaaaagggcaggcgagggagctttcaccgtcctagcatatcgcttttagtcccccgaaaatttgcattcatagtgtgaccgactcatatgatcgagtggcattgaaatttcgcctataaatttcatggtattcataaactcgttctcaactctttttatttattttctttttcaggaaattgtgcctctgcgaaaagtttgccgtaggccagaaactgattatcggttacaacaacttcatgccgtgaacgaggcagcttcagcagagcagcagaaaagtaatatggattcttttacagtcaatgctctgagagccaatattcctgctctcgaaactgcacaaaaacacagcatcatcatcatcatcatcataccacagatgcaacattggttactccagttgcgctctctaataataatgcctctttcgcccctcaagcttcttcagttcttgaaccgaaaaaggctgaaactagcaatgctgtcgatgcagcgaactcaaataccgttccttcaggtggcaattcgggtgcaagcgtcagtttaatcagcaacaatactgtaatctccgaagataacccgaccgagggtaagtaaaaaaagagaaaaagaaacacaggttgatgacagttgctaagtttagaggttttttttgtccattttgtgcaaattatgagtagaatagtagtgagctggcttaggggtctctctactgaagctggtttttacaaacacattaaatcagcatatgaattgagagctttagtaatttttctcttctgtaaactaagttcgaaacattaaaatatattaaaagggagaatgaaatatttcaacaatcagttcagatactattatgaggtggcgtcttgcaattggttagcgatttgtttgtttgtatgatatccttccaccttttccaacattggttcgacaggctgaatcatagctggaaggaatcatactcttcccattacaatcttcaaaaaaccgaacaaaatctaaatataattttcaaagaagatgaacataggcacaaagttcttatacagttcgaaaggataaagagtgactaaatcacttaattggcctgatgcgaagctttcgcatcagccagacaaccctaaatgttacaacaacatgaggcacaagtaataagatcgaaagacaacgcaaaagctaaagaaccaacctaaaattacatctcaatgacgaattaacgattagaacttattcaaaatcattacaatactccaataagaaatatttctccaatggaaagtgttttgcaatattattaaaagagatagaagagatgaggtgtacaagcaaaggaagggttcaaattaattgtagcattacttgaactccatattgtggcctatttgtgataatgctaagtggtgaatggacatatgttggggacaaggtgaagctgtatcgttgcagaatcattgtcagaacaatttttgctttgttgatggcaaagttaatcccgacacaagatcgaggtccaattccaaagggaagaaaagcagccatgttgtccttagtagctttagcaaccccttgagaaaatctctctggcttgaaaagatgagaatcatgtccccatatttcagggtcatgatgaagtgatagagttgataggagtataattgcattggctggaagattgagatgtcctaatcttacttcctttctagtttttcttgccaatgaagttaagggaggatataatcttaacgactcgtggataatctggttcaactacatcaaaaataaaataattatatagatatattagaattattaaatgaatataatataataagcataatcggtgacaaaactcttttatatttatttttatacacttaacccctaattttgttttttcggttacaatactctattacctttacttctttttgcaaatttaaggcgtctaaaacattactaataaatgtcaaatggaactgttactgtgtacatttgtgtatatctggcactaaaactttgaagccaatgaaaaaatatcttgtatacacaggtgtacacagtgacaatttcaatagccaagtgaaaaaaattaatgagttaagtgtataaaaattaaaacattatagagtttcatcgcaaattactctaataataataatactaatggttaaagtttttcttacaattttaagtttgggtatcccatctaagtttggattttgttttccaaatatagtgaagacctctttccttgcttcttcttgccaattagtatggatagataggaggagcatagtccaagcaagccaactattagtggtttcttgtccagcaaaatagaatgtcttgcattcatcaacaacatcatctattgaaattctttggcttatgttgtcatcatggtttgcctttactagtaatccaagaaaatcattcccataattgtctgcatctttgttcattactttgtcttctcttttcttaatcaactctacaattgattggtgaattgttttctcaagcttctctgcttctctctcatctttggtcttaaaaattttactacattaaaaaaacaaaccatggtatgtttattatgtcctggttggctaaacttctaattttgactttttaacttctcaggaagttctttctgagaaaactactaaaattgacttttgtttagagttaaaatctaattccctagttacccaagtagtagcaaaaatatttttggaacttcaaaaacttaaacaatttttaaaagtctaaccaaccaaggcctagctagtataaatatgtaaattcattttataaatggaggcatcaatgaaaatgaattacaattaggagtatttctattaggagattaacacggtctcaaagagtgcatttgaaatttgatactgactcactaatgatacaaagtatcgggtcgcactcttcgagacagtatcaatctcccagttgaacaaaaattttattttctcagtccatatctattaacctctattcaattacatattatagactctatacaccaattacaaatactaataatttgctaattagtccttacactattttcgtagtgtaacaactagtacacaaagtaactaagaccctatttgggtgagcttctgcttcttattttagcttggtaaaactttttagaacttaaaattgaaacttgttggttaccaaaccaacaacagaattgttttagagcttttaaagcccgaaaacagcatttgaaaacctagccaaccaggacctaagacttgtctcgaaactaaaagaaatttacctgatccccgaaagtcttactgttaacatgtttctggatgctaacaaggacaacttagccaacatttcaaaaatggcactgccttccttataactgctcccaaatgctgtcctagaaataacctctgcagtcaacaatctaaattcttcatacacttcaatctctttgccttcatcacaattccatttctctaacattgtctcaacactagcaatcattgctggagtcataccctgttaagaaaaagttttatttttaaaattacacttaaagatgatcaataaaagtaagggataattacactatacacc

SEQ ID NO: 187758 - DNA, 3166 bp, Cannabis indica
acttctatcatatgccggaagattgacgctgataaaatcagtagcagcttccatgctggtctacatgatgtcaacaaacaaagttcccatttcaacatgcagggaattggatgcgattgttcgtaagtattggtggcaaggaaatttaaataaggatcggtacttagcgttgagatcctgggacaagatatgtcaacccaaggcttcgggtgggctaggaattagaaggtttgaagacaagaataaagcattgcttacaagacttgcttggagtattgcccagggtcaagaaaaaccttggatcaagtgtctgttaggtatatactgtaagtatgagaattttgggagagtcaagaaaaagagcaatgattcgtatttctggaaatgcatccttgatgttcggagtattctagctaaagggtcattggcattagcagcaaagggagactccattaatttgtggaaccaaccttggattccttggttggatttccctgaacatagaagactaatggagagcattagaccaaggggatatacggtcagaatgttagcggacctctcaaatggaaattcttggaatagggaagtggtgcatcaaatttttggggaagagtcaggaattaaaattcttgacattcctagactccctgcgaatcaaaaagataagttagtgtggaaggagaacaagatgggggcttctcggttaaaagcgcttatgtggtggaccaaggtcacagatttgatgataaccatgttgtttggaaatggttatggcattctgagttacaccccagaatttccataatcttgtggcgatcaatcaataacactctaccagttaaggagaagctgcctttcttaagtgagaagggctgttttttctgcgatgctgaattggagaattgtctgcacttattcagagactgttgctttaccaaactcttgtggttttcaagtgtttttctgttgagaattgataaaatacctgggaataatatgagcagctttgtggagaacttggttgtggaaatgtctagcataagagttggaagaaaagaagtcctaacctacttgggatgtatcgttgatcaagtctggcaggcaaggaatgacagatccttaataggtatcacaactgatgtcgatttggtaaggaaaaagattaaagtagcgtttaagaactatgtgagtttcagtttcaacagtgaagacataggagagggagggagaatgcaattggcgacagttcctattcagaggaaaatcagcagggtgcaagaagaaagggttttgtgtaccgatgcgtcttgggttgaagaggatgttggcttagcatcagtgatgatgaaggataattcggaagcttggggttataaaataacaagaggtagagccggttctgctctggaggctgaactaaaggcaattcttttggctttgacttgggctatagaagaaggatggaatgagatttgtgtaatctcaaactgtttttgggcagttaaggctttaaatagcaacctttgcccatcggattggaaatctcttgatacatctttggctatattggattgtaggagtaagtttaattcttgtaagttttattatgttaatcgtaggttgaatgttgtagtagatggtttggctaaaaaggctagatctattggcctttctaattttgtgtatcatggggagggtgatccccctgtgatccccatctattttcctctttaatgaacttttgttcttccaaaaaaaaatctaaaagagatgatatatctctacatttattgactaggactagacaatcatattgaatacaatctattgaaaattccacagtcaaacaccacttgatcgcttttagcagagctttagtttcaacatggatttggggcaagtcaactcgaaattgaagaataacatcttactatgacttctccatgacaattttaaactatagctccaaaaccaattcttgagctttgttctctaactgaaccattaacacttatcttgaaacttccagatggaggcaaaatagtattttgaggataaatagcctccacttaaagaggagtgggaactaaaatgtgaggatcctaattaccactcttactgtaattggaactagattgaacacaattagtctgagcattgcaatagtcttgcaaaaaagaattcacccaaagttctatatctgtagtgtagggatcattagcagtaaagagaaacttgttttgacaatgtcataaagaccatatattaccaaaaaacaaagacaaatcttccttattcaaactttcaaagcctctcataagaaattctttaatctcactcttgtaattgtttttgaaaaacaaggaaaacttagtcttattccaaacattagctgctctggaacactgtaggagtgaatgagaaacaatatctatttgattagaacacatggaacaatagggattatcaagaactttatgattaaaaagatttagggtagaggggagaacatggttaaaagccttttagataaaatgtttgatctttgggggaatttcagaggtcctagtagatttccaccacctcttttagaaagccagaattagtagagcaaggagaagaatgaaaggatttagctaagtgataagcagaattgacagtaggactgcctaaagggtgttcccaaatgagacaatcttcttgggaaggatcaatgagaactttgagaatggaattcactacctttttagggaaaaagattttaagtctattgatgtctcaatacccatcatcattgataaaaaagagacaatgtcaataggggatgagtgccatagttgtaattaagaatgatgaactcaggaagccaattagaactaagggtatggatagatttaacattccctacttttcaaaaaagctccttacaaaggagatctcttccccaaagtaaacttcatcaagagaaagacgagcaatggccttgagaagcatggagaaaattattatatttaaaatacttagctttaagaagtttaccctgaagagaattaagattagtggatgttctctaagcttattttgcaatcattgcttgattatgttgaatgatagcatgaaaatccaaatttagaatcacaaagaaaagaccatatttttcatt

SEQ ID NO: 187759 - DNA, 3365 bp, Cannabis indica
gaattgtgtggatgctgaattctcaagtaagttctctaaaccaaattgcataaaacaccaaaaacttactacggaaaagatgtttttctaagcttccacttgccatgtattcatacaccaataatctatgttcatcttcacaacaataaccaataagctttacaagattatcatgtctcaactgaccaagatagttaacttcagcctacaaaagcaaaacaaacaatgaaaaccaaaacagcacaaaagataaatgaaaagaaagagaatagtgaaatagtgatatagttaataatatatatatatatatatatatgtatatgtaccagccattctctgtcaccttggtagccttctctattaagttctttaatagcaacttgagtagttatgtaaccagaacgaacagaatcatcaacaagtcctttataaacaacaccaaaaccaccctcaccaagaatcaaatcagggcgaaatctcttagtggcaagtctcatctcctcataactaaatatgtcaacattgctgtaaccaggattttggcgtagatctttgacatcccttggagccaagggagtgctactactactattacttctatctgcttcacaagggtttctcacagatgatgctgcaagtcccacttcaaaaattttacaaagaaaaaaaagatagttagttagttcataattctcttaagcattaatgattcaaaaggtcagttatggaatcaaaggtgggggctttaatgtcaaaaaaaaattcagttatgggatcaaatgtgttgcatttaatgcaaattaattaaaaaagcaaactttttggtgttatctatctttaaatagttggaaatgaagtgattaaggaaaataatataaagggcagtattttcgatcaaacccagaaaaaagaagagaaaaagtttgaaatttgattgaaaaattgaagaatcaaagtttggttttttattttttatgacataaaatgtgaattacctggaatcctcttaatggactggtgaggatcatcttcaatactgaaacaaatccccatgagatttttgaaactcaaaagatgtcacatttcatagtctccgatcgagaatgtgtttcttcattcgctggatttcgatctgggtcactggccaaccacaaagattggagagagaaacagacaagagttgaaaatggggtcagtcaatgggtcatacaccaaacaaatcatttgggctttgattttcttttaggcccatcttgtctatgtttagaatattatttttattttagtgattttttgttagaatttcaacaattatgacattttcttttaaccatattattattaaactgaaatgattcatgatattgtttataatcagtttcagtgaaaataagaagaaaaggttttcataatcaactaacctaacaataataagtattgttatattttttaagatattataaattgttattagtagcaattagttaaaataacagtgtacaacttaattaggatattttttcatttagaaatactactaggattagaattagaataacgagtcaaccaatcggtggcttgattcttccatcgtttgacaaaataaaataaaatgaaaaatattgcaacattactgttaaccttaaaaatatttatattgagttgcttccaccgcttaaaaaacacaacataatagttgtatcagatttattcaaccccttaatttgaacactcaactattatacaaggtacataactccaccactagctaatcgtagtagtaaaaacttaatcgcagtagcaaaaacctaattattaaaactgttaatatcgttattctgttatgttagttaggagatttagtcggtggttgtgtactctgtacacagtatatataattgtatctttccttgccattgtatcattcaatattcacaatcaataaagattctctgttttctatattgtaatatggtatcagatgcaacacaataaagctccaagaagttccttgaagcttttaagaactcaacaatggtgagaactagagccactacgtcagctaccaccactgttcccgtggtcgatgccaccatagcccagccaccatcgcacactttcgccaatacacaaacacatattgattcgtctcaggcttctgccgatcctcctcctcgatctaatcctatcgaggttcctctcgttcctccatcagatcgaccggcatatgaagatgtcagatctccatactatctcagtaatgccaatcatctaggctcagccctcacgacccctgtcctcacagatcgaaacttctagccatggaaacgcgacttcaagctctccattggcgccaggaacaaaacaccatttcttgaaggtactcttcctcaaccccctcctaatgataatctctacagttcttaggttagatgtaatcagatggtgatgatgtggatcctccactctgtgtcacctgaaattaaaagtggtatcatgtatcttgatactgcctcttagacgtggactgtcttaaacaatagattcaaccaagaaaacaatccgaaaatctttgaattaaatgaaactctcacctatcttacataaggtgatgattcgatgagtgcctattttactaaactaacaacgatatgggatgaaatcaatcaaattcgcccttgaattccttgtacttgtgtagctacaacacagaaccatgcccatctcaatcatgaccaagttcttcaattcttgaaaggactcaatgaatcttttcatgttgtccgtgatcagattctacttattgaccactgtccttctctcaacaaggtcttctctatggtcattcaccaagagaggcaaagaacattgggtaatagaaatattaccaccattgcagctgctgctactgtccctccccccagctgttgatccaaatcccatggccaattaggcattcaagaataaaaggcctcgaccccactgcacacattgccaaaaagcaggccattataaggacaaatgctattttttgcatagttttcctcctagctatggaaaaccaagaaccagtgacacacctaatacaaacaatcgaaaactagacatatcacagacctcatgccaagccatgcctaatcccagggagggccgacgggtgtggctgaaaaaaaaaaaaaaagataactttcagacggctaaagatttaagaacgagaaatcttagtcagacgatataaaatatttggagtttttaattattaatataattatattaatgtgatttgctcttatttagtttgtgtcaaattgagtatttgatgataagtttatttttatggaggttgatttgtatttttgaaattg

SEQ ID NO: 187760 - DNA, 855 bp, Cannabis indica
tggttttgcgaactccatcgcaagtgagctcgtatttcgaattccactagcacttttcttctcaagaagctacctcctgtgtagtagcttgggctaagtgtcgttttaatgaatatatatatttttttttttaaattatgcgtttatatattacaacaaataatttagaattcaagaccaacaccttcaacacacaaacaacttcctatgagtacattggtttccttttaatgaatattcactttgcaaaaaaaaataaaaattatgaataataaataaaaggctaagaagttaaagaaaaagacaagaaggtggggaaatttacagaaacatacccacctccccactgtctgctacttcttacttaaaactctttttatttttatattacctcctcagtccagtcactcaactctcggacaccacagtcttttcttcgctccttttctcattttgacccccttccctctctttctctctctcttttaattgcaatgattaatattaattaatttaaatttatagtttaatcctttagctgaagcaaacacattctttaacttaattaaactcacattaatcatatttaattaactgcaatataagtgctacactttctctctctgagtattttgtcagtttctaggagtgaaaatccaatggcgaaagacctgctgcaacttcctcagttgacgatgctgattcttcttcttcttcttccttttcttcctctccgactgcttctgcaacggtgtcgttttccagctctttcctccatcttcctatctcttacctcactcgcattgtgatctctttcctttcgatccaacttacttccctctctctctctctctc

SEQ ID NO: 187761 - DNA, 1035 bp, Cannabis indica
aaaagagagaaaacatttgaaagtaaaggtttggataattcctttccttcccttagcgtggcgtgggggttgaaatctgactccgtccattggacgttccagatttattacgctttagcttacttcccttaaccggacacagctcatccttagaaaaaaacttcatcctcatatataaataaatttctatttttaatttaggcattaatttgattcatttttttttttggaaaggaaattaattaattaattaattacttgtctccaagcattatgcaatttgtctcactggtaattggtcggccaagaggagagttggggttgtttaggtggggcccaatttttctgggccccactccagatctacaaataacgctaataatcatagatacagtaacagtagtagtatataagatcagatcagatcaatcatcaattcattatgtgcttacgtcgacggctaatccaacggtttacaaggcgccgaaagcacaatacaatcggctgagattgagagagaaggctctctaaacaaaacggcttcaacttaaaagcgccgaactaaccaaggaaacggtgccatgtcagcacataagaataagcgtttttcttaaataaataaataagaaagaacagcttgtttatttttccgctttctctttttttatagctatattacttattagtattcataataatttctacatatgaacacaaatggaatttctgcagagctccgggatccgcgtttctcgatcatagcgaaagagtttcaaaaaaaacccatttccaatcttcttcttcgcgcgtaatcgtcattgttgacattctcatctactttcatgtgatttttctatccttttcctttattgatcattatcagtttttctctgattttgcgtatgccaatttttttttttttggtttttattcaatagaagctaatagcttggttgttctttacatttgacgttggattttggggactagattttattacgattttgtatcataatctaaatattctaagcctaa

SEQ ID NO: 187762 - DNA, 4383 bp, Cannabis indica
attatcagttttctctgatttgcgatgctaatttttttttttttggtttttattcaataagaagctaatagcttggttgttctttacattgacgtggatttggggacagattttattacgatttgtatcataatctaaatattctaagcctaatttagaaattttctttttcggttatggatgtgtaataactgcttttagaaatcacattattggattttgtttagtgcaatttttgttggaagatctttgtgatttcttaggcatggccgatttctcatcattggatattgatcttttttgttttttcttagcagattttgtttgattgcaagagatgaaagtttgaagggcatagcattattatttacggagaaggtttactgaaattttcttttgggtttaaatacgtatataaaccgaaaaaggaaaaagggaaagaagcgagacaatgtcaacgaggagtgaacatcacacggtaccactttcggtgttactgaagcgtgaattggctaatgagaagattgagagaccggaattaattcatggtcaggcgagtcagagtaagaaaggagaagatttcactttgattaagacagaatgccaaaggatggttggagatggcgtttctacctattccgtttttggggtaatgattatttttttttccttggacaattttttcttaacttccctgctaagatgaagacttcagttagattcaattgttcgtcgtcgggtggttgactgcatttctaaactccgagctagattttcatagaatgttctttttttttccttgacatttctcgtgcacatgtgttggacgactttcatttatttatttttatgatattctgatatatgaaacacccatataggcattatccttcgtcaactaggagtgtaatgactggtctacttttgatttgttcaacgtggctttacaatcatttgtggctttctcaacataggtgtattgagtaaagaatgatttgagttgaagctatatgttagaatagtctttgttgaaaaggattgagctccattagtggaacatgcttggactttactattaagttctgtcattttgggatttataattttcaaatcaaggaatgtctttttgagtattaggctagttaagagtttttcaaaatcgcaatatatctcctgtattacttgactatgcatcatctatgtgtttcattttgaactctgtccatgactagctagctccgaactttgttagactatgacaactatatttgaagcatcgttgtgtgactctttgcggaacagaagtggataaaaataggttcataacttaacagctcttgcatgtttcacagttatttgatggacataatggatctgcagctgccatttactctaaggagaatcttctaaacaatgtcttaagtgccatacctttagatcttaacagagatgaatggatagcagcattgccaagagctttggtcgcaggctttgtcaagacagacaaagattttcaagagagaggtacagttgtcatttctatgttatgacattgttttccatttagcttagtttttaatgatctatctgtttgtaagtttttcggtatgtatgaaatttatatattgttgtggttgaatttcagcacaaatgtcaggaacaactgtcacttttgtgattattgaaggatgggttgtaactgttgcctctgttggcgactcccgctgtatacttgaagcagctgaaggaggcatttattacttatctgcagatcataggcttgattgcaatgaagaggagtaagttataaatatgatgttaatgttatgtttccagtggttatgttataacaataatatctatgctaagacattttttttcttcaaattctgttaggagatcacgtatcactgcaagtgggggtgaggttggtcgtctaaatactggcggtggtgctgaggtaactccctattgtttctctcgatatgtttaaagtggggagttttccaattgtctatttcgttttgctaagcgtgcacttctcccacatttgagcatcacatcttgtagtattgatgcatgaagcttaactgaaccaaccaaacgtcatatttggaacttaagatgtaaatcaggacactgcacatcttggatgatgagagtaaaatgggtttaaagttcagaattttttataagaaagatttaggttgtaggatggagctaaaggcttctctttttccccctaaaagtttctgctttgggataattctaatcaaattatcatgtatgctactatatactatgagatactgatttcctattatcatgtttatgcttttatttttttttatcagattatacataactaaagtttgtaaatcactttgggtatttcgtagattggtcctttgaggtgttggccaggtggcctttgtctttcacgatccattggggatagggatgttggcgaatacattgttcccgttccttatgttaagcaagtgaaggtttgtttgtcctttcatgtgtctctcacattattctgctttcttttatttgtttccatttgcctagacagctttgcattagatttttctttactctcctagtgatagtgaggattaatctttttctcctgaagtttttgtagatagtgtattataatataactttggtttttctgtacccgtgaccttcctatcaaaataatcatcttggtgcaatgatcaaattacaggaaataaaatatttaccttcaattcaagggctaaaatagtagtatcatacaggttagctcaaatagctgccacaaagcctgaggtttgatctagcttttaatgtttttgattgacaagaaaggaggtcttgtttggccaaaatgatttgagttttgatgaaattaagaaattttattccttcatagaacattcttttattttttatttctaactactgttgagttgtggtaaaattactttagcccttgatgtttcatttaaggtttctacttttttatgaatagaacattataccctttaaatttggtcaatttatgtgggaaggctaacattgcagcaatatcatagtttagggtgttgcattagtaaaaattaatcttgtttgacagtaattgggatggtattttaattttaatttaaagtagtgatcctctcggtggaccctataaagattgtataacaaggtttagagtgatatgttgcttttggagtcaagctaatatgggtgaaaatgtaaactagtagttttagttattttgattattttacatatttgggacaaatttttaatgattaagcgcctgttatggaattcttttacctgtcctttttccttcttgaatttttgtcacttgttgttgctcaatatgtgcctgattttgtttcaagctgaacttaatgatagcatttagattaaaactctctcttgtagtgattgaatttgaagtcattgtttgtgatggttcaaataacaaggagtggtttcttctggcctattatttgtgacgaaacactggttccataaagtcatatgttcataagccatgattgcattctttcctgggaaagtctctgcattttcagctgaaagagagctgtccacttgagatcatctattttcctctttcaagacttattatttctcaagtattgatcgatggaattttgctgttattctttttaaaatttcttcctttgtctctcttgaaactttctacagctgtctacttctggtggtaggctgatcatttcaagtgacggtgtttgggatgctttaactgcggaagctgctcttgattgctgccgttcgatgtcagcagatgctgcagctacgcaaattgtgaaggtgcatttacaattaaaacttatttattgttttaaatataatctacacagaggttgttgattcacatcacatgcataaattatggatagaaaactctcttttaccattacaccttttgatgcgatgacaccactaattttctgttttcacgttgtatttgttacatttatacatataatatatatatttgttaaaaaattattttatttcttttccaggaatctttacatgcgaagggacttcgagatgacacaacctgcattgtgattgatatattacctcaagagaagccacctgctccgctgcccccacctaagaagcagggaaaaggagtgtttaagtccatgtttcgtaaaaagtcaactgaatcaacttcttatgttgacaaagagtacatagagccagacgtggtggaggaattatttgaagagggctctgctatgctttcagaaaggtttgtgcttgaaaaagtcactatcaacttaacatgattgccatgagaaagttctctctctctct

SEQ ID NO: 187763 - DNA, 1069 bp, Cannabis indica
ggcaggatgaaacaaagggtgttgcacaaaaattatttaaacaaaaccaaaatgtaaactaaatttatgtaataattattagtatagtaactgtaacacgcctctacacagaaaaataatagtctaataattaatatttaaagttctggaaatacagaccaaacaaacttaatcaaaatacctttattttgtttaaaaaaacaagaaaagaaaaaagaaatctactattgagtggttaaaagcccacgggctttatattctcatatataaatacaaaaattggttctaaactgaataatcaatcacaacgtaaaaaaggcaagaaaatgaaaatgaaagaaacaacagagatcgatactgaaatgggattcatcaagctcttcaactccaaaccctttcaaaaagggtttgcaattgtgagtttgatttctgtgatgctgattgcggtattagaagacattcaacacatttattacgggaagaagaacgattcctctgctgattttgacagaattgtttggggattcttctggccccaaatcttggtaatttcattgttacattcttgcttcttattcttggcttgtagcaggagcttcactagcgccagagcaataagaatcatggtcgttgatttttctctaatgctgttattcgcatatcactcctacgtgtcgtattgccatacctccaagaaccagaagaagacgatgatcaatgccaatggagatgaaataatagaaatgatatcatcatcatgttcttcaagattacactcgattacttctcttacttctatgtttgcaacactaaagctagcttttgcttatacagatgagtttcacgacttctttagtgaacaagtcgtttattgaatccatagttttgagtgtcttcatcattttatataaattctttaataataatgaagttttgtttttgtttttttggacttgttacgtatatttatatatttatgtatagttttgatttgctttttttttggataataatttcttaatgtaaaaggaaaaagttgtgccatgattcatatttaggagttatctat

SEQ ID NO: 187764 - DNA, 2007 bp, Cannabis indica
tctctctctctctctacaaatttgaactcttttcttataaggcaattctcttgtttgtaattctcttcagaaataaaaattcgaagtagatgtagttccattaacaatgcgacatgaagagtgaactataaattctgtgcgtttctctgtaatatttacttaagttattatttatctcatcaatctagcgaatcaatattgatcattttttagtgtcaacgattatttttgtgtatttatgaaaatagtccaattttacacttacatattttcatacatgcatattctttctactcatatactaggaaataagaatatgctaatattgagatgctataatagttaatttggtgtgtcatactatataagtaaaagaacataagtacacttttcaaacactataaagttttaaaatatatattagataagttgtttaatataatataacgttacatgtttgtaggtagtattagtttttttttttttgaacggaaaaaagttgcttccgttaattaaaggtccttcaaaagtaagaacaataaattagtaggaatagactccttactaatcatgcaatcagctttagaataagagtccctaactaagaagtgggccactttattcggagatcactttacaaaatgaactgaaacataaaataattctgataaaatctgatattaaattgcaccaataacaattttatatcacttagtaatacttgccacaataagatacgactttaacatttctctatatattaggaagaaaatcaaactttatatatatggctacccatttattgttaatattctttaatttttaaatttagtgtaactgcttaccctttaaggaaatataaaatgataagaacgccaacaaggtatacattagtgtatatatatagagagaaagagtttgatgaaacatatatattttgtaagccaatacatcagtaaaatctatatatatatctaagaattatattatataggatataatacagtcctcagccatgaacaccattgcactactctcgttcagtctggccttggccatgattttcttgtccggtatatatagctattgtcctttatttttattctctgtatatatactaatttttttctactatataattgtaaacctaaaatattatgtatgcacattttatcaattcatatagctagagttttgaactttgtcttgcataaatataggggctcaatcagctacattcacaataaaaaacaactgtccattcaccatctggcccggaacccttaccggcgcagggaagcctccactatcatctacaggtttcgaattagcatcgggcgcaacacaatccattgatgctccggcaggatggtcaggcaggttctgggcccgatccggatgtaccaccgatgccaccggaaaattcacatgcgaaacagccgactgcggatccggcaaggtttcatgcaacggggctggcggaattcctccggcgtctttagtggaactcactctggccgaaaatggcggccaagatttctacgacataagccttgttgacggcttcaacttgcccgttgggctagttccgtcgagctcgtgcgctagcacgagctgtcctgcgaatgtgaacagcgtttgcccgccggagctgacgttgaaaggagcagatgggagcgtagtgggttgcaagagcgcgtgtttggctttgaacaaacctgagtactgctgcaccggagcatatgggacgccggagacttgcccgccgacagactattctaagatgtttaagactcagtgtcctcaagcttatagctatgcttatgatgataagtctagtacttttacatgcagaggaggacctaattatgatatcactttctgtccatgaaataattatattttacagttacattttatgtaatttcgcctagaatatgagtaggctacttaaaatgaaattgattttttttattattaattagaggttattgattattcccttcc

SEQ ID NO: 187765 - DNA, 2494 bp, Cannabis indica
tctacatgactgttaccagtgactgactaaactagtaaaatattttgtttattgaaaggaaaatgatgagtggctaaactgagatgacactgtggtggtcacatgctttgtggagatatgaaagtttatatggtccatctttaaccacccctatgaatagagctttcgttgctacattgtccttagaacacaacaatcatgataaaatttaataagcaaattattgtcagcaacaagcttagaaacacttatgagattcttaactctattaggcacatggagcattttatttaattgtaataatctaccataatcattctataaatagccaacaccaatatatgaaatagttgattcatcaccattacatactttaacagtatccttacaaccatcttcctatttctggcataagtttgtagcatctgaagtgatgtggttactggcaccactattggcaaactaagcatcactgtccacaacatctggtgttgcaataaaggcattaggattagctttgaactgagattgaccaccaacttggtcacatccagaatagctctcatcatatttatagtaacaaattaaagttgagtgtctaaacttgccacacacttggcgagtttgttaagctccatttgtacaatcacgaccatgaggtctaccaccatatcatcctttattttcattgaatttgccaccttttggttagagttggaattattaaaggagcctcttcctcttcttagattgtgaggttttaaagtcatgtttgcctgaggatttgcaatagatgaattgattatcttgctattgttggctagtgtttgaagtcattcgatcttactgtcgaagcttaacaaaatgtcttgtagttcttactaggttgttttgattctagcttcaatctgaaccacaatagaaatatgctctgcatcaagtcctaaaaggacatttgccactagatgggattcaagatattggtttcctactacagccaggatgtaagaccagatcttctttttccataagcactctgccattataggagactattttcttattgtttgaatcaaggttcaaaactcattcatttgagctcttaagtatgcaccatagagactctcaagagctatccatagttgctctcatgacttctgtagcaattgattccgtcatggagctgtataaccaacctaagagtaattggttgttaataatttaatgctcaaactctagactaacttgaatcacagaaactttagatccatcttctcttattgtaatacctataggaagaaattcattaggataaggatttattccaatcaaaaaatcatctaagtgatgacatcaaataatggtgaaaaccatttttttttctttctatcaggtgtagttattactaacaagtttgagggaaaatggttgattgagggtacataagtgttatggatatggattggggagctagaaagtagaagcctcaactctgctagcaacaattcctataacaacagagctatttcaaaagagcttgctgtatggtctgctggaggagtttggttgcaattaccaagactttccatgaggctaatatgctctgatactaagataaaattcagagaatattgatagtattttaattgtaattctcagctcaaaaataaaatgaaatggtataattttatttataggcaccataccattacaagaataatgaagtcgttaggctctattacaactatcacgaaaatatctatatagaaataagtgaagaattttcttataacaatattttacaaatattgatatccctaataatcataataaaattgattggggaccagtgcagctatcatcccttgagcttactgtgtaccatcagtactacttgtgccaaaagatgaattctcatacttatcacacatgaatatctattttttttcaaaaaaataaaaaataaaaaaaaaaaattttagaatattatatatattaatttattatacttagatggtattttagtttcactcaaaatctatattcctaataaaataaactattacaatattctatatacattacaaatacaatataatgaactaaaaaacaatattaaatattcaatttaaaaaaatacacattcaatactgtaatatattaattttttttttatatttatataccatgtacaatatataatataaaaaaaaataaattaaaagataaaataaaatatcaaatacaattataatcaacatctttacccttaatgcaacatgcaaataaaaaaaattcacctgcaaaaaatacaaacaaaattcaaatcaatatctttattaaattttcaataaaaattcaattaaaagatcaatcaattaaatggaaaggaaagaaaatgttagttcaaacaaaataaatctcaaaagctcaatttcttctcagccttcacccataccctaacttttctcattctcttcatttcatattcacc

SEQ ID NO: 187766 - DNA, 2153 bp, Cannabis indica
tcaaaaataaagttcaaacagtttgttacacaacatgtcttttttattttatttacgcgtgtaagatagtcaattttaacatgctttttttattgtaaattattccaaatttcatagttagggcctggtttgagttgaaatggataataggtaaaaaaaaatttaagcccttactatgaaaataaatggtttttttaaaaaattattaaaataaatatttttaaaggtatttttttatttgggctctaagcgcccacctatgcctagggccggtcttgtttatagcatctccattgagaatacttttaaattatatgagactcgattttatatttataccaataatagtgtaacatcgagaaaggtactaaatagcaataatatttttgaacaattctcctattaaaaataaaaaagaaagaaatttattggggattgggatatgggggagaggaatgggcaatgggagacattagagaaggcgtacggcgtatgttttcatccacaacacaacatgcccatcattaattattaataccaaatcctactaattataatatttatattaataattatttaatatcattaatactaactcaaaccaaaattaattattaattatatcttcgaaaattgatcatggctagctactcatctcatcgcttctttccaatacaattctttctctctcataatgaaatttacaaatttatttatttatatctaatcatcttttataaatatttttgaccaaccccaatatataatataaaaaatacatattaaatttagcataaaatattaataaatcataaatttagcgcatttgctgcatttgtgctctaataataatagtaatattgtaatttgaaaaatatattaaaataactctttgatattaaataacaataacataaataaaaaatatatattaattgtgtgttaaatttgataattggcccaacttttaacatatactaaatttttttttttttaaattattaaaatatagcattacactatttatttgacatattattagagatatttttatgtcttattattatgacacacacttacacataacacaacaaagtaaaattaattttaaataaaagtaactaattaaaagttcttatcacataactgttaaatttatgtgttttgctcaaattctattaaagaatacttaacactttaagagaaagttaagaggtacataaatctttgaaaaagtcatagttttttatggtagaaaaacactcttattttctcctatttgtttttctagatatcaatcatatattactctcttatatatttatttttttaaaaaagaaaacctatcaataaattcttcaacttattattattattattagagaggagccttttaatatttgcagacaataattttagcttgggaaatttcactctgaatttatgacatctctcactagtagactagtaccattagtaccatatgcttttcaaatcaataaaattacttaaaaaggtccggggaccatttacttaattatatactaatatatagatatatattataatatttcattttaaaaatataaataaaaaaaatcatattctcaaatctcaaaatgttccaactaatttctttattgacaagctttatttttttatttattttggcttccacaaattgtttttttcttccttctatacatttaatatttattattataagttttgctaattttttattttgggacccaaagttaacaaacaatcaccttacaagaacttagctaaaccaaaataagcaactctaaaaataaataaatgaactttcacattattaacattttctttgttcataaagaaaatagaatgattaactaatcaattagtaacaatttgttatatttaataaagacatttgtgatataagagagttgttttttttttttgttttttgttttttttgtctaaggaagagttatgagtttataagtagcacacatctaataagtgatacatgtggttgattaacgataatctctaaaagttattacattaaattatataaaatttaatatttaattgcactaagaacaatataacacttgggagagtgatagatattattggtttttttttttggcatttctctc

SEQ ID NO: 187767 - DNA, 3584 bp, Cannabis indica
aaaatttgccacgtgtacacttgcgtatactgtggtagtctattgtggagatacggagtacaaagcaaaacgatttttcactctaggggtttaaccataccaaacttcaaagtgagtttagttgtaaattacttttttttttaataaaactattaattaaatatccaattttacattaaagttttgcaattgtatgttaaagtacaatgctaaaatttgatgtaaatttaccacaaaattactttttgtgctaaatattttataatttttatatttcttattggagatagtctaatatagctaataaattctaacattctctcccttaagctgaagaataaatgttaatcatgccttgtttgttacaaagatagtcaatccacaccccattcacaacctttgtaaaaatatctcctcattgttctccagattttatatatcttgtggagatcaagccttattgaattttttcatgaacaaaataacaataaatttcaatatatttagttcactcgtgaaacacaagatttaaggaaatataaaaaataacttggttatcgcactagaattttgcaagaactaaagttctaaacctgaattcaaagctgataaatccatacaatcttacaacatgttagcgaagtatatgtgagtgtgccaccttaaatgtagcttattattaattagtgacatatgctattatttttattatttttagtgacatatatgtgagtgtgcaaccttcaatgcaacttataagtagttagcgatgcactggcgaaatagtatgatatattttacgaaatataggtaaatgcattatattcaacttttagttatttactaacatgctagcaacaatatttaatatgttttgcgacataaaatgaattgacatacttaaatgcagtttgtagttgtttagcgacatgtttgtgacaatcttcgatttagcaacattaattgtgacatttagcgattatttatcgattaaaatttagtgatgttttgcgacattaaatatatattttttctcttttttatttgcagttggtcgtaaagaagtgtttgtgcccccaacttactgaggatgagtattttaggtccattaatgagggtaaaacctctctttgttttgggatggacatcgatgacacggtggatgatgatggtacacaacattcgatgtttgaaacgcaagccaagaccattgccgtggccgtgggtaaggcgaatataattccaccacagctgctttcggaactagccgagtcatctgctttgagcgctaatacaccagagtatagagcgctggtggagaggttggatagacttgagaagcaacagtctgccattataatgtcacatgcagagttattgaataaccagactaatgtgagatgtttacttctagataatcagaaagaaatgaaggagttcttcatggctcagttgggaaacttgatgacattgttgaaggagggggcatcacagccacaaccatcccagccggaaaattacagatcgtctgatgttgaaattgaccaccgttgtgatcaggaggatgatgtgtacccagaagattgggaacacaatgatggtgagcattcgtctcttccaacgaataccattatcacagccattggtgatacacagtcacatgacgatgtcttactcattacttttgtcgctacataagtcactctatgttgacaatgctttcttaaaagtttcatttcatgtttccgtagggtcattgaaaaatgttgttaacattgttaacaacattgtcgatccatattgccaattgtataactctatgttgacaatgacccaaatgctttaaaacgaatatattttaaatgaattgaaccagacatcgcagtatgtcagttaagtcagtgctaaagattgtggtttattgttagatatcactaaatctcaaaaaattctaaaaacaattacgaacctagaaaatatcgcttaagtaattcacaacgtagatacacgtttccattgtagcatgttgataacgtcatcgttaaagctcatggtatattgctagatatcactaaagctcaaaatattttgaaagccaattaagaacctagaaaatgtgacaaattcgtaaaacataaaactaatatagacaacaaaaaatccagttcttaaaacatacaacaaatacatacaatgaaaatactagtaaagagaaaatgttcaaaatcgggctttgcatgaagttctgttgtggctcgaaccgccacgggttgaacaatggcaaggttccacaactttgtcatcattatatggataaccattagtatgttttcttcctgcattcctcttccttgattgacctacgagttctgagagcacccaatcattacattgtaggtattcttccatgtctcttttgtgtaatcgggggagcttagggtgtgcatgctcacattctgactaatcattgtggcatatgcatggggacaagaaattttcaacaattagaacattctgcatgtgcatgttttctatattgagttgacatcaccacctctctgaccattatgacctctaccaacgccaaataattgcccagcattatgctagacgctcctgaacctaccacctttgtgttgcgctaccaaatcatcctcaaaagtagttgccaaagaggtagtgttttacttgcctttgcgatacacttaatgaaccaactttgtagtgtgaactttatgaattcaaccaatgtaattatcagatattccttaaattcttctatcaagttgttgaggctttttgacaacgttgcttgtcattatgctgtactgatcacctggataataaggaaaagcccacttttcaaattctatactctcaacgtatgcaacaatgacaggatccatctatttatgcaccttaaaatgtctatcacattccctcttcgaccattgagttagattcaagttattaaagtttgaacttccattccggggctgaaattacacgaacttgcaccgcggaagcaaacctaggcacctaaggtttcacccagcatccaagttgacattcccaactagggtttcagtttttgggattgtcttagtgcaaatgggtcaaactttgcattgtgacatcaactagacatactacagacatacttgaggtatccgaattggattcagagcaagtttatttttgagcacctcgagcatccggtgcccaagcaccctagtgcccaggttgacaatttgttaatttgggtgccttccaagtatccgaacggcgatatgacttttgtatcttcttcatcttcatgaaaaaaggggaagttggtatttttggggaagaaaccacacttcatgggtgacggaagcaaggccttgcacctaggttgacattttgtcaacctaggccgattccgatgatgtttttcgagaactcttcaaagaatcttctctattttcaaaaaagacgaagattcaactatttttgaggaccaatagaacttctagagggccataattgggatccagcaccaaggttgacacctggcactatgcccaacgcccaagttgacatat

SEQ ID NO: 187768 - DNA, 1105 bp, Cannabis indica
tatattaaataatagagtgtgagaccatagtatcaatataatgctaatattatagtagttttagaagtaaatgtgccaaaattattttagatgagaaagaaaataaaatattatatttttagataatgtagagattcttgacaccattttaagcatcaagcattgttgatgctcttatacaatccaaaaaatatctcgtttctttttttatgttctacaagtaggagagcggttacaattgacttcgtccccattatagaaaagtagaaacaaaaatgaagtcagagactttgactttagtgttggtgaatctggccggaatcatggaaaaggccgacgaggctctcttgcccggagtctataaagaagttggggaggctctccacaccgacccaactggattaggctccttgactcttttccgatcaatcgtccaatctttgtgctatcctttcgctgcttatttatctattcgttacaataggacccatgtcattgctctcggcgcttttctttgggctgccgcaactttcctcgttggaatttcctccacttttttacaggtacctctatctattctctcctttgactttttgttatcggtatgtatagtaagcaagtttgactacattgtttcaattaagtatcttaggttcaaatttacctatgatcatgtttgaatgaattttgctaatgaataaacatctccaatgaatagtgtaaattttgtattaaatttagctcaaaaaataaatcaatgttatattttgaccaaattttataattgtgtgttctaatgtactaagagtaaaataaattttattttaatacttatgtaaaagaagtcgacataaatattaaacttttattggaagtaaataaattaccatgttaaatatataactaaaaatttaaaaagttagtaattacaataatgagtgtgatataagtaaaaaaataatatttattgtgctgtaaaattgagctcatattatattttgtgttaaatttaacataatttttaacgatgtattaaatttaaactatattatacactatatttatagcactctattaacaaatcgtagatttatttgtttatttt

SEQ ID NO: 187769 - DNA, 3634 bp, Cannabis indica
tgctttgtttttgggatttttttctttgaattttgtaggatttctttgttgtcttgccggtcccaactttataaatcaggcatttttattttatctttttggaggtcttgtgatactgattgtttgtgaatggactcagatatatcgattatctcttcttgggagactacgttgaccgagggcaacacagtttggaaaccatttcacttctgcttgctttgaaggtattatctgtattcttcttctattgttgcttattattattagattattattcttgtctaaattattgatcttgcaggttgagtacccccaaaatgtacatttaattcgtgggaaccatgaagctgcagatatcaatgccctttttggctttcgaatcgagtgcattgaacgaatggtatatcttagttgggtagtcctcataattttccaattgacttgttaaatttacttgctttttaatatgtgtacagggtgagcgagatgggatttgggcatggcatcggataaatcgcttgtttaattggctacctctagcagcactcattgagaagaaaattatttgtatgcatggtggtattggtcggtcaataaatcatgtggaacaaattgagaatcttcagcgtccaattacaatggaagcaggctcaattgtgctgatggatttattatggtgacttgcctatgtttttcatattatggtgtttgtagaaatgttgtatttttttaagaaaatgtgatttgcttactaacattggagaatgacattttaactttctggtcttccctaggtctgatcctacagaaaatgatagtgtggaaggactgagaccaaatgccagaggtcctgggttggttactttcggggtgagtttggttacttcattcaaaatgatgttacattcatgttctaaaatttatacacatttaaataaaacgaatgcaagtgcattagtctataaacatgtgtatttattatttttaattagttgacttgatgcttttgaaattacttatgctttgattattctgcatatctaagatagattttgttggcttaatgatataaaacaaagtcatttaatggcggtttactattgattcatttgtgatcatcttgcattaactgcttgtcagttcttaactcttatgttatatgatgtccgtggtaacatttgtttccttcttaaaaggcctctttcactgatttttatcaggattggtagaatatctttacgtttggtgttaatttttgtttgtgggtatccttcactcagtttttcatgtaataattctctattgttgtggcaagaagtttgagagttcttttcttttcataaaacataatctaaagaagtatgcatttttcagcctgatcgtgtgatggagttctgcaataacaatgatcttcagttgattgttcgtgcacacgagtgtgtaatggatggctttgagcgttttgcccaggggcatttgattacgctcttctctgccaccaattattgtggtatgttcttggagtcaacacattctatgcagcattttgagctcttcatgaattaagtgtttcacattgttgtttttgacaggtacggcaaataatgccggagcgatcttagttctaggtagggatcttgttgtggttccaaaacttattcatcccctcccaccagccatatcttctccagaaacctcaccagaacgccatattgaggacacatggatgcaggtattggattggatataaagcttatattaggtgctgtagttgtatctttataactatttcatgtgagcgttgaataatttttgtttggtaaaaactatcaaaacaggagttgaatgctaacagacctcctacacccacgagaggccgcccgcaagtgacaaatgaccgaggctctcttgcttggatatagttgattgttccaacgatttgattcaacgaatttattcagaaagcttatacttccacctggggtttctggtttcctgtatagagcatatggtgccacacatgaaatgttttccagaaatgggatgaaaggctttttgagtttttggtttcttgccactcaattggtaggcctttatagatgatgaaaagatgcaagtttcggtcggagccaggttgctgccggcgggtaggttatttttacatgctaaaaagttgcagttgatccatccactctcacccttgtaaattgagccacaggcaggtagaaatcagtcttcgatgctcttcctctggattgttagtgcgctgagtatttgtctcattaatttatatatttttttattcctcgtgttaggcctattaatttttttcttcttcttcatttctttgcttctctttttgagatacataattgtggtgagatatataaaatgttagaatccttgtgagggtcctttgtatcatagaggtgttgctttgtgtatttacatctctcttgcttctgtacaatgtaacatttgtgtgaagataagccaccttatttttgtccatcacgctgaattattggcaagttttggtctgtagagaaaatatggtatgaatcttttctctgcctacaaaattacttgatgatgtttttggatttttgttaatattccattttagttttttttttttttggctgatgagattcgactgtcttgatttatttttgtaaaactcagccattttgctctgatctaaattaatgtacccgctaactaaagtgaacattcacgaggtgtaacatctgactaatgcgccatataatatgacgattctcataatgtattatgtatattatcttgtaataattgtcggacaccaaaactccacacaaacgttgaaaagaccagaaacttttaaaattccagatgtatgttcttagtctgttggtgaaatgaaatatcttttgccacttcactagtcgagcttaatgcaattaccgaccgacatgttggatggaatttggaataaaacttctcattatttgggtgagagacattgttcctcaacttttgtggttccttgagtgttgttgataagtcattgagttttatagaacgttttcttcattaatcacattctctccatatttgaagttgcaccaacaccaagctgctggacaacctccaaagtcgccaccggcaggtggtttgacgtgttgcacaacctccacagtcctgccactaggtgtctgtaatctaatgagctactcaactgcctcagctctaccatcagttcttcctaccacaaccgagcactcctaagtgtcgctcccccttgccaatgctaagtatcctcaaaagaagttacagactcaacgccataatactccttattttcaaacacaagcagtattatccaagttgatattactggcaaaaaagaattgtttttctcaaaacactacatcgggagttataaagaacatctttctctcaagtcattcaaacacttttcttttaccaaatgaatatttcacaaatacacatcgacatgaataccaaacttaacctttgcacgaggttgatttttaacaaaacaaagacaaccgaatacacgaaagacaacatacttaggaggtgaatcaaaaagaatttcatgagtcctgttattgagcaatggtaggtg

SEQ ID NO: 187770 - DNA, 1837 bp, Cannabis indica
gtaaaagaaaataacatcaaaacaacaataaaaaaatcaacaacaaattaacaaatatacaatataaaaatatgtcaaaaaattttattttctgtaaataaatcataaaaaatgtaaaaatatttaaaattccatacaactttatttttataatttttttattgttatttttgtgtatttgtaaaataatctcaatttttaatgatatataaatactttaaaaataaattgtcattgaagaataattttgtataataatcatcaaataaaaaataaaatatatatcgatgaaaaaaatggaacaatattagctggcataatatcttatagttaacataaaataaataactaatattttacaaggtgacaaaattttagcatttgaaatttttgtataaaatatttgatgggacatatttttcccatttggtcaaagtactctttgaagaattttgtagctttgtttttgtacaagtgaaagttatacgagatgagatgttaagtctttttataataatccaaaaaagacaataagaaaattttattgggtagtaacaattattcatacttaaaaaaaaaaagaatgataatgtataatagcttaaactatagtgtaattggtatttttagtacatgatgttgtgaatggtatattaagtcaactattttggttacgtaacctataatttaataaaataaaatgttaaatactttttcttgttgtcttttgcaaataataaaaaaataaaagaaataaataagaaaatgaccgagttttcttgtggaaagaaatcttaagaaaaaacaaaacgaaattaaaataaaattatgagtcacttcatttaatttttataataaccttaataaaattatcaggccgtctcaaactaattagcgactttggactaaaaaatataattgaattttttatatatatatttttttttgtatatataatgataaaaatttaaagtataatattttgaaaacatgaatcttttattttaataaaatataaaatgtagtatcttaacaaataaattaaaaatatttttttaataaataatattaaaatataaaatatgatattttataaaaataaatttaaaatatttttattaaaagattttttgaacttgggtaggagccttgggcgtgggccctcctacccgactattgaaccggtccggccctatttccactagagacttcaccttgaaaagttgaccatactatcatagatttataagtaaagaatttaattgattttacaattttcaacaattcatttatagttcctaatcctaagatcaagtcaaaactcccatcattggaaaaaaaatattcttcaaattaagttgaaaaccctaaaaatgagcacatattatttgaaggtcatgatcaaataggaatctccatgttattaatgtttatgccaaaatattttacatattatttatgtacttgtatactcgtgaatttattagtctatcatgctatattattatattaacatagtattattaaatgaaacatgacaattaataatcaaacaaagtctaacaaatgagttttgtcaagaattatgtaagatatattaaaaattacaaaatctagttactcatttgtaactccaaaatattgaacgtttgaacgttttttttttaattgaacgcttaattctgaactctaacaggtcatatatgcgcttaagacagtaagatccctaccctacttaataacacactcccaatttttaaaatgagtattattattgggcacacctagcatcttctatagtaggcacattggtcaatgatattttctaaaaattatt

SEQ ID NO: 187771 - DNA, 1951 bp, Cannabis indica
aacagaaggtccaaaatggtattatccaaaaaaagattaaaagaaaacttataatttatattgtaattaaatgagatattttttaacatgtaatattaattttggtataataataaaattaatttttgtattgaaacatttttttatttactttaaattatatttatataaaaaaaaaaaattgtattaatttctagtacatgttatatcatatagaatataaagtatgtaatcaacttaaattcgtatacttataaccagttagttataatagtgaaaattatcatgtagacccactttagtttgtttgtttttatttttactttcatttccgtattctttaaaatatacttacttttataaataatgtccctattatacctcttaaattaatataaatcatgtgctacacttaagtggaaggcaagaatatattaagcaactcactcataaaaatggataaattataataaaatataatatgaaaatattttttattaaaagagatattcctcaacttatccattataatagccatacaagtgactattgtaaaatctagtttccacataatagattattaataatttttcaaaatctactaaaaattttgctattataatctacatggtcatataaaaaaaatcaattataatttctctaagttttaataaaggcaaaaaatcaagaccccacacaataatggcaaaacaaatagtagtcacaacacaacctaagaaattgcctataaatacatacatataaaaaatttgaaaaaaataatataaaaataattctcactataggacaatggacacaattaatatccaccccataaagaaaaccctaatgaagccaaaacactatatattcaaaaataataattattactcactcatcatcatcgatcatatccaaacaataaaatcaaaaccacacaaaaataaaaaattaatattaataaaatttaatacaataaaaaaattaaagtgtaaccaagaaaaataataacatgagacgtagacaaatgattcaccatacgttagaatctccatgacgtgtattccaagtctcccaaccatgcattaatttatatatatatatatatatataaatatattaataattataataaataataattctctctttccatattactctctttctcactcttcatcataatattctctcatctctccatggaagaagaaatcatcactacaacctattattttcccaagaaaatgagattttctcaccaaaaaccctcacaaagttgccctaaccctaaccctaaccctagtaataatactacttctttattattattttcttgcaataaaccaaacagaagttgtgtgtcattaccagctgctttgatgatgatgatgatcagaagagttgtagtggaagagagaggttgaagagacaccgagatgaggtggcgggacgggttcgggtgcccgataaatggggaaaggaggagttaatgaaggattggattgattactcttcttttgataagcttttggctccaattggacttagatcagctcgtgaagctcttgttgttcatgctagacgacgtcgtaatggggcttctacttactaattaatactaaacaggttttattagttaattaattaacttaattaattacttttgttttataattattagataagatatatataattaatgtatatgtagcatagaggtttatggtcatcatatcatattattattattttttgttaaataaaaaaatcacgtggtgcagatccctttattcccactcattattatgaaatataatatatgtattttgtagtttgcggaaaataattaatacatataaattatgaataattttaaatgctacaaaaaaatatatatatatatgatgagagaataaattatagtgttttatgattttaattattttat

SEQ ID NO: 187772 - DNA, 1996 bp, Cannabis indica
aatattggttaggatgaaaacaaaatacaattataaatggtagtaagtaattcaacgtaatatatatcatgagatgagatgattggtgatgagttgaatatgttgcagatgaaaatagttctggatagtagtaaactgaagaggcttggtacccctgaagagattgctgctgctgctgtttttttggcttctgatgatgcttcctacattaccggagaaacccttgtggtggctggaggcatcccatccagactctaataataataataataatcccatataaaataataataataataatcccatataaaataataattataggctccacttaagatcaatactcgatccagttgagtgagaaaacaatgtttacttctttataaagcctactcagtttatacttctgttaaaattatagaatattaaatagactatatgtgttacttctacgcttgaattactttatttttcatttctaatttcataatttttagtgttttttttttttacttcaaatgatctcaatgcgccaataacactcggaaatatattgaatgacaaaaaagatgaataattttgtaatttgaataatatttaaaaatgtcgagaaatcgttagaagacgattcaacctctaactgtcagagccaaagttagttagaaagttagagtttctattaagagtttgttagaccgttagattccaatcatccatggcgaccaatgcttcctctttctctgcctctgctccagtctctgcttcgtcttcctcctctgccggaggttcacgcgtctccatgtctccgtttgcctctactctcaactcagtagtctctgtcaagctggatcgtgttaactacacatctcctggcgcgctcaactcgtttcagatatccgtggttatgatcttgaaggctatgtgtttggcacaactcctcaaccacctcgcagtgttgagaaaactgacgaaaatggagtcaaggttctcactcctcaacctcctccttctcagtccacaaatggtgatagcagcaccaaggctgctctttttgcttctccagaaactgtagctgaccctgcctggtatgctgatagcagagctacatatcatatcacagctgatttcaacaatctcactctgcagaatgactatcatggttcagagaagtttatggtagccaatggtgagcttattcctattactcatagtggttctacttctctatcttctcatcatcacctaaaaactgttaatcttcataatgttctttgtgttcctaatattaaaaagagtttaattagtatttctaagctcaccgtcgataatgatgtttttgttgaatttcatgtcaataattatcttattaaggatgagacaacaagttagctccttctggaaggacagcttaaggatgggctctattctctcttgtctagctcaaacagtactttcccagttactagtcacactgagtctagatggttcaattgtaattcagctagtgatcagttacaaactgttcaatgtcatattcgtactactttttgtaagtggcactaaagtttgggtcaccctagcaataagattgtctctcaattagcttctattttacctggttgtactaaaatttctaaatcaaataaagctgaatttttgctaacagaatgctggttttggggattttatcgccaaaatttgagttttgagggttaattgcaagtaaaataaaattattagaggttttgccacaattaacccatataaaaatgacaaaaaaaaatggacatttttataaaattccctaataattaatattaataataacaacaaagtaacttaagtaattaacatgaggagattatttgtcaattacattgagttcacaatactctttgagttgaataccgtagtagcactagtactctagtacctctaaaagtttggaaccaaaattttaccttctattttaaatgagaattgctaaaggacacca

SEQ ID NO: 187773 - DNA, 3337 bp, Cannabis indica
tttctctttttcaaaaaaaaatacattttaataagcatattatcatgtagttcagaaaatgtgtcatgttaaaagtgtttaccactaatgttgtaataatatatagatttaactaaataatacattttaataagcataaattttggattcattgttggttgcaaatgaaacagtagaagattacagaagtagaggcaaaagtggcttagttttcaaaatcgattttgagaaaacctacgaccggcttgagtggagctttttagataaaagtatgtcaaatttgctcgcagagaaaaaaatgaaggaaatgatatgagaagtttgtcctgaaattttagctataagaagcataagagaagatatttgagtctaaaacctctatctgactttctgtaagatttttttactttactatttcataattcatattttaccaagacatagaaaaagaaagtttgcttgtcctacaaacaattgcttttttagatgccccccatccccctatcattcctcctagtgaagatgactccaattggaagccctaggtgttgaagaaagaaaagctaggatatcgtgataggctacacatgttgtgatctacatcttattttattatagtatgaactataaatgagataacaaatgttttgaggaaaaaaaatctgtaatttgtacgtaccttccatacaagacattgatataaccaagctcattttcactcaaatgattattgggttgaactttctccggagtatccaactgaaccttatgcttatctacatttaagtgctttgatgaatagaaactcaaaacctgatcaacaaatacaacatgttcagtgtaactttaagacacaattatgtttgcaagcacaagtaacaaaatgaggtccaaccttctcatcttctacagtccactggtaattcctgcaaagctcataaaatgaaaacaaatcaccctgaaaacaccaacacaaattaatatattgataagcataggtaattggcatgagattccaatatttgtttgtatttattacctcagaaaacaatggatatattggcatctcacggccaacagcaagctgctcactttgtacattcaacagcactgaagaaggaaggccaactttgacgcttccatatgcttgacaaatgacaatgcctccatttccaaagactgaagcaagaatagtctgagcacataatataagacacatatatcagataaatgtaaatgtaataatccttcatctttggaagcaatgagaaattattaactcatgacaggtcacaggacagataaaccctttttttagacagctttttatgctcagggtaagattaaacatcattctagtgaagacaaattaaaataagcacgattgcaagaatgacattaaccgaaccacaatctcaccaatcatacatgtaaaataattccaacgacagaatacctaaaaaggacaattgtcaagcatcccatagttcataagttaaaatgttgtcaaatcagaaataataatcaaggacaactcaatgaagagtcatcacggtagtgttgaacacaaaattctaaagtttaaatataaacttatgttacggggaaacttcatacagaaattataaatgccaacaattaaaaatgcatctgcacaagtagctaaacatttgtgaaagctctgtgctacacaaagtgcataattttattttattatttatttaatgaaacaaacattgaacttgtattaatgatagaggataatacaacaaagagaacaaagtgattcaaatagtattcactgaaaatcacttacagtgttgccagaagaaattgcagaaaggcgcccagaggatttctgaattgttgcaatcccatcctcattactagtatactcaaccgatgatacaccaattgttggacctccttccacagtaagctaaacaaaccaaatttgattacaaaatctaagagacatgaaagagaacattttttcaagtgaccgggcccaaaaataaaataaaaaatggaaagttatgcatattaacgtttccatgactagagaacgtaaaagggcaggtaaaataaaattcatcgtttaatttcaaacaagcacattgagctccatagcatattagtagcaagtaaagctttgctaacctgatataataaagtaaaagaggtgagcatacataccacaaaatatgcacctggtgcaaggaagatatcttgagggtgaattctaggtggtgcatacacttcaatctttattggctggcttaaaatttcatgcccagagtgccgtacagctgtgacctgattcaagtagtaacagtaaatttgcatcactccagaaaacccaataaagaaattgaacaaatgtgaaaaagaacaacatattattacaaggtttatgaacttacataaagagttgtaatccccagatgttttgccattatttcaaactttggtgcatttaaatgtcccccatcaaagcttaagatatcatcattaccgacaaatccaactatgggatcctcaatatgaacttggatattcatgaaagcaaactgcatataattttcctgtgagttaagctgactaataaacacagtgcattacatagcatagaaatatgatgagctagcatgaacacaagaaaatattgggaaaaaaagggtccagaacatcaacaaagttatacatagtgaaagtaagtagcatataatacacaatattataagccagtccagacctgggaagagtcaaaagcacttccatcatttatgccagccattagatcaatagtccaggagcttccaacctgtaacaacgtacaaatttcagatcagcttcagaaaatactttagcaatgtttgtatttcctcattttgtcaaacccttgaatatggacgtcaaaagaagactacaaagtaaagagaaaggaagataaagaacaagaagcataccacaaggctaatttcctcatgagacataattttaatccagtctacgtctacaacttgtacctacaaaataaattatctccatgagaagtcagaagctaaagaatgaaagtcattacagagataaaatgatattaatcgcagaaaaaagaaagtctcatctcgtgtaatactttacagctgcaaatgattcatttagaatgaatatgactcatttgaaactgagagtatgatatgtagtctttattaaattggtttaggacaactttataaacttgcaagaaagggtcctctgcaaactcttgcacagcaactgatgcttggaagctataaaattatgatgtattattttatagcattagaattttttt

SEQ ID NO: 187774 - DNA, 3735 bp, Cannabis indica
gatcttttaatatctaacattgttaaagtctcttttaataatatactcattttcgataaattagtttagacggataatttctttttttaaaaaataaaattaacctaatatgagaaatctaccaaaaaaatcacaaaatcataattttttttaaagggccacaaatttataattagaaattgtaaaaataattaaacccaattaatgaatttttgtcataaaaattaataaataacctttaaaaaaatgtaaacttgaaaaacaaaagaaagggagaaaaacaaaagaaagggagaaacgttacatttgttctctctggtcacagattcatcataaacattatcaacctgaaaccaaaaactcataaaggtataagctttatctctctctttgccctttcgaaaccccaaattccaccattgaagactacagtgtatgtgtatgtagcttcttctttatgacgcgtttgtgaccaaaaaggtcgtccttttatacccttttctttgttgggttccttgcttctctctttcagatcgacgacgacgacaacaatggagattttctacttcttactctttggggttttggcactggtggtggtgaccttagagctcacaaaaacaagcaaagatcgactcagtacatcccctgctttcaatgccttcaagaataattacatcctcgtttactctattatgatgggtaagctttgatctaacattttgttgtcttagctcatctgggttttaattattttgttgtacttttactttgattttggttttttgatgcttttcttgatctgggttgttctgcatttcatgggttttgttattttcttgatccatttgtagctttgtatacatcgttgtattttgtttaaaccagctaaagtttgtgtttttatcccaatggggttgcttaagtttttagcttttgggttgatttgggtggttggaatgttttcattttcagatgttatgaagattcggttgttttaatcaaatgtaattttatttgttttggtaattaatgcattgaagaattgtaggtgtgtttcactgtactgtggtcttgattgatgtttttggttgaaatgtagtaaaatttagtgcattatttattatcaacaacagcttcattagtgtctaagatttgctaggtaacacaaacaagagttgacaatgtttttgattgaatgattgcggctatagccggggattggttgcagggtccatatgtttactatctttatagccaatatggatttggaaagggagagattggtcagctttttatagctggattcggatcgtctatgattttcgggacaattgttggatctcttgctgacaaacagtaagttcttttgcttggtttctgtagttttgtttacttttgatcaacttaccaattattgttaattcaggggccggaagagggcgtgtattacttactgcattagttatattttaagttgtgtcaccaaacattcttcggactacaaagttttaatgctgggacgggttttgggaggcatttcaacttctttactctgctcggcttttgaatcttggcttgttgctgaacacaacaaggtaggttccttactgatactaacaaactaatgtaaattgcaaatgttggagatcatgttcacttagtatcttgtacttttctaatctctttgagtcgatttgctttttcgctgtttgggctgtcttcttaacaaattgagtagttttttctttcgaagttcttttgagtgatgcatgatgtaaatctttagatgatgatatttactgcagaggggctttgatcagaaatggctttcaataacattttccaaagcaatatttgttggtaacggtctggttgccattgtatctgggctgttcgggaatcttctagtacatacacttgaatttggtcctgtagcaccatttgatgctgctggatgttttcttgcaattgggatgggcattataatgtattcatggactgaaaattatggagatccatcagaaaataagagcctttttgcccaatttaagggtgctgctgtggttatcgcttctggtagttccctagtgatttcattttttttttcttattgtggtgtttgctttctcatggttgaaatgtgtaactatcgtctttccatgtggtggcagatgagaaaattgcgttgctcggtgctattcagtccctatttgagggttctatgtatatagttgtgtttctttggacccctgctttgagtccaaacgatgaggaaattccgcatggattcatttttgcaacattcatgctggcctcaatgcttggtagctctattgcatctcgattgatggctcgttcatctttcaaagttgaaagctacatggagattgtgtttgtaatctctgcagcatccctcctacttccgatcgtaacaaatgtatgtcatgtgttatcattattcgaccttcatcattttacattaattttccttctgttagatttgattatcggggaacaatattattaagttttatgaatattgtctacaatttttttcagtatgtggttgtgccttccagtttcaaaggtggaagtctcccactttcgggttgtattcaactcatcggcttttgcacattcgaggcctgtgttggagtgttttggccttctgtcatgaaaatgaggtcccaatacattcccgaagaggctagaagcacgattatgaacttcttccgcattcctctcaacatctttgtgtgcattgttctgtacaatgtgagtgcttagttttttgcttgtgtgggcatatatcgattatagtttataccatttacgagtttatgggatcatttcgttcattctctgtctgtcttttccattcccttgtaaaggttgatgctgttcccatcactataatgctcggcatgtgctccattttccttgctatagcagctgtgctgcaaaggcggctcatgatgatcggagagagtcacagatcaagtaagtaatgaagtaattaataatcagatataataggattaaagacaagtcatttatggttgatgacatctttacaaagacaacaataatcaaattgatcctatgctatgcatattatgttgtctttgattatgcttacatatattgcatcacagaaaccgaagaatggacagcaatagacaagaacaaagaagaagagccattaaatgcctaaacactccccaagaaagaaagacctgtaattttttaagcctaaactcagccactcagcccaagtctcactatcaattgccctggctatctattcttttttcggctatttaaccattgtggattggtacaagcttcataggaatagagagaattttgtggggagtcgatcgttggccaataacattaacaaattatatcaatagttacaacatttagatagtatcagctggtgtcgggtaaaacttctcgcttatgttgttgagtcttgactgacattagcgtatttgtttaagcgaaagccgttatacaaatggtgttcttttggtctttgtgtcattgtttaattcttattcttttctttcccaacaatacagatattttgaccctttctatacacaaaatcttctttactctataagctgagccaaccccgtcaccctgtctcgaaatctttttatcatcgtcgtcatgagtttgaagaaactgagcaacaaaagttgcagcagctcagctcatgat

SEQ ID NO: 187775 - DNA, 1696 bp, Cannabis indica
atttgagaaagagtgacacgtagaagaagtggtacgaaatagaagtacacacgcatgaactatatagcattataataaagagagcatgtgaaaattttaacgtacactctctttatatggaatcatattaattggtcttcaaaattaatattacatattatacaaaaattctatcaattttgattggaagaatattttagtgtaatttttttttatttattatgatcatgtatatgttatataattattgattaagtatctcagtaaaattttaaaaaattcagaacaataaaaaataggattcaaataatttattttacatgcttaaattatgttttcagcgtgttaaattttttcgaatctctttttacaagatattttaaatgactacaacgtaaacgatcatatttaaattaaaatatttttttatataccgaaacaaataaaaaatatataagtagatccctcttgcattatatatatatgtatagaagtatatattccatattatttttatatataaatatataattggtggcatgggtggatattccacaaagccgcaaatgcatgtagggttaccaaataatattttaaaatatatgtatatagttttgttgttgtgataataattaagaaagaaacaaagaaacacatatatattggttggtgtgtgtagtaataatgtgtatatacctatcaaacttttttcttatatgggtgcttcgtaggattcccaatatccttcttgcctggattaattgcaagtaccacaattttcatcatcatccaatttaataaataattatactaattaaactactatcatcatcaattaaacccttttaattatctaattaattataaattattaccaatgataattaattaatacgttttttggaaattttggagcaagttttatttttgttttcggtatatacatatatttaaaatattataattttttttatatatatatatatatgacaatatattataactagttataatttttttcaagtaccaaaaacagaaatattcctattgttagggccaaaacccttattaaaattttctatatgtgcatataatatataatttgtttcttttaatagtataatttacattgtctttatatataattagtgagcattaattaattatatatatgaactctatactaattaaaaatcaatgaatgttcttccattaaaaaatatctttttattctttttaataaaatgagagataattaaaagccttatatatacaaactgaggtacaccaaactcttgcaatatcaagagtatgtaagaaccatcttagctatatatatttacaataataattaagttctctctatataaaatataattaatatatccatatgataataatatgtactctctaggtaatataagatcataataataagaaaaattatgctaaaagatacaattagtgcttaacactttttttcagtgtcatactgttattggtgtataaaattatgtcccacataacttaaaaaatagcttttagaaaatatcgaaccaatcatatatagggcacgcgctatctataaaaggtgtttaacatcattaatgtctaataataatattgtaataataatgttatgtagttattatagttagataattttcttcattttttggtccaaaatatatatata

SEQ ID NO: 187776 - DNA, 1865 bp, Cannabis indica
aataattgttagcagatccattttcattatattattgatcttcttctttctctttgtcttaatcttaattctcacacgtaacttactcgtttgtattcctcatcaaacgcggttcaaacacccacatatatatatccttcttcttcctctgtcggctaaccatactcagctcaaaaacaaaaaacaaaaacacattgattcaaaaacgatggattctcatcacagaatctcacccgaagtgacgtcgtttagaaagttccattcctcagcctctgccccccctcgtttgattccaaaacgtggtctcgtttttaaacgagctctcaaagctctttccacttgtctctgtttttaaaaacaccaattccaaaacgccactttttccaatgtctttccttcttaaaaatttgatttaattatattaattaattattgtttaattcagttagcttctttttttttttttaagaaaaaaaaatccagaaacgaataaaattagtaacgtttttaaatacggtgttccaagtatatctcggcgggtgtctcaggatgggattttaacggcggctattcggaacggtcttattttatttttgtgtattatttcttttaatagaaatagattggttattttaatgtttattttcttctaattttgattttctgtatttgattatttatggggttttccaggattcatcaccaaaattttagtaataagaaaataaaaattcattataatgacttttatttcaagttcatgttcaaggttacaaataattcattagcattcttccaataatgataataataaaaaaagcttaaagtcaaaagagttaaaaggactgaagtgcctatttattaatgtaatttattgccatatatgattggatctggttgactaattgactccatagtccgtaccctgaaacctttccaaagtttactttttttaaaataaggataattttatttaagttatagttaatttgaataaaaaaacaattaaaaataataatttaacaaagcttccgacgtggcagttctttattgcatctcttccatgcttgcatcactggacaagtccaattagttgtcgccacgtggaaataattttgttgaaattttcttcatttgattgtaactttgtaagtagaatagtggtgagggtgtaggataactaaaaagggaaaggaatatagaatcattgatgtctggctttaaggaaggaggaggtgtgtgtatgtgtagtcttagaaaagtcaagactacgactttgactaatcaaagtcaaagttttggctgccatttcattcaagatgttgcacaacctttcttgtaaaatatttatcaaggcaacttcatcaaaagaatatttatcaaggcaatgtttgtaggatggaaagaaattagggagaatgataatggagaatataagggaaagaaagcaaagtgataatctttttaatttgtttggtaaaatgaatagagtagtctaatgatagataattatttatttaatgaaataactagattatctttatttaagaatatttgttgttgtaatttataattattgaattggggtagtttcaattttctcactctttttttctctcattcaattcctctctcaaacaaaagaatttgttatctctatttttctcccatctctctatccacctaattctccctggatcaaaactacaaaaatcactactagttttgcctgcgacatttaaacaatgtgttggcaaaaatccaaggaggattatatgttttgttatggaaagtgtcgatgctgaaaagtgaccaacattaacttgctagattggcaagataaataataaatgtaagtatataat

SEQ ID NO: 187777 - DNA, 989 bp, Cannabis indica
aaccactatataccactctgtgtcattttttttttgagtataacgtaatggtattttacaatcatatattagttttaacttaatagcttgaaggtcttaagttcgaaccatgacctctccctttttcccatctcatccctcccactctctgtcattattagttataaataaaagcaattgaaattcctagaaagttatatagttgtgtatcgataagaccattcactgtttcttaaagctcgatctctctctctccaatgactcgtaacagggatgacaatagtgagaactatagtatagagacaatgacaaaggttatgagtgggctcttaagaaggtgtacattgcagttaaaatataagtacgaaacttacaaacagacacagtgacataacaattcttttaactaaacacatttaattaaattagaatgtcccctacttggtatctaatgtttttagtacatgtattattactgttagttgaacatagtatgagtgagtgagatagtggatagaaacgtccaattgaagagctgacaatgataaaagaggacggttactttatgttacattgataaaatggagtgtgggctagcatcagcatggaccctagtctagtctagtctttttagtagagtaaaaatcagtgtttgaaatatgaatattctgataagaaaacatcgaccattgtcttgcactcacaatagttttagtagtgactagtgagtgagtgagtgctttttctagcttattataaatctattaactaaactggtcctcctcactcctcacctcatagaatgattgaggtcacaccccaaatcccaactatccaattgaaactcatcacaatactctctacttgcttgaactttaattaatgataataaaccattcagaatattcaaccattcaaatgatggattagtgctaccatgacctgaagaggactagcaatgagtaatatgactaatgagtgagtgtgag

SEQ ID NO: 187778 - DNA, 2045 bp, Cannabis indica
taagctagctagaactaagtatatggccttaaatatttaagcataactctaaaattacggatatacaatcctaaattttatcgttaaagtactatctatgcataaactctcaaattacaatagattagtcctgaatcactcttacatcgaaaacttgttcgcaaaaatgaaaaaaaagcaactaaaaaacatatttacaatcattccatagttcaaggtaatttttttacaaaaagaaaaataaataatgataattcaagagcaaaatcctttaagtgtcattgggaaagatgctatatattcaataataaaactagaataataatcaaaagagttataattaaatgattattgatctcaccaaattgagatgagcttcatatgatgcatcaaccaatattccaaattccctaactattctgtcatcctggttttctgcaaatctaaatccaagtaaaaatcccagaaagtataaacaatatcagcaaaaacaaacacataccaatttgcactaacttcactatttcttcattcaaaggataaaaatcaaaactttcatacttaatttatgagccctaattaaatagacccatttgtcataaaactcaaaaaagggtattattaatgaaagttgataactttagccatggaagaagtatataaacatatatatgggtatatacaaatattgattgtgaatatcttaagaattgagaaattagaaagagagataagaacctgaagaaggagcattagggaggcttaagaagccacatgaagctatggaggcaagagaatggagatgggtatgtgatgagtggatgagaggagcgaagccatctccgtagagtacaagagctcggcttggtttgtccgccattgttgttctgtttcttctttcgttttttttctctgtttacacaaatcaaaactgtgggtagtgagtgagattgagagtgacaataaaatattggtttgtaaaaagtatttaatttctttatttttttaatgatattttttttaagacattgtttctttatttttagaggaatctaatttggtgagaaaaaaatgtttttgtttaaatataattataatggatttattttttatacatataaaaaacaaaaatattcattaacaaatagaataaaatttattacataaatatatagctcaatggtaaaattatctaaaataagcttttcaagttgtttataataaaatgaaagaaaatcctaacatggagttcactctggctgcttttcagcttggtcaaggctctaatactattttgttacgtctctgcttaaacttttattgggtcttcgctcacaaatttatggcttttatatacaagtatgttattctgactgccctataaatcaacaacatgagtatttacatagtgctttgtaattatgaaatgaaaaactattacatcatatttttaataattttttttgtttctttgtaaggtcacaattttatggcacactagcttttgagagctcgcaataattgtttcataagttaataagattaaaaatatttcatgagtttctatgccttatttctccaaaattccattttttggtataaaaacttatcttctctttatgtggtactttcaaaattaaaatggaattaattatttaacaaaaatgaaatagaagtatttttgtttatttttaatgagaatcaaatgtgaaaatgacatcttctttaaacaattgcctacatttgtcactatggtcaaagccttccctaaataatgccaattaattattactcaaaacatatatttaaattcaataattgtgtttaaggataattattatataaactaatcaaccatattattaaattcaaaaaagcaatgacaagacaaaaccaaaaccttaagcaaaagactgaaataactaatcataggattataagataatgacacttacattaaaaaaaatgactaatcttttcttaaatttactaaagattgtctttagaatcataatagaacaatcaccatacctaatagtaaaaaa

SEQ ID NO: 187779 - DNA, 10357 bp, Cannabis indica
ctctctctctctctctctctctctctctctctctctctctctctctctctctctctctctctctctctcaaaattcagaaagtggttcattttcttgcattttaatcaccgtagcagaaagcaaaactctctttattggaactcatcaaatatccttgttgatcaaccccatactcttggttaatgataatgagctagacaaatgaaaaatcacaagttcatgttggtagaaaatattctccatttgtgtgtggttttttctttttcttttttattttaataactaaattgatcattcactcgactgcatctgtgaaacttaattaccaagtaaaccacagtcatacatggggtagtgaaagtagtagggcccacgtgagattttctccagctgtgtagaggatattcctacttttgagtccccaccatataaaattcatctcaacttaatgatcatgttttacctctaattattgctatcagttgctcataatttaggctaactactaaagatggctgtaaaatgtaaatgtgatgttcttgctttaagtggtgtgatgagatgagaggcgttgacctcttaactaattgcccacaaggacgataactcatgacactaaacctttttattcctatactctccttagtttgagatctaaatctaatcatttacccctcgaaaactagagaaatctactattctgatatacatttatgggaattctacaaacatgcttaaattatgaatgaatatttcacactaaaaaagataatatgtttgctgtctaaactccaaggagaaaaagttagatttaagatctggagcaaaagagataataaagataagaataacaaacaaaaactaataattacattagtactaacacttcaccacctaataacatagaaacagttttttttttttttggtgggggactggaaattacctaacgcactcgattagcaagagagtaagtaaggtgaacatgccttgcaaggacttgtaatgatccagtccatgttttgtcgaacattttgtccccttgaatttctgaggcatattactagtgctaagtcaaggtaatgactccgtaatactccatcattcatatatggtttgacaacagcaagtttctctgaattcttccagactatatttttgactagaaaggagctactacctaaactagacagaattcctagctgccattggccctttactaacttaaattacctcggtctcaaccacttgcatattttatcaaactataattgaaaattaagctgaagtattggtcagttcagcgagtagttgttaccagtgatacagagatacatcacttatcattatgctttgttaagagagacaagatagaaagaacagctgcacaattcaaggaaagaaaaaggagacaaagggaatgtttctttactttcagtattaggagaagggagagagtccattaaaacttaactcgaactaaacaccttacataaaatcctttccagtcaaaacaaacttcttcctaaaatccatccaccatttccctcaccttttctttgcttaccaaagacgctctaagaaattaaagtccatgatgcgaggactttaaatagtgcaattaaaccttggctaagaaaaatcaaaagatgatcaaagacgttattaggcaacatattcctcatccattgaacacggtagtcatggtatgttaagtgtctcacgcgagttacaattaagttgtaacctttcttccaaaacaagccacaagataacattgcctacaaagagaattgattaccatagcacacgcatttggatctccaaggacgagatacgacatcattgatcatcgtggccttgtatcataatcagataatgagttttgatgtccttggatttacatttgtgaaaactacgcaaacataccaacttccagctatgtactcgtcttatttctttgatcaaagtacgaatggggcaaggaagacccagcctatagaacaaacaaatattggagagattcattatgtgggcaaagcaaattggcagttaagttgtcaacaggtactacaactatctcataagtaggtccaatggattgagcaaaactaatcatttttattttattctctttttgtttctttttaaaagaagagagagagagagagacgtaggtccagaaagagttgcggagaaagcaaagaacaacttaataataaacaaataaaagcacaaaagatcgatgaagtcaacaaagtgaaatccaattaaataatttctgtctacatttttaacgaaaactgtttagtttcactaggattatctgctgcattgacaattgagtgagctaaatatatgtaggtgacgaaaccaatatacaatttcctcatttgaaggcgaaaaaagtcacaacttaccactatttattataaaccactaccgcgtttgaaatgttctcttatgaatctttctgcatgagatgggtacttctctctaacatattgtcgaagacacttctgatatgagaagtcgatccatgctccatcagttctaatgataaacaggcaccgtgaatgactgaattgggggtgtcgatcaaccttcagcaacgacaaataaacaacatttgacttcttgttaaaaaagaacaaagaacacatacagtgtgctagggctgatattgcaatgcgaagaaacaaaaatgcaagcttaacctaatgcacaccagcaaatacacatgatattattctgcacagtgctcagtacaggattattaataccttccaaggaaaacatgagttaaaaaccaattaaaaactgataatgctacacatactaaacacaacatggtgtgtggatttacaccctaagtgaggatctgccaccctgatgttcaatccagagaaaacaaaagcataaaacttgtgtacgaacaatttaatgtgtttacatcagctgcaaactacatagaatgtgcacttctaaatatgatatggtaaatcaccaataagctttgtgtttgtagcatcaattttatctcaatgttggcttgattgattcttcaaacataaaaattagaataaacagcatttttggccccaactatgacactcatagggttttgccaactcaattattattaatattaatttttgtaaaatattcatctcaaactttgaaaataattgcaaatttgttccttcgattgcatagcatttcattcatttttgaaaacgcagtatcctagctcaagagaaccaataacacagtagccaaacagtagcaaaacaaacccagcaacaagaataccagtagaacagtagcaaattagtatccaaacagtaggaaaactatattgaataataagagagaactaattataaatatgagagccattagacccctttgatgcaaaagttttactcaattcatttgcctgacccagttctttccttacttacctatatatattaatttctcactcaatattaacttcccaaacaaagactcatatacccttatgatttattatagggttttttacaccacatactgaaattttccacttttttctttttaatgtagggcagaagtttttaaaaaatgttgtatatgttttatattgtatactgtgttaagtttcctctgttgttccactgtagttttttagttgttcaactgttgttttagttgttttgtattgtgttccactattgttttataacagtatatttgaaaatatttcaaatttcagtatttttgtaagttcccctttattatatgctagcacactctactaatcctagtgcccaatattaccggccgctagggtttcaccttgtcctcaaggtgattgatggcaccaagcgctaaattcgaataagctcgtcctctgtcaaacatccattgaagtggaacagtcttaatttaagggtaccaatgcaaggaacaaggccagtgagtgaatgttttggctagttgcgcaagctacaaaagaacaaccaccactcaacgagtcgacctcaatcgaaaaaccattccagcaatgtcattcgcatagccacctcctcagaaactaaggttctgatccacaaaagaaccaataaatttcagctttctacctcgatcaaagacctaacactgcagcagcactagaacaatcgtgttcgtgatcgaggagaagaaaattaagacaacttgcccagatcccaagatgttgacaaagccaccaccaccaccggcatgttcgaaggttcgaccaccacacgatctaccttgggtcgttttttggtacaagggaaaagacatctcaaggtcattcgttgacgcttcaagttgggaccaaaacacatgtttcgaagatgtagccctttttcttggttacagatagtgaaatgagcctgaacaagaacccataagaccaaccagttacccatcatagtgacccaatggatttatttctagttgtgggcctggatcccaagtggcaaactcatgggctgaaataaacattgggctcacgtgttttattatttcagtgacactcgaagtagaaagcaagtagaccaaattagttttagtaattaatgatgtgtgtcttgtaaatttgatgaggtgggccaaattaatttggattgtttcttaataaagaaaccagttacgaataccaaaactcatataagatttgtttatgttgaaactggtttttcaatttaagaaactagtatctagacctccaactacgacatgacttgtttgatcttgtggggttttggtggtggagatcttatatccaatgtctgtttgagttgtcggttgctagatgtgttgctggtgaatggaggtaggtagatggacgattgaggggtgaggcaggtagggtacttgaatggaggagaagaaataactttgagatttttaaattttttttgaaataatttatctaaacatcaaatatggaatttaaaaattaaatttacacatatatggcataaaagataccaaaaaataatttaaaaactaaaatatgccataaaaagtggcaaaacctaaaagtgtcatatttttgtaacaaagttttaaaaaatcataatgagtgtaatttcctctagggtttaagtgtgacatttttttcaccttaagttgtatcccacaacatgatcaacgttgacacagttgacagcgacttcttcatcattgtctccagcaataaaaccatctcccgatctccgacatcgtagtctgcgaacacgtcttctccagcaccatgtctagtggctggttctttttcgacgtcactaccaacggttccttatcattcttctcaggcgactctatgagtgacaacgtctccatcacgtctctttgcctaggcgaccccaccaacagccacgtctcctctttcttcttctcaggcgacgactcccactacaggttcatctctggcaacatcactatcaagataatacttcctggaagagtcgtatccagcaaaaccttcttctctagcatcggtttctgtcgctcttctttcttcgaaaccatcaacagccgctgaatcttcttctccaccgcctccggtgagtcaaccaacagctgaaactagtcaatcccctttgttggttctccgtatagccttcgaacctcaagcacggatgaacaagaagaagagcgatccgacaatacagtgtgtgtctcactaacaccttctctaaagctggcaagtctagcaaacgtgcaattgtgttctcttattgccatttccatctcttcggaatggtctgccaatgtttgagatagattttcaaaaatcattaatggtgtttttgtccgatatgatactactcaagtctacttttatgttgttcatatcagcttccattcttttctccattgctacaactttctcctccattctcgttgacagcattcaccgagaattggtgctctgataccaattgatgtgaccctatttcgatcaaccaaaccagtagcaaatagcaccaacaatagcaatagtagcacaatagtatccaaacagtgggaaaattatatggagtataagagataaataattatgaattatgggagcccttaggcccctttgatgcaaagagttttactcaactcattgcctgacccaattcttcccttacttacctatatatagtaatttctcactcaatagtcaatactaccttcccaaacaaaaactcatatactcttattatttactatatgctagcacaccctactaatcctagtgcctaacaagtttcctggtttcagactgacctactgtacttcgggagttcaggcaaaaaataattgcataaatagtactctaacaataaaatttgagaacgtgtattcgtaaatttagagttaatgtttgcatgtttaattgttatacttggttccaactagcttaaattagttaaaaagccctcatactgtaattatacacacagtttgtggccacatcaataaattatctcaaaaaatgaccgaaatgcaacgaaaggggaaaatttgcatttatttccatagttactagagaattttttacaaaaaaaaaaagtaatttatgaggaaagaaccctatatgcttcatagttcaggggtaaaaatcttatttattctaaaaattaatatcaaatcttcattaaccaaaaacacacatcccaatgatatatcatacacacactcaaagacctttaagacagagccgcaaaaacaaagaaagaccaaaaaccagaaaaccaaaacaatcaaaagaagaagaagataatcacattcctctctactcctcttcaataacactttaatattcaagtgcttatcttctcttcttacaatataacaaacataccattgaataaatgttcaaaatcacattataatttagcattttctttcccagtttacaatagcattatctctaaaatcagggtgattggtgtgatcttatatccaattaaagatattaattgttatattaaaaaatataaaatcatttcaaaaaaagaaatataaaaggtatcacaaacatcatttaattgcattaggaaattttactgaattatgataaataaaatcaattaaacatacagtgtaaataattgttcctttataagtacatttgttccttaacagcgtgtggaatcaaattgtattagtctcactgaactagcattataaaattcaacagaaaagtgctgtgtttcatggcatcaaaccattaaaaggaaagagcacacacacaaacttgcacaggttctcaaagtggcaaaaaaactaaagaagcatttcaaatgaacttcacatacattgtgtgcgtgtgtgatgtgatggggtgggggtggggatggggatgggggttggagagaagaatggactaagtagttagaagcaagcaatatgtgcatataatgacaacaaaatagcataagatctatcgctctactctgtataacttagtcagcaagaagattgggatgactttataaagtaatgcaactcagtgaatcgaagcaatagaacacaatgatagagtaaattgcatttttaccataatagaatcaagtccgcatccgattttatcttcagcatgtggatgataggcaagaagcctttccaccacagctttctcatcctcaggtgttaatcgttctccatccatatacctggaaagagaaatcagttagagttatgtatcatgtaacacactccaataacaagcacatgaacaacagtctgactttaaatactaaaagttgaagataaaggacaatcatagcacgcatgggatgcagaatgactccacactgaccagcacaaataagatttcagaaataaaccgccatctgatcaagcaaaaaaaaaaatgcaaacaacaggtacttcacttagttaccccctttctccttctccaattaactttttatcgatttcaaacgtaaccccctcaacaggaatttcctggacgccatagattagaatgccctttcagttctaaacttctagtactttaagaatatcccatctagtataggtgacatttaagatcgtaggcagcaagacttgagcataacagcttcaaaaccctcattaataaacgaataagcaaccacagcccacaaccataagtgaccatttcggaccataaacagcacaaaacttgagcttcgcagtttaaataatccttcataaaacgaatatgcagccactgccaacaacgataagttctctttgctcttagttagttcgatagcacaaaccatagttccaaaaagccagtcccttatcttcaaaatactacttaattccctaaacttcctcaatttataccaaatttaaaattgaatatatacatatagataatgaaaatttgggcacatccaggagaagaaacactcacattcccgaatgaaggatgtccttggtgagcaaaataataggcgagatgtccttgagaatctcgtcctctttatttttccactggcggtaatcagcatcgttccacctctggtacttgggggagtccttaacgctgtgtaatgaaccggagttagcagtagatgaggacgctttctcctccgggcgagtggagtcaatggcggcagtggataacaaatgccaacgagggggcgatatgaaggagggagagagtctgtagtggtaaagttgaagtcggaggcggaggagcggagagcctctgagaagtataggattcgccattggaagagtcgcaagtatgggcgatgatgacatcttggaccattgtctttgatttgagaattggaaccccccaccccaccaccccaaacgatttcttggtccagcaatcttcacaaattggcccacttatctctaatgggctcattggaaattttttcaaaaactgaaaattatgacatacactctaacactgctctgttaagaaatttctacaaataattaaggaaatttctctttcttttttttttgttaaaataattaagaaaattttattatggaaaattatagatattaatatttttgtgaacaatgagtttttgtcactagtattagtatggaaatttgatatattatgctaaaaaattacacatggtgtttaattaaatcaaaaatgtacacatagtaaatatatgccaatttttcaatttccttccaaaattacccctattctttcaccttccccccattctctctaacggccctctctctctcctccttcaccctccattcgaacccccatccgagaaaccctccccctccgtttgatccagcaccgtcaaacccaacccctccattcgaaccagacgaccaatcaaccccatcgacccacaaagacgaccccgacgacccatcaacacgaagactaacccaatcgaccccgacaacccatcgacccactcgagaccccagcaaccaccaaaacccactcgcaccagtctcggagcaccatccctaccaccgccaccgtcccacattccaccgttaagctaaaagaggtatttttttgaaatttttgttttaatttatccttaaaatatgtcttaatttgtggatgaatttgtgcttaaactgaaattgtgatttagtatgtgtttttgtgatagtgcaagaaaaatatgggaaaattatgggtttcgtgctaaatttttttacctggttttgtatttttttacgacattgtgcgatttgtgtgcaatattgtgcgagtttacataggtatatgtgttttgggtatgttcagcgatttttgtgcgatattgtgcgattttgagcgatgtggaataggttgttgtgttgtaaattttcaagcgatattatgcaattactatgtgatttttgctcgatttacttgacaataccttataaattttcaactgttgagttgtatatttttttagcgatattatgtgatttttgtgttgttttgttatagattttttggcgatattatgcgattactattcgatatttgtgcgattctaattgacagtagcctataaattttttgctgtgattatgcgattttttgtgatgtttgtgcgacttaaatgcgatttgtgcgatatcttcatgtctttatgcgacttctgtgcgattattatgcgatataatctaattaatctttgtaaatgcaaatgactcaagaacttattctcccattgtcagagcactttccatggcgtataacttacaaagggaacaggtactttgcttcaataaatgctaaatttgaagcttttgacttgactcagaaggtgaaggagacgccctttggagttttttggaatgtcagtgaattgaaattctctgaggttattgtgcatcaactgttac

SEQ ID NO: 187780 - DNA, 1240 bp, Cannabis indica
aaaaatattaaaaaaaaatctctaggacattttattaacttgactggaagaatttttaggagggagtacgtcaaaacatcctcttgggacatggaatataccgaaactaatagtagacgaagaattgtaccgatcaaacgtgctagatattgagagggaaatgtaaacgtttaactttgctttcaatgcttttgaaatcaattgtctggtttgattccctttttatcaaaaatttgaatatggttactcgtgtatctatagtagtaaattacatgtatactcagagctgaggaacaagattgttattgttatgtttattcagagaaactcgtatacatcgtacatacatgagtctatagagcatctttaatagaatgttaaataagtggtgtattgttattttagcatactttaaaaaaaatactataattgaatatcgagttctacttattttattattatgcaatgcacttattttattatttatgcaatacacttatcttaaggagttatctaattgaatatcgggtcttacacaatcaaatctagatttatgcttgttaagttagttatgacaattggtgtgctgttagagttagttggttgagttgttttagaggttgttacaaattggttgttatttttctgtatttacttcagcttatatataagttaccggttggtgtattgatgcaatgagagattcctttatgatttcatcatctttctctttatctttcctcaatcttcaatatcaaaatgtcaaagaaatctaatatggtattagagtaccacttactttgttgacggcggacgtagtgacaaactcaggggatacttcaaacttggataacaatggcagatcgactcagccatggatacaagcactaagaaggagagatgtggatgactattctttgatttatgttaatcacagtctttcactcaaactcaacgattacaactttcttttttggaaaacaagttcttgctgtaatatgtgggaattgtttataaagtttcatccaaggtaacaattctccaccaaagtatcttaatgatgaagattgagtttataatatattcaatcttgtgtatcttgattgggaagctcaagatcaacggctgatttcttggtttacatcatccatgtctccaagtttcttaactcatatggtagaatgtgagtcaactagccagatctagacgacattagaaaattatttcactctgcaaattc

SEQ ID NO: 187781 - DNA, 1824 bp, Cannabis indica
taaagaaacaaaattatttcattgtatttacataactaacaaacttaattgcaatgctttaagttgactaattgccttaagtcaactatgtatggttattttcctctaataaaaaatacttcttatttttctttttttgacatatcagtacatttgctcctctatgaatggctattctgttctgtaatacaaatgactcattactttccttattttttttgtacttattcatatagattctcatggtcaagtttggtaaaatgaaagatgctcctgtgtccaagttttggaatccaactgtgtcacatgtgattgctgccacagatgagaagggtgcttgcactcggacgcttaaagttcttatggcaattttgaatggaagttggattgttaatgttgattgtaagttgctaccttcacttgtattttgttagctattaactaagtttcttatattgatgaatcttagtttctctaaatttcttttactttctgaataacttactggttttattgtagaactgtagagttctttattgaacttgtttaatgttaaatgatcataacacaaccataaaatcatctttctttttgtaggggttaaagcttccatggaatcaaattgccatgtagatgaagaaccttatgaagttaatctcgacaactatgggtgttgtgacggtccgaagaatggcaggcttagggcattgagtaatgtaagtcccttattccgaaccctaattaccatatttgattctcactcattgagctttgattgtgattttatgccttggtttatcatttcctttgcaggcacggaatctctttaccggcttgcatttctatttcgtgggtgattttctaccttcttacaaggaagatctacaagatttagtcatagcaggtggtggtgctgtgttggaaagccgagaagaactggtagcacaaaattatgatcgacaggaagctcaatctcccaaggcattgatcgcttacaatgttgatcctccagaaggatgcaaacttggggacgaagtttcgatcctatggcaaaggttaactgaggccgaagatgtagcttctcaaactggagctcaagttattgctcacacatggctgttggagtccattgcgggatataagttgcagccccttgtcagctaacttcccaagttgccatttttttgttcattgagttaagttaggaaccgactacactaacaccaagttagatctaatatcccaataaattccattagatctgtaacttttaatttcttttgaacaaataatcctttgtaagaaaagttgttgagcttagtttgtaatatagtggctttcaatttcatgttcaaagttggctctaagtctaattatttactttctgcaaatatcttttgctgataattcaataatatattcaattataataatcaagaacataacattattacgacataattcaataatatattcaatatactaacctgaacatgacaacatagacaagtaatctttatgttgagttgtaagctaaattgttattttttgtagtgttattgtgttcgtgtagtatgcagtttttaaatttattgtaacacgactcgtgatacaataaaaaacatacttaactcataattttcatgtcgtgttgaatttgtaaaattttgagtcatttttgtgtgaaacttttcactcttaaaagaaaagaaagaaaagaaatgggtaatgttgagataaaatttgaagtaatctacaaaattaaatgacccttcaaaatattgagatctttaataatatttatgattacaataattaagaaga

SEQ ID NO: 187782 - DNA, 526 bp, Cannabis indica
ttattgaaaaaccaaaaaggcctaaaagccaaagtttatagtggtaacaaagggtgccacttcctttgaggaaaactgcctaaaacaacaagcagaagcaacccaagctgctaagttgtgctcaccagagttccacatagtccaaaaaaatactcacactcactaagtattttttttctatcaaaagtttggctaaacaaatactctctctcatatttccttgaattgatacatatgctcttgagagagctctatatttacataaggaaaattcattttctaatcatatgtaattaagaggtaacttatctcccaatcacaataactattaataggtagctcatctctgagctacatataattaattagaggagcatacgtaaatagttattatatatatagcttcattgactaatgtgatcaataataaattccaaatctcttaattattgaaccataaattcaaaccaatttgacttttaagccagattcaacgctatcttctttctctatgagcatataaact

SEQ ID NO: 187783 - DNA, 3442 bp, Cannabis indica
atagtgttggtctgatgaattttcttgataagcaaaattcttgtattcataacttaaaggtttggagtaggaataagaataatttcaaaagtaatattaagaatctgtagtttgctatagataacatttatatgtcccatgttattactaataataatattgctaaggtcaatatccttcaatcctctttagactctttattatataaagaagagttgtttttgaagaaaagatctagggttaattggtgtaaggctggggacaagaacactaaatatttttataataaagcttttactaagaagagaaataatttaattaggtccatcaccctggataatggttctactgttcataatttgtaggatatttgtgataattttgtaggtttttactcaaatcttttctcttcccagaatgttgatgttgattgtgtcaatgttattctctcgagtatctttagaagtattagtggtcagcaattccattttttatgctaaaccttttgatcaaagtgaagtcacgcgagctttgtttcagctttctggagacaaagctcctggccttgacagtttaaactcttatttctaccaaaaaaactaggttgttattgaattcgacttttgcaaggctactctagatgttttaaacaatggtgttgacctgtcgtccattaatgagacgtttcttgtgttattcctaagaagaacaataattagagactatagggctataagtttatgctttactatttataaggttatagctaaggctattgcaaataggctcaaacctatccttaacaaccttatctcttataatcatggtacttttttgtatgatagaatcatctttgataatatccttctagctaatgaggtcattaatgccattaataataggagaagtagtaaaattggttgggttgcccttacgttagatatgagaaggtttttgataaggttgagtgtacctttattaggcatattcttaataagtttggctttcctggccatcttatttcccttattctacgatgtatttctactattctttttaagctttgtattaataaccatttgtcttctgtggtttcccctactagaggaattaggcaaggggatcccttgtcaacttcatactaaagtacgtactaataatttttagggtattttatttgtcgttctgctccttctatttctcaccagttatttactgatgatagccttctgttcactattgttacctctcataattgtaatgccattaaagatgttcttcgcatttataataaggctactggccagtttgtcaatttctctaagttctctatgcttttctcgccaaacattagcattcaggacaaaacttttttccttgacttctttggtcttgatgataaaccttttattaataaatacctaggtgtgccccaatattttactcacttgaaaaaaatcctccttccactatcttctccaaaaagccagtagtaaactttctatttggaacaataaactcttctctagagctggcaaggaaatccttcttaaagcagttatccaggctatcccttcttatgtcatgtcatgttttagatttcctttatctacctgtaagcaatttgagaagctaatggctaacttttggtggggctctttggggaataatcataggaaaactcattggaaaaaaatggtcccttctttgtaagttcaatttttttaagggtcttggcttttgtgctattgttcatcattatcaagccatgctaagcatgcatggaggattttcattaacaccgattcccttctggccaccctccttaaagataaatatttcaaaaataataattttttctatgcttcccttggtcactacccttcttttacttggagaagtctgctttggggaagggatctactttgcaagggcttagtttggaagatgggaaatgacaaatctattcaaaccactagtgctaattggatcctggacttgagagttgtctcttataaaaatgatctttgtcctcctaaggatacattttttttcattaaagaggagagattctcggatgttggcaaacttaatttttttctcagagaatgtggttaattccattcttagaatccctattgatcctgctagaaatgactgccttatttggggacatcatccttttggaaatctcactataattcggctatcatcttgctaactctgctctctcttctccttcttcctctaatcctggttttcttaaatgcttgtggaaaaatgtttggtcttccaagatgcctcccaaagttaagcattttgtgtgaaaaacttttaatcatttgcttccatctggctttaatctctttttgagaaaaatgtttgataacctttattgctccattttctatcttcatgtcgaccttaattctcactctctcctagggtgttccagagcttctaaaggttggttaactacaagatttgctcatttctttaatactaacaaagattgtgatataaaggaattccttttgagagggtttgaggttcttaataaagatgacttgttttggtatcttgtggacagtttggaataatcataacaaatctattttctttgctcacaagcgttcttttgcagatctagagttctgggttatctctttgcaagaattttatgcaacccaagacaagcttattatctcattagctggtagtaatgaagtagattccaacattttattaaatcgtctcgatgatggttgtgctcaagacaatgttcttccttcattaggaacttataaactaagtgtgggggcctaaattagagataaagactgtaaaattggctttggtgctgttgttcaggattgtaggggggaagttgttgcaggttgtttctccttagtatcgagggactttcccctctttttgcagaagctgaagctctctccaaggctctcagctagtgtttagcagttcgtttccctatcagcgttatttcttcagattgccaagttttagttaagaaaattaagcacaaatggagagatagattcactttcatatttaattcaaaagattgattcctctttatcttattttcccaatgtttcttttagctttgttccaagaagtttaaatattcttgctcaaagggcgttaggaactaatttagaggttgttatttgaaacagttgtatttcaaactttaatcctcgaaccttgtaacatgctctaaattgctatattttaatgttacagatcttgtttttaagtttttttttttttctagtacccatcaacgggtattacttatcactttcacatattcaaagacttaattgccaaaaattaaatctcaagaaccaaagtgagaaaccacaactaacttaagggttaatagtgctaaaatctcttaaatttggatgtgtagtac

SEQ ID NO: 187784 - DNA, 2813 bp, Cannabis indica
gtataccctatagttagggtacactcttgctcatcgggaattgtatagtaccctacgtgatcggaaagatatttcaagatcgataaaatatctataagtaggggtgataattcagatcaaacataataatataattcgaaaataacatagatgaagtgactcaaattaagacgaaaaatttaataaaactactatagaaataaagtaaatatttttgtgtgaaaaagataactattaaataaaattaaatcaaattagttattatcttagtccattataattacattgacatgagtaacaccaattgtcaaagcatatccaatgaccatgcctctattattgttttagagacactaaaaatttataatccaacttaaatatctttaaaagtagaaatatataaaattttccctatttttcttcttcttaaaaaagtcaataaattaaactagtcatacatatataatcaccttccatgtgattaaagttgaattaaaatgattagtactaataatagaataaaaaaaaataacaatccttaaaactacatcattagttaaaacatcacttttatcacatggcatagacaatttgaagagtttcacaatgacaaaaatgacaagtaaataacattttattttttacctaatgattaaaattaaaactattgtaaatattagtgtaatttgcgatataaatacttaaatataattctcaattataaatagatatttaatttttacggtaataatacttaaattataattgtaggtgtcaaacagttaagtgttaagtaaattgccctgtgacaattcccaagttatttttataaaattccaaaaatataatttaactattattacaaacaaaaattaaacttaattatttatttacaacaagttaaacttacatatttatatcataaattactttaaacattaaaatggaaatcattacccatttattttctcttttctttttttgttaatcatatatcttccaagactaaccaaattaagaattaaacaagttcaaagacaaaacactaaatattatacaaaaatcaaagacaatagataaaaacaaaaaacacataagaagacaccaaatgaaaatttcttcaaatattaataacataacaataatattttaattatgtaattttaaatctgtaattaatcttaatcacaacaacaattaatcaaactgaagcttgtgaaaccttgttaacaaccaccttacccggttcctgacccaacgacccaccgggtctcgtgtcggccgccaccgccgcataactaagctgaggccccggccccggccccggccccggtccaggtcccacagggacctgctgcgatggctgagaagatgccagcaccatcccaccgccggcggtgtagaatacctgtcttcccgtcgcgctatcgtacgccacctgagtgtacggacccatatcagtagtgggaaccattccgccgccgctactcggccgtactattcccatcccttccggataggtcgccgcaatcttcggtggcggctgctgtggcggaggtaccacattgtacaccggctgttcctggtaaacatccggacccaatcgctgctgctgatgctgctgaacttggtagtatccttgtggtggttgaccgggtggaccggttaccggtcggaccataggttggtggtggtaaaccggagcaccgtgagctgggatcatatacaccggatgatcttgtgttcctcctcctccaccgtgactcactggatatcctccgctgcttgtgagtccttgcttttccggccagtaatttggctgaggaggtcccgtcatagctgccggaatcttctccggtactttatggatgtagtaattttctccggcgtatcctcctccaccgactagattttcctcgctctttcttccgtacatcgcttgttgttgctgttgatgctgttgttgttgttgttgttgaagatgatgatttagctgttgttgttgttgttgatgatgatgatttaggttttgttcgtgttcaatttgaagcttctgtaactgtctctgaatatcaaccgggttagacccgataacccgattagctccactcataacctgatattcctgaggcggcgccgccaacggttcaggcacagtcggcggaggaagcggaggagaagccacaactccaacaccgccaacgcttttctccaaaccaaacaagaaatccacgttgttgtgaacaggcggtttcgggttcgggtcggatccatgattctgaaccaaattcaaagcctcaacaaactgatcccgatccgtattcggaccttccgacccgaaactcgaagcggaattagccacaacaggaaacagaaacaacctcatcctcgccggcttaccagtagtccgatagtaccgatcgtactcgtgcatcatatgctctaaatcatcatcgttcgtaacggagatcaaagcatcaagatcttcccctgggagctggtacttaaacgaaacctcgttttcacagagagcagagagcttacccaccataatcgcgaacttcacagtccgatcaacggcaaggatcttggtttctccaccgatgtagcagagctgattatcgtgaggacgaggtaggatttttccgccataactgcacatgaacttgaccttgtagttctgcggcggcggttgatcgtcccacggcggagggttctcgaaatcgatctctcttgaacgaggcgaggaatcgcccgagtcagggtacgaactgtatgagaaattctccattgattcgttttttttttttttt

SEQ ID NO: 187785 - DNA, 884 bp, Cannabis indica
aaaaaacctaaatatactatatgatattaatatgacattgcatattttaatgaaattgaacaatgttattttccaaataaatggagaatcaagcttctacaagaagacataatagtgggataaataattatcatttttgaaagatatttgaatgtatttttcttcaataataataaaaataatttctttaattataaataaataaaaatgtggactatacaatggaccccattttctttgccatgacaaaagagccaaatgtccacttcaattctccacctccttccttcccaactcattcatcattacattaccatcaaagaatccatttttatttttccattctctctttcttacactttctcatcttctcttcttccacatcaccattttctcccactacttttctctccattcccactcaaaccccttttcttataaacaaaaaaatacaatcttttttgcttcatttccatggcaaactctttctcttaagttttctctaaggagtcttttttgaagctttctttctttgtttacctttttcttattcattttggtttaaaaagaaaaatggggaattgttgttgttgcagaagagaaccttcagttatcagagtatcatccaatgcaaagtcaggtaagttagttactaattgaattttttgttcataaaaatttgatctttacttttgatacactaaaaagatttgatttttattgttggatttttgccaaagttggattttttacttgggtttgtgttttctcaatctaaaatgatcataatcatagtgaactacataatcatagttaattaagctaaaagggttatgtttagattttataaaaaaaaaaaccatcttttttagaatttagagtgt

SEQ ID NO: 187786 - DNA, 5443 bp, Cannabis indica
tttttttttttgttagtatattttgattcaaccaattttgtttgcttaccttccagtgatgactgtgaaaaatcctctggatgctttggcaactcttcgcacacaaaaaggattaattgatttggtggttacagattttcatatgccttacatgaatggttttcagttacaggaacaaattgataaagaatttcaactcccagttattagtaagtattattacatataaaaaatatatattttcatatatataatgtttttaaaagctttaaaaaataataactcatatatatgttaaaatatgtataattatgtttatatttgatacattcatgtatatttgataaactcatatacattgaatatggcgaaggcaatgacgggtaaatgttaggcttttcttcttgagtgcctctgctagggttccgactcagtccggatacattgtatattgatattgtgcctatttgatatatctgatacatcttctttgtataaatgtgtaaatttagataaatgtgatcaatttatagaaaactatcctattgatacttatatatcatatatatacacgaatggtatctcattaatttgccttttattattggttattacaatccagtgatgtcagcggatgacagagaaactgtattgctacgtagtgcacaaagtggaatggctcttttcatactgaaacctgtgaccccaaatgatttgaagaatctttggcaatatgcaatcaaatacaagaaagagaaatcaaatgtgaatattgatgaagaaatggacaatggtactactattgatatcgtgatgaataatcaagggcaggtggtggacacaatgataccagtgaaagactcatttgatgctactcaagtacttggacgaggcaaagagattgtacttttcgagccagcagataataatagcaacaacgtaaatgtaatctcttctgcttcatcaacatcaccaacaaatgatgatgatgtagctattattgagactttagtccaaaacaaccatggaaaaggagactcatcaagtactactaggtctagtagtagtattaacgttgatggaataaataatactacacatggttccaataaatcatcagcaagtcatggatacggaagagatgataattatcatgacaaacgcaaagctcctaagaagactaaagtagtttggactaattcacttcagaatcgctttcttcttgccataaaacaccttactttggatagtgagtaaacctttaatagttttatataagctctatatcatcattataatgttgcatagtcactaatgtgtgtatgttttttttctctatcagaggcggtccctaagaagattcttgattttatgaatgtccctggactgactagagaaaatgtagccagtcatctacaagtatgcatatttcctcacaatattacaacactaatagtgacatttttttctattttaattttcttttatatatgtctatccacatcgaaacattatacatagaaacgaaactttaaaaaatattgtatgacaaattttagttgaaaacaacacatattttattagagaattattagaaatacttaataaagttccatttgcattatatataaaacataaatttatttatacgtaacattcataaaattgtacacatttattatttattaatttgatgtatatatgatgaatgacacagaaatatcggttgttcttgaagaaagtagctgacaagggactgttaaatatgacagcaacacaagcaatgactgatagaatattgaagtcaagctttgctgcgggatatccacaagcatttgccttgcagagccatgaagcttctacttcttcatcaggtatcagtagaaattataaccgagccccatatcgaccattgcaaccattactgtcatctatgacgcccaataataataacaattacaacatcaacatatttcatcataacatccatcacccttcatcgtcatcatcatcatcatcatcacctattatgagttacagcccaccaaacagtaatgctataacaccaccctattcctcctatgctattccaccacatcaccaccaacaaaaagcttcaaatagtcgttccatagagttgcctcaacctatgatgaccgctacttatgatgttgttcaacgccaccagattcgtcctcctacctatggctatggacacattcatccactcactttcagaggaggtttgaataataataacaataatgaatatattgttgatagtggaactggtaataattattcaaataggtttgtgcacaccacttctgctggaattttaaatggatcaacaactcctaaccgccttttcagaagtacagccattaataatgatgctccatatttcaattacattaatgaagcagctaatagcataaatggtttatcaattggaatgagatcctcatcaactaagatgaataataatggtaccagagtatactcgtcaaaccagatgatgatcaatggtggttcaaacagtggaatacagtcaagccaaacgattcatcgtgacagtggacttaatcctatcagttctggcacgtatttaaaccaattgatcaataaaaataccagagaaagctcggttggaatgtactcatcaactcagatgaacaacgacaatactaataatggtggggccactactggtagcttgagcggaatgtactcaaataatatgatcaactaccgtgccaatgtcggtagctcatcatcactcagaatgttaccaacgaatcaggtcataaatggtattggagggcagcaacaaaaactaaaatgttttgttgacaatggctatggttcagtgaaaaataatggcctagtacaaggttacaataatgtcaattatatgaatgggaagactactagtaataccaatagcattgttggtactagtcaattagaagatggattcttattaccttctaatcatcatggttgtgagaggacaaatactagagtgaagacttcactggcacaatctcttgtttcctccaacaacaatttcaattatattcaccaacaaaatattcaaactcatttgcagccttcttcaaaggtggtaccaccttctttgacagtgccaccagaaccctttgtttcgcaacaacaatctggctctgatgagttaaataatatggaagaaggtgttgggaacgataatagaatgagtgatgatctgaaaatcaataatgatgattttaataatatatttggtgttgtaacaataagggtacttcttctgcgtctcttggtgaacaaattccagtttccaacgttgacaatgtcgtcattagggatgatttattgacgagcttgacaacatttcactgcctaattttcaggtgattaattattatttgtatttaaataatatataagaaaaataagacaaatcccttatgacctatttgatatatgtatatgctatcaggctgaagtagcgaactctccaccagcaaaccaagttaacaatcagaaccccattattgctaatcaattttctgcaatcgcttcaagcacatctcttgtgcaagaaaatgaagtaccaactattaacaagaatggagaatccttaagtcaggtatgctaaccaaccaaaccatcaacatttatagcatatatatatctaacttaatttcttatttcctcctactacttattaatacgtaatacctatacatatgtattgacatgatagagaaatttttctagctataacaaatctttgattgaagaaatgaaaacattcctcaataataattatatcttatagctctatagcaatactatatgccaactttaaatagcgtacatacaataattgcgtatattaatcttaattttttattttttttttttgtcatattatttgtagccctatctattcgctttttcaattttgaactttattcgttttaattttttaccaattaatcagtctttctttcatccaaacttgaaaatctatgtatggaataggatgccaatttcgtttcaaattataagtaacatacaacttataaatttattgtgatattatatattacaagtatattataaccagagaatggggagtactatattaaaagccatatatattattgcccattgcttcattattatatatcaatataatcaacaggacaaaggtgtgtcgcaaagccttgatagtaatttgcttccatcagaagactattttccagtctttgacgaatttcaggcaagttgaattatatgtactcaattatgatattacttgcaagtatataatcataaaaaaagttaggccactatattgaataattttcataacattattgattatgctaatattatctatttgtatatatatgtatgtatgctcaaatatgtgcaggaaagcatgggagaagttgttgatcttactgatcagttcctaaacattcctactcatgtgctaaatgaggttaaaatatttaatagaatatttgaatgctaagttttttaaatatgttataagaatgtataaatttatattggttatgccttttgcagatggattgggacgaggttatggataagatgttgaatgataattagctagcaggaccattggaatgattagagatgctgaattctgaattgactattcccaacatgatcatggatatcaaatatcatttacaaacttataatagctagctagttcaagttgatgttttcatattacataattttgatgtgtttgaataagtttcgctagtacatataacttaaacttgtttaagtgaaacaatttatgtttccctttgtggtataaacttttagcatgtaaataaaatttatattaattacaacaatatatcttatatacatatgatcaacatttttatttaacaacaatataaataatccatctccatctcttctaacatggctagcagctcttgtagagtaatgtaaactcaaaactgtttagtagtaatttgtttgaattttgttgaatttaaaaaaaaaaaaaaaaaaaaaaaaaaaagtgaagtgtgtgatattgcaaagagtctcacgtgagatataaatagtacttatttataagtgtatataagatggaacaatgagattttggttccactactacaatttggcattttaatgacactatataatcacccatatttttgggcagcttactaaaagttaggagtgatttttagtaagagcattgctattaggcactagtggtgcttaacaccttctcgacatgtcgcgttacgattggctagcgatacttcctaaaagctattatattaaattatatgggacccgatacttaattggaccaatagcgatattgacacataggagggtggtaggcaccgactggtgctctttagca

SEQ ID NO: 187787 - DNA, 2164 bp, Cannabis indica
ttcttttttaatttattttaatattctagtacattttgtgatttttgacagtaaatgaagcattggagagggtggcaagctatggcattttgccaaacatgatattgtatttgatgaaagattatcacttgggagtagccaaaggtaccaacattatcttcttctggtcagcagctactaatttcatgcctcttcttggggcattcctctcagattcttatctgggtcgttttctcactattggctttggctcaatggctagttttctggtaatttcccatctcttattcctttcatcttttcagatcataccctttttttctttaatgaagattcaatctaattataaccttaatatccttttcaacttttccctatcttccttttaaactgagttcttaatgagatttgcttaaaagttaacagtagttaaatagtattaaaaaaagaaaattcttgtgagattcacactcatgtggttttctgatcaagtgggcattttttaatcattacattacaccacctttttcttttggttattaaagaaaataaaaaatattaagctagtgttgttgttcatgacaggggttggtgcttctatggttaacagccatgattccaaagctgaaaccttcacgctgtgatatatttacacaagttgtcgaaagccccactggtgggcaaacgacatttcttgctttgtcgtttagtctgatatcaattggagctggtggaaatagaccttgttctcttgcatttggtgctgatcaagtggacaatagagacaatcccagaacaagagggtattagagagcttctttagttggtactatgcttcaactgcggcttctcttatacttgccttaactgcaattgtttatattcaagatcaacttggatggaaattgggttttggaattcctgcaattcttatgttatttgccactattttgttttttcttgcttcatctctttatgttaaacaaaaagcttgtaaaagcttgttcactggacttgctcaagtcattgtggttgcttacaagaacagaaagcttcaacttccaaatgggaactcaaatagtgatcataatggtgtgtatcaccataacaaggattctgaattagtttcaccatcagacaaattaaggtactatcaaagtttttctctttttttctttttttccagagttgtcactgtcatgtcaagaaaagaaaaatcttatatagattgtaatcaactgtaggtgtttgaataaagcttgtgtaattagaaatcgtgaacaagacattgggccagatgggtctgcttcaaatccttggaatctttgcacagttgagaaagttgaagagcttaaagctcttatcaaagtcataccaatatggtctacagggttaatgatgtccattaacactagccaaaacacttttcaagtactccaagctaattccatggatagacacttgtcaagttttcaagtcccagctggttcttaccctatgtttgtagtgatctctttggctctttgggttgttctctatgacagagtgatccttcctttagcttcgaaaattcgaggcaagccggtgagtttggatgtgaaaacaagaatgggaattggcctaattctgacattcatggccatggttgtggctgcagtggtggagagtgttaggaggagaaggtcaattcaacaagggtttttgaacaatccaactggtgttgtggctatgtctgcaatgtggttaatcccacaacactgtttgaatggcttagctgaagcttttactggaattggacaaacagagttttactattctgaaatcccaaaaagcatgtcaagtattgcagcttcactttttggattaggaatggctgtggctagtcttttggctagtgttgttttaagtgctgtggataacttaacatcaagaaatggtaaagagagttgggtttcaagtaatatcaataagggtcattatgattattactattgggttcttgctgctatgagctttgtcaatgtgttttattacatattctgtagttgggcttatggaccttgtgttgaagagaggcaaaaggttagagatgaaccaaatggtgggattagtagtgatgaaggaaaagagttattatctgtctaagcttcaaaaaaaaaaaaaa

SEQ ID NO: 187788 - DNA, 1239 bp, Cannabis indica
acattaattaccttaacaaatggtggctccccaggtgcgggagaccggtaaaaggtaccggccatggggcattttactggcgggtgagatgacttgctagactgtgcaggggcaggtgagacaggtgcaggtgcggaaggaggagggcttgcaggaggagcataagatgttggggcttgtggtggcggtgctgataggtacatgccttggggataatgagtttgcattggggcagccgggggtgctggttgttgaatagcctcctttttccttattaaaagctcacaatccaactgcttcaattccagctccataatatctcttgaatccactagcctacaacatcaaaatgatatacacctcagtgactataacattcagattaaccaatttcaaactaataaaatacatgagactcattcaagcttacttgacaaggtctgatacttgagccatgaatgccgtgattgatgatggatcaggaacactgttatgtgcagtattttcttccaaagactcatccttctcttccggtgactcgatagcagactttgggggaggtacagggatagaatttgaagcaacagcaacctgaaattcaaaaattagttctataagaaatctttgatgatcattcatctctacaaacataccaagattcttatagcaaacatttcaactcgttaccttatttagctgagcatgcaccttccatatagctggctgcttactgttctgagactgcagaagataatctcacataagaaaaaaaatcacaatgaaattctattacttttgtctcaacatagaaagccagtgtgtaacattgaccttcctctagtcattaattcatcattaaaacttactgaatcacaaaaaaaaaccctttaacaaattctctcacattttgttttattacaaagtacttacaactctgtcaatttacatctttcaacataaagtacattaaaccaatttgaacccacgatatgattatgaaatctcattggatactaaattaacacaacaaatcctcatgtgtatatcagattcagagctagcattaaataaattggtgtcatctgacaatgcacaagtatcatacattttttaaacttcaatttagtaaaaggtggagtactaatcaatcataaaccatgaaataaagcttctcaaatattaatttgagagagggaaaagggtaagagtctgtaaacaacgaaaagtgagagagagtag

SEQ ID NO: 187789 - DNA, 7032 bp, Cannabis indica
tgctttttatgtctataaacaccttctccacccttgcttctccattattaactgctccaaccaagaaaagaaaaatcaagctgagacagagacaacaaatgcaagagaaaatggatatgaactagttcttgacaacattgctagcaaagtaagtattttttatactagagaaagatgacatttagtttaagtggaaaataggtttatgagaatcatgacatgttattattgagaaaagggatagtagatattgagattagagaaattttcttcttttggattaactactaaattaatgtattacatttacaccctgtttataattcttctattgtagtcaaactcgatcaattttgatgttgctgtggtgaaagatataaattctaaagacgtggtaaaggaggaagttacatcagctaaccaagtaattctctaattattttttcttagtttaatccttataatgtttgggagaaagaaaactctgttttttcaacctataaaaataagacaaatcaattaaaatgttatctcacatattatagctttctcatatttctattttatttagtcccatcattttattctattggatactaagcacaagttgtgttaagacagttagttagttgtaactgttttggttgttagttagttttaacggtctcggttgttagtctctttcggttattttctgttgagcttgttgatgacgatgtatgtatactgtgtactctcaggatttgtttggtttgtcgtattacactgtattgtattgtatagtattatattaaattgtatttcatacaatatttttatgtaaaactatatgtggtattgacttttataggcatctaaatatataatattttagtataaattaaagtttaacataatattacataaaaataagatatataatccaatttaatataatacaatacaatattacctaatacaacgtaccaaacgagccctctcaatcattcagtgagattctcttttcttctccaattctttctctttgatctttctctggtttttctttctctttccttgttcagtgttcatcatggctcgaaggtttaacaagttagtactaaattaatctaataattcaatcaaaatcaaattcaaatggtaatttaacaaataaaatctaacccaatcttaggtaatagttcaaataatttcctttaataataaaaagtttattaggtacttcaaataccataccaaatcacaaattcttaaaagtaatactaggtcattgttgagatttgaagtaaactggttcaaatcttaagatggtttttgtgtatttgtttttaattgaaatttaaattgttgatcttaccctctaatgcttcttctgatcattgttactctttttggtctcatcacatagaaaattaagatgaactttcaatcattgaacttatgttctattttctccaatgaattttcagttgaggcaagcagagcctactcagcttctaatagagaacaagaactttgtagcctcagagactaaacaaaagattgttcaacatcaagctgctgttagagactttccctctgcttctaatgtagtccacaacaagtggacttgtttaatatgtaaggtgacaactgaaactgagataaataaaaattcccatcttagagggaaaaaacacaaggctgcatatgaggcactgaaagcaaataacttgacatctttgctcaagattgtcccacctccaatcccgaagaaatccgacaaagtttcgaaacagaaagcaactgcaagcaatcagtttagtaatgaacacaaagaggagccgaaaactagcacgtctcgacgtagtagaaggaaaaataaactcggtacggagcatgggaatgatgggaaagataccgaaaagagtaagcgatgtaaagtacctagtactaaggtgaagaatcctttgaggtgtagaatctgtaatgtggagtgcagtagttcaatttccatgcaatcccatcttaaaggaagaatgcacttggctcaactagggttatcaaaatgagtttaggcctatgagactagtaatgtttatgatagagatagtgtaatgttgaagaaataagctgttaaatctagtacaaacttttcctttcctttgagcaacttgtagggttgactgtaacttttgttctacctttcctatcttaatttaatagaattttcgactgaagattcgtgtcgtatggaagaatgtacatagaacatggctgaaacgcccttttattaagagttaagataagtttgaaagtacacaagatcataacaaagtgacatttatgccttctgagaagtaggcattgctaggttaattccactgccacctggtaagtccttccattgctgagttacagttttgatctgggtaaagaagttaacacccgctttacctgcagtataagataaggcagtgttcaaataatatttcgtaacacgatcacgtcaaaggggtatttctgaataaaattgcttaccatagaaattaagatctccagcaaaagatgctttcgaaccagtaaacgagaaaaagggcaagggaaccggaatgggaacattaatgccgacctgagtggagattcaaaagagttaaagctacagctatagccataatgaatgtatgaactttccatggcttatacttctaggcttattaattagttttatatcaggttttccctattgattctaaatctagatggaagaaaatatcgaaatacagttgtgtgttacctgtcctgcctctatctcattctgaaatttccttgcagcaatgccagaggttgtgaatatagaagctccatttccatatctgtgagaaatgtaactcaaatgtaaacaacatacatagtgacacattgataatagaatgatgagaatttcgtaaaacgataagctaaagggaagtacttgtttctgttaacaatgtttatggcctcttcaaagctgtcagcctgcaattagaagggaaaaaaacacgattcctaagtttcttacttgtcttaacaagaagcaacaaaaagatttagtgaaacagggaagagtagaacaaacatgtatgcaaagaagaactggcccgaaaatctcctcctgcagaaacatgatagagaattgttagaattatgctcaacttcatgggttcaatgattttaacacttggtgcataataagaagatgaattgagtttcagtacaaggaaagtaaaagtaatcctttcatagttgatttcaaaatcaatttttctatcttcaagtctttaaagtaaaaagtaccttgtagcactccatgtcaggtgtgacacctgataagatggttggtccaataaaattaccacgctcgtatccggggacctattttgtcaatcataaatgaatttagaataaaagtttctcttcggcaaacagtaaatattcttgaatacttggaagcccttttctatcgtggtcttagatatcattaaaattattcattctagctattcaacataccacaatgtctctgccatcaagcaatagcttagcaccgctatcgacaccattttgaattaaattgcatatacgttccttcgcctgttaatgcaataaagaaaaataatcaatacggtcttatggagcataaagaagttgaaatttgtgcagcaaaaagctatttttcttcattggtattgaaagtgtaaatttcactaagccgtctcacaatcctatgtgcttgcctgtttactaataactggaccgaggtctgcatcaggttctgttcctgcatttactttaagagatttggcacgctccactagttttttctccctgtaatacataaaaatacgaaaattgttaacttaataagaatatgttaggattcatacatattttaggatgagtctgttaatgaatagtcacacgcccacattacttcctagattcctgcttcggctgatgtaaattgaactattaaaggaaccgagtctactggatgagcatgtattgaaaggaaaatgttatggtaaatcgtaatattgtaaagctttttacttgaaaaacgtaaggagatatataaaaatatgccttactgagtgatcttttacagtgtagaaatggattaacatgcaaacaaaaaaagattattcgaggacaggtacaaagtctgtctaaaggaggaagatgtctcaataccatgactttgcatctccaacaaaaacaactgtacttagtgccatacacctctgtcctgctgcaccgaatccagcagcaataagggcattcaaagtagcatcctcacttgcatcaggcaagataatcgcatggtttttggcccccatattggactagagaaagaaagcagatgaatcatttccacttgaacttttgacatatatttcaaagcaagaacaatacaaataggaactgtacagatactaatgtagcaaaagagactttacctggacacgtttccctttagctgccgcccttgaatatatatgcatgccagcctttgaaaagaaaatttagaaacacaataagtagttaagatttctggcagaacctaatatgatacacagttataatcaatgaaaatgtaatgataagaatatcatgtcataatggatacatacactatggctaaaatgaatagatatttgctcaagaaagaaatatcaaagaagaaatcatcatacatcaaattagaatttagattgagaaatgctttaagatacttacagtgttagagcctacaaacgatacagctctgatatcatcatcatcacaaattgcattaacaatatcctgcccaaacgtaatacacattaagataccaaatccgcatagatatattcacagaagagactactaaaaacatcagaagttgcaccgataaaagaatgactagaaacataaggaaatacaaaaaaatcaatatttgtacaggaccgataaaaaggggaaacatattaacatcgtttagaggtatctatttcgcaataaactgttttctactctgagaaaggttgactaaaacttatctagaataacaccatttgcattttctggctgaatcatttagcatcctctcaatttagttttaatactcatcatgttgaaaggtatgattaatttgtccataaataattaatatacggataactgaaggtcattatgaatagagggctaacgaaaagcagttgaaccacaaacatacatttgttccatgaacaacatttaagacaccctttggcaaaccagcttccaatgccaactctgcaagtattatcgatgcacctgtaaaaagagtactagtacaaatcaatttcaagtgaagcatgaaaagttatgccatgtgcaatggatagaaaatatataaaaagaatattaagcaagatgaatgctgtttacgtcgttggaagcaggacagcgagtaaaggcaagtggattgaaagtgggaatagaccatgtgagtgaaaatttaaattatcttataaagtaacagaaaattaggtgatgaaccgagataaaaggccaaattagtatattgatgttattaacatagttgtatatactcataaatgttgactaaaaagaaatttttttaaaaaaatactcagctaaccacaagttaattatatagcacattctaatgataatcacctggatcttttttcagatggctttaaaacaaatgtattcccacatgtaacagcaacagggaacatctgcatcaagattatggagcaatttatgataatgtcacttgaagataacgaagaacaaattaccaagaaggaaacaaaaactaatacaaggaagagactaggcaatagtcacacaattgcttttgtataatatcaagaaaagtagcaagcgacttacccataatggaatcattgctggaaaattaaagggacaaatcccagcacagacaccaagtggctccctaatgctgtatgtgtcaatgccactagaaacattggagacatactctcccatctgcagagttgccataccacaagcatgttccaccacctctaaaagtaaaacccatcaaaattaacaaaacttgttaataactaatgagttccaccatgattatgccatgaattacactcaaaacacgaaagtaagtacaaaaacctagaccacgaaaaacatctccatgtgcatccttcagtgtctttccctgttccgttgtaatattatgggcaagcttatcctgaaacaatagtaggctggttcacttaccaaaatacttgttaaaaaagttgttctaaaattgtcatgacattcaatcacatagttaattgccatggacctatcatggaactcgaatgggaggcacagtcatgaacaaatgcccttagaatttcatatacttacaatgtctctcctaataagctcttggaacttgagcatcactctttgacgggttgtaactggtgtgttacgccatgacggaaatgcttgctttgctgcagatactgctgctttaaactcttcatttgtagtcaaaggaacttgtgaaacaacctcttgtgttgcctataaccaatatttttttccccaacaactcgttaatagtttttacaccattaaatagtgaagtatagaattattgaagcttctatgaacttacagggtttataacatcaatggaggatgatgattgtgaatcaacaaaagtacctccaattagattgggaactctctgaaagaataaacccacaaaatcaagtttagtaaaaaaaaaaaaaaaaaaagcttaaatgctttagtaaaaacaaatacttcttcaaagctaagcaaattggtaaatatcccagtaccataaattttctcacactttctcagcagccaaacaatagaacaaaaatcaagtaattttattaatcaaattaccctgaagttagatatacaaaaagtacatacacatgaacaccatataaatatagttacatatcattttccctcgaaagaaaatttcaaaaatcaaaacttttccag

SEQ ID NO: 187790 - DNA, 4259 bp, Cannabis indica
ctatgaaagagggtaccactaatctccaataataattctgtcattcctaatatatgctatcatgtagaaaaaacaaaaaaaaaaaaaaaaaacaaaaagcgatgacataatgaaacttaagagataaaaaatatatatacttataaaaaaaaagttatttcttcactagtattaagtatttgattgacaaaaaaatataggcaccaataattatcatgtggttggagaaaaagaatgatctaaaacaggagccagcaaatgggatcatatattcgtgtttctatttatatgtcaaatttttatttctttgtctagacttgaataagccaaggaatcatgcaatgagagaggaataaactttttttatagccatatctctccatggaaaattgggatcaactctttctcagttggaggataaagttacaaccctgaaaaatgagagattgacagaacattataagctaagggctgtgacaacacaacacatgaatattgtaccataatgataattggctataaaagggtattagattaaacatctctctcactctcatatctatgaattttgtagtgggtggagaaagagacatacactattttctatttctttatagagtgaaatcttactgctcatctcaaaaattgggtacaaaccttaagtagttgtgttcttaatcttcattattgtctacactatagctagaaacaaaagtatgttattactgcaagttttcctaccttatagcaagaaaaagtatcatttaattactatatcaagtaatttctattcatcaccacatataaaaacctattttaggtcgtgttacatattcctcgcacgatagtatgtgtggtggataatcacttgcagtgcaatatacgctgatatgaactagtttttttttagtttttttttggcggaaaggtgtaattgtaaattactagttatatatatacacatattatttgacacgtgttttcatattgttattttatgtatttatttatttattttttcttaaaaatcattttataattttctgaaaaattacatgcaatgtgtcatgtgtaaagggaaaggagaaatggacctaatacaggtcccctataggttaaattggagatcacatgcatgataagaatatcataaagatattaaaaccagaagatataaagggctacctcatatattttggtatctacaatgaggtggaaatgagtttgagacacaggtcttccgtgcatccaccaaacctttttttttttaattaaaaaaagaagagtttaaataaattttaaaaaaaataaatagaaagtggtccaatgaaatttcacgaaactccctttcttttttttctcaataaactacgattctaaaggagaagcaataatgaggtcttgggctaacatttgactggttagctgtgcaagcaaagtttacacagtttccatagatacctcaaacgacacgtcgtttatggttggagtgttgtatttctcttttcttttattgcgtgctttcatttaatttttgcgttcttttatacattacaggcaaaggcttcttgaaaagcggtgtagggttgtgttgtgttctgttatagcgcttttaacaggaaagaagaatggcttttttgaccgtctgatcagatcacctatacatatatatatctacaataattaaaaatatgcgtttttctgacagtaattaacaaaaatgccaccactttttgttaacacataggtaactaaagtagtacaagtattttcccaaagctttcatcaaatttcgctactgatcatgatcatcattaactgaccaatcatgtgattattagccaagttcaaagttgtcacgcacatcctatatatcaaaggtttaatagaataatatataataatgaattttactatcattacagcgtatatttttaacagtacaggaatattcatcaaaagtagtgatatctctacatacacatataaagatcattgtttataaataataattttcatgcagaaatttacaagtagaaagttgacaaactagtaataatagatgatgaattattttcaagttattacactaaaaaaaaatatattttttataaatattatacgccaagagagaatatggacatgtaaatatatccatttttggcaaaagttacttttgaaaaaaacaaagagtagtggctgtgtcagctgatataagcatgcctagaacctcataaaaatataaataaatagtaaaaataacctaaaaataaaataaaactaaactaaagctatagctttccctttatgtatgtgctctctgcagcaaagtctttactgtgctacagaccgctgtaattccacaacatacagatctcacagcccacaaagattttcatttttcatacatatatataccactcctataaaaataaaaagacatgaacatatgtacttatataatgttcgatcatcttaattaaactaataaaaccaccactaattaagtagtacatatttttcacctcaaaaaatatctagtgtttactattttcttatacactttgttatgtttgccccacgcacgtgatccatcatattatactatcatctccttcccaatggcaattttgtaatattatctaaattgtcggccaaatgttatatattgaagagaataaaacgttgtcactttacctgttataaactaataatttgttttttttaagctaatttcaaaagcaccactttgtaacttttggaagtaaaaaaaaaaaaggacatcacaccaaatacttgtatataaaaaggccaaagagaaacaaacctcaaaacaaaaccttcatttccaaaaaaacaaaaaaataatgctacttcaaactacagcaatggcgaacaatgaatcagactacgacagtagctgttcctccatcaccattccagactcaagccggagctggatgagcagcagcctgagcttcagcagccggagacagagctcagtctcagtgagctcttcagccgctgagtcatccacaacagtcagctcatcctcccagaagccacacaaggcaaaccaagcggcgtgggaagctatgagtcagcttcggctgagcacgagaggtgggcgagtgggcttggaccagttccgacttttgcgccggctggggagtggggatataggtaatgtttacctctgccagataagaaacggcgtcgttgggtcatctgggacgacgaagacgacgatgtcttcgtttcctgatcagtgcttttatgccatgaaagttgtggatagagaagctttggcgattaggaagaagctacagagagctgaaatggagaaagagattctggggatgcttgaccacccctttttgcccactctttacgctgactttgatgcttctcattactcttgcttggttatggagttttgtcctggtggtgacttgtactccgctcgtcaacgccaacctggcaaacgattctctatttcttctgccaagtaagtctagtacagctagttatttagaatttttatatggtaaattgttgtaataaataatattagaaatcagtatataaccatattggtaattaagatatatactgtatatatcatacctccttatctgtgactcaaatagcgacactcaattatttaggtttttgtcagttttatgaataaaaatttctttgtcaaaaaataataatgcaacagtttttttttccctcatgttaataagaggaaaaacataatttaaacccacttacacttatatatatccagccctactatataagttaagtatatactttaaattacataaaataattattgtttggaagattagttgatgctttaaacaaggcgtgataaaagtaaatcattatattttgtttagtatttttatttattagttttgttaatatgcatgatattataaatagtccgtcccacaaaataagtccttagctataatactaacagtgagcataaacgaaagatgtcattttttaattagtcataattaattattgcatttaaagggaatgtttggcactaataatttaatcatgatgtgtgttcgtgtggggtacgttcagattttatggtgcggaaacgatcttagcactagagtatctccacatgatggggatagtttacagagatttgaagccagaaaacgttctagttagagaagacggccgatatcatgctctctgattttcgatctctcactcaaatgcgacgt

SEQ ID NO: 187791 - DNA, 2595 bp, Cannabis indica
ataaaatttatggtgtaggcacatgattgacattgttgaacatataatctttataaatgatagaccaagtcaaatagataattttgtcacattatttcatttgtagagtgggaaagagtagtatatatttattgctttttattatttttcaatctaatcaataaagcatttcactttaatcaattgatagagagactttagcaaatttcaattttattctacctacattgttttttttttttttttttttattactggtgcctcaagagaggaccaaaagagaacaacaaagaacaaaccaaccttatcaaggctggaagggggaattcccctgaacaaacaaagactacagcagtagaaaccagaaagtaaaaaaaacaacactaaaaaaagagtacttagaacaacaacaatagaaacaactaacagtaaatacggccatccgctcagccatttagcagggaaccgtcaaaatcggtgagattaatacacccaaactgttgggaattaatcgcccatctagccacacagtggacaacaccattgagtcttcttggaatccaaagagcttcccaaagactcaaagtagcggagtaatttttgaacatgcgaaccacgtcttgaacattgtgatgtagggccggaatcttgttgtttgcacacagaatggcagtgattgcggtcgatgaatcgctgtggaaaattacattgctgaagtggagatttacagccacttccgccccgtaggagagagcggcaatttcacctgcaagagggtcacagtagttgagtttgatcgtaaaaataccaatgatttcatcctcctcgttccagaaaattgcagcaccagcagaagagttgttgtcgatggctacatctgtgctgcacttaacccatcccggcggtggggaaagccattgtggctgaggagttgagtatgtttcatggtgaaccacagcttcctgcagcctcttatcaattatccttatcactgtagagattggagaggggtgaacgccgtgaataatgttattcctttccttccaaatgcgctcgaaaattattgccgccccttctaagaacatgctgaaacttaatcccaatggacgattgtgctcctccttgaaaagcagtaaccaagagtcccagttagtgggtgagtagttctctgttctgaggtgccatagacttccaaaccaaattgctctcgcatattggcatgaccagaatagatggatcgtgtcttccacctcggtgccgcacaggggacattttgaatcatccactttgaacaaggagctgagcttactttgagttagtaggtagttagctagtatcttccaccacaacatcttcaatctattgtggattttggccccccagattatcctccatttagaattctcaacattcctcattcccatgttctttactactctgtaggctgacttaatgctgaaattcccattagcttcaggagtccaaatccaagaatcctttgttggttccagaggcagtgtgatgttgagtattcttttaacatcatcactgttgaaccaacgccttaccatatcctcatcccagtggttggccgatatgaagttgctcacaagactaacgttacccgcggcctccgctcgaggttggggttggagagtaccattgggaacccaagggtggaaccaaatagaagtggccctcccatccccaatttttctacaaataccctttgagatgtggcttcttacatttaggatgcttttccaaagtagggagtcagagcttttaggtgccacatctaaaacacaccgattctttaggtactttgcatccaccaatcgactccagaggcttgagttatctatcagaatcttccatgcccacttcataaggaaggctgtgttagtggctttagtagaacgaaaccccaaacctccacaaactttgggtcgacaaagcacctcccaagctattgagtgcattttccttttccctaccgagtctccccaccaaaaatctcgtaaggctttgtccaccttcttagcaatggttattggtatgatatccgaggaggctacatagttggacaccgtcgaacctacagacttgattaggcacatcttcccggcgcttgagagaagtttagctttccatccttgcactcgttgaaggactttatcaactacatacttattgtccttaacgcgttctgttgatctgaacagaggaagacctaagtagactgcattgttggccattttcttcattcccaggaattgggatatggtatgcgatttacttctcgggacgcctctggtgaagaggatcgaagatttctgaaagttgatcgattgtcctgaccacttgcagtactggtttaggcaatccagaataactttagcttccttcatagaggcctggccgaataggatgacatcgtctgcgaacattaggtgactgatagagagattgcttcttcccaattggaacccttttaatcgacccctgttctcctgttgagtaagtagacgggataaggtttcagccgctaggatgaatagagaaggagagaggggtctccttgtctcaatccac

SEQ ID NO: 187792 - DNA, 2824 bp, Cannabis indica
gggtggtcagatgggccagcgttcataacacaatgtccaatccaaccaggacaaagctatttgtacaatttcacactcacagggcaacgtggaaccctactttggcacgctcatattctctggctcagggcaactgtccatggcgctatagtcattctccccaagcgtggtgtcccttatccatttcccaaaccacacaaagaaattccaattgtattaggtaatcatcatcatcatcaacttaattaattgatatcaattaaatcaagaattaataatatatatatgtgtgtgttttattgttgctttcagctgaatggtggaaatcggatactgaagctgtgatcaacgaagctctgaagtcaggattggcaccaaatgtgtccgatgctcacactataaacggtcatccagggcctgcctccaattgttctttacaaggttagtgtaaaaactattacatatatatgtaatattgtcacataacattaatatttggaccatagtagtagatatatatatatatatagtcttgcttactgtttaagttttctacgtgtgaattttccatattgttttcacttgcctataccatttttcactcaacttaaaactattcttagtttgtggcatagatattacaattggtagctttttcaagtctaattctattttggtaattggatttaaatgatatgtttggtgtgattttaattaacatgggtggcatgcaggtggcttcaccttgccggtggatgccggtaaaacatacctactgcgcattatcaacgctgcgctcaatgaagagttgttcttcaaaatcgccggccacaaactaaccgttgtagaagtcgacgcactctacgtaaagcccttctccatcgaaaccatcgtcattgccccgggacaaaccacaaacgttttagtaaccgcggacaaaaactccggcaaatacttagtcaccgcttctcccttcatggacgctccaattgccgtcgacaacgccacagccaccgcaactctccactacaccggaaccttatcaaactccccaactaccataacaattccacctcctaaaaacgcaacccaaatagccaacaaattcacagactctctcagaagcattaactcaaacaccttccctgcaaaagttccattaacgattgatcacaaacttctgttcacagtaggccttggggtaaacccgtgtccaagttgcaaagccggaaacggaagcagagtcgtcgccagcatcaacaacgttactttcgttatgccaacgacggcgttgctccaagcccattactttaatatcaaaggagttttcactactgattttcctccaaacccaccgaccattttcaacttcactggctccccgccttcgaatatggcgacgatgactggaaccaaggtttacaagttgtcgtacaacgatacggtggagctggttatgcaagatacggggattatagcaccggagaatcacccggttcatcttcatgggtttaattttttcgtggtgggtcggggacttgggaattataatgccaagaatgactcgaaaagtttcaaccttgtggatccggttgagagaaatacggttggggttcccgccggtggctgggtcgccattaggttccgagcagataatccaggtatatacacaaaaccactttaacattttgggttttttcttttttttttttttttttttggtcttttttacaaatttttataaagaaacgtagctaacttaaatagcaacaaaaaaaattcatataacaacactattgcaactagcgctacaatcccttaaaaattcaaacattaaatttaaaaaaaaaaatatgagataattcccgtttaatttttaatttaagtttatttatcatcacatttatttatttgtaacaaaatcacaaaaatagaatatgaaatttttttaggtagacaaaaataaaaaaataatgtgattattattattattatttcttttgggtgaagaataaattttagctttacttgattttttttattcttttaaggaatttaattaggtttattataattttttttttttcatttttacttagtatacttttatttactgaaaattgtattttataaagaaatacttttgtaagaaaaattatgaaaatactaaattaattaattatactcattttcttttagtatgagaactaattttatattttgattggaaaaaaatcttattaattaagagtcttttgcttttgagctagtaatataaacaaattaacttgtaaagaatgattattaatacttgttatagtacttttttcaaaaaaaaaacttgttatagtattgttttatatatgtatgtatataaatgcaatgttgttattattattattattattatgacataatttgtgacaatgttgagcaggagtgtggttcatgcattgccatttagaagtacatacaacatgggggcttaagatggcatttttggtagacaatggaaaagggcctaatcaatcacttttaccacctccaactgatcttccaaagtgttaattttattatacataaatattatttttttcaaaaaaagaaaaatatgatgacaagagaacaaaaaaatgtttattatacatattatgtagatctaaagataaagaagagagatctctattctccaccaccacaaggacaagaagaagaagaagaagaagaagaatggcagagaaatatccataagagggaaagttattagatataaaataaatgggcaaaatgagaaagggtgaaacaaacttaattccatttaatt

SEQ ID NO: 187793 - DNA, 717 bp, Cannabis indica
aaagcagcaacaacatgtccatatgaatccccgattacattatgctctctgtcgacagccgcatcaacatttaatttgaactagttagcatccggaggtctccattgttgagcagcatgtacgggtggcaaaggacggggctgttcttccactcctgaaccaattgcagcagaaaccgatagcaactggtgtgattgttcttcattggttgttgcaatagcagcgggatgatatctgtgttgagcattcctgaaatttgataagtatgtgacagcataggaagcaagatcttttgctggtctcgcttgttggccatggaaaacacgattccgttcattccatattgcccaaagtgagcaaaatatttgttccatttcagcttttgtatagattgatgaaagatggaatagataatcacttctatgcattgcagcagaaagacaccaatcaaaggccatacctgagttacgccaaactgcacgagcatatttgcagttaaaaaggacatgtccaattgattcctaagcctgcttacaaacagaacatgttgagtccgttattattttcctttttaccaatgaagtagcaaacagaagagcatcatgaactactcgccaagcgaagattttcactttaggaggaagctggaatgaccagaagaacttctaccatggtgaagctgcattggagctggaactttcatctattttgtctggt

SEQ ID NO: 187794 - DNA, 7754 bp, Cannabis indica
atatagaccatatatatagctcatgcatgcactactcaaccttagctaacatatggtgtttttgtgtatgcatgtgtaattgctttatcttctgtttttgtaaaaaaaacctaaactgaggctaaaatatctaatgtttttaagaattatgtacacttttgcacttcttttttagtaaatatatctaatattttcgaagtatttcacttaattatattattttttttttttttttttggtatacatatacttaatatatatgtttggtaagtaaaaaatcttattgataagcaaaactatacaaaacaaaggcgaaatcccacaaaacctgccaaatgcaacaaaaggcagtcaccaaaaaatccccaaacagactatatacattgttcaaagtccaaaaccaatcaatatctatagtacttttagttttaactagaataattttacttattctattatgtacaatatatattgaatatccctaacaatatatataatctctcttctaataactttgtgttcccaaaaaattgtatttcttgctcgccaaatgacaaacaacaactagttacttagttagaatggtaactgaaaaaactgctttggaaaatggagtcatttgcttcatctcatcaacttattaaaagtctcaactgtagtgcgcaatatacttaatatttttaaaatattatacttttatatctattttttagggttccactgcaaaaaaaaaataccacttaatttagagataatcttttagtcacaacataaatttttttagaattaaaagtaacttttattaacaacaaaaagttacttataactaaaacatagtatttagttactagctattactaatttagatttagtcacaacaaattgtgatttttatgactaatacttttactcacaaatcgtttagtcacaacgtaagaatgataatttataattagtcataacgtatttacttttagtcacaagttttgttgtgactaaaagtaaattttttatagtgttcattaattggtacatattgtattaaataaattgaaatgtattaattattacgactataaattttcatatgatacgaatcttattatttaatacataagaaataatttgtactatcttgtattataatatatttagaaatggtcaaaggccgagatctgggtccgggtccgtgatctagggtcaggttcggaaccaagatttgacgatcgagtccgatttaggggtttgaggtccaaggttagggttcaaggtcgcaggctgggatacagggtccaaggatcgaggtcgaggatgggggtccaagtccaagtcaaggagccgaagcaagagttggcatggggttcaaggtctgagtttgggtcttggtccgcgggctagggccgagtccaagttcaagattatttggaactgggtcgagggcaagagtctgggtttaggtttgggtttgggtctggatctaagggtctgggtccacgagtccgagttcgagtctggggtccaggtcgagtctgagtttgcaggctaggtttgacatctgtcgagggtaggggttcaagtccagttctcggtctggatctttggtccaaggccaagtgtgggtgcgagtctaggtccaggtccaggtagggttaggcccggggctggggtcagggtccaggttcgagtttatggtaacactactacaaaaaccactattctcgaccgtcctcaaaatatttttttttaggaacgtcgctaataaaattaagtgagtgtttaaaactttcgacaatagtggattattcccaaaggttttaaacaatcatatacttttcccaacaatttaaaagagttacaagccaaaaaaataaaactggatttcaaagggaatcccgacagtttaaaccatcgacgatgcttgtgttcaaataaaccacattttcaccatctcgacaatttaaatatgtggtctctctcattttaataaaccttaaataaatttaacaggtctcccactgctctctcttcctttctctcgatcagagctggtgctcatcttcttcgacaaccagcaacccaactccaaatctacctctctcttccgatcagagctactgctcctcttctctggtgcccagcaaccaactctgagttcacctccctctctctccctcctctttccttgaagcccctagtttgctaagtgtcgttggcaattcccttccgcacgccctgctcctgtaacaatcagtaatctcgtgatccgtaatgggaaatactaggaaactgtgtaaccccacatcgcctgggaaaggtcaagtgtaatgatattgagactgtgtgggtatgagactacacagttgaagagtacttaaatggattgattggtactacctatatcaacaaggtgcagcttgttttttggtagcccataacaaaagaactccacagttaactgtgcttgacctagtaatttcaagatgggtgacctcttgagaaattttcccaagaagcgtgcgagtgaggacaaagtatgctagaaatactcgtgttagtctgtaaggccagtcgtcagtctaggaagtagccagagtgatgtactcgtgtataagagtcataagtccattgaggaaggcctaatagaggcttgagatggggaagtcttaacccacccgaaattgtgatcgacgaggacgtcagaccccgtaagagggatgattgtgatagtcagtaatcccatgatctgagaaaaaatatcaagcaagctgtgcaatcccacatcgcttattctacttagttttgcaacaatcaaataagcgacggttatatgttagtcagctgtttaaaagtacaaggaaaactcaattttttagtagtgtaagatagtataattcaatacaacctattaatacatgttaatactaaatatagtattgtattaaataatcatatacaatacaatacaatgcaacccagcacaatattatataatacaatacaatacagtataccaaacgagaccttaaaatattagatagtagtagtgattaattacactttctcagagatattttgcaaaaacattagatatagaagtgtgacattttgaaaatatttggcatgtatatttactgcataaaaaaaaaagaaaaaaaaagagtccagcagaaaaatttatagtacttattattattattattattattattattattattattattattattattattattattattattactatgtagttgtagttttttaaaaatccttccatatttttcaaaaactgtccaaatagcttactgcatctaaaataaaatttaaatatttgtaggcatgattatttttgttttgctaagactcatattttttttatatcatgtataaatctatatgtagtattgttatttgtcatctaaaaatgttcaatgttataccgatgtctcactccattattaattagtgatttctataaataagtaggactcaatatatattaatttattgtggtgtttcattagatattaccaaaaattgttatttttagtgacaactttttaatcacaacataatttttctgtgactaaaatttaacttttagttacaacaaaatattatttgtgactaaaacatgatatttagttacaaattgttactaatttaattttagtcacaacaaatattgtgactaaaccctatatatatactccttttgatgatctcgtaggtaccatttggatattgatagccaataatcttagagcatttatggtttgacatacatagagtttagcacttctagatatgtcattttgcgattggttactctaaaagttattatattaaactatatgagacctaatacataaatgaaccaatagccttttagtatttctctcactgtaaaaaatcttacttaattttaatcacgactaaaagtgaaaaataaccataaatactgtaaaattattggctatcaatatccaaatggtacgtaacgagatcagaaggagtatatatatatatttatatatacgtgtgatatataactatgatgagaattatatgggtttcatctcaaaattaattggtaaagtggagtagtccatattctaatatatagctcaatacttttacatttaatccatgtgagacaatattctccaataaactatattaaatatgttaaatattcgtcgctattaatccgccgcctatactaattagaataaataagcgagtgttttctcgcatttattcggtccctttaataccggcgggtgggtccgccgctaataataaatattcgccgatattgctctttataatttatatttttaatgtttttttaaaaataaacactaataccagcggatctcctaaatccgtcggtaataacctcattattaggagcggaccttttttctgccgataataggtccgccactaatactcaaaattattgtagtatgtgttcttagctcaatattttttttacatttaatccagacaatattctccaataaactatattaaatatgttgcggctgttatctataatcacaatatatatgcatgtaatgtaattattattttacagtttaacttcatcaattcgcattgtcatataattatatacttgagacttattatattttacttttatttttgtcaggttatttacagaaaataatatatatttccatataattgtagatatttgaaatgtgtacattgaggggtcaagagcttttcaaggtataaagggctacacatatctctaattgattaaattttgttgttttcatatactcatcatgatatatagatatatctatatacaaattaatgatagaaacccatacctattattctgagcaaactcatgtgatatcatttcaaaaataattacgcacactgttatatatatatagccattctgaataagtatatatatatatatatatagattttatatgagttgcgtatcaaaatttcttttgggtataaatattatagttttgaattctagcacatatatgcatcttctaggaagcttcgaccatcaactcataaatttaaatttattgagagaatatagtgttggttcttgtacggataatattagacaatataatataagtacttatcaacaaatatataacacacgtatatatataatatatgtatattagcctacaaccagaccagtacgtactgtttctataacatgattttttgttctaataagtgatatattatgtgaaacatgtgatgtgtttaaatatattattgctattagttaaaatatatattgggaatttgggaccattattatgtatcatcagtgtactcatcgagacagagtagtaaaattaaattcatcgatcacgacagtttaattattattatttgcacatataattttacgtttttacaaaaaattatggttattatttggcaatatgctttattttccgaattacaaaaatatataatgaaagtactaataattggcactcatcaacatcagacttaatttataattttttttattaatatgcacttaattatatgttaaacgtacgtgtcattttgggtttaggttattaaggtttaacttgtgaattttaatgtttcttagaatttggaagtataaatagtggaaataatgaattgagttccatctcaaatcaattagaatgaagaggattacattttcacacattatattaatgtgagaatctctatcattccttaaaaaaatagtaattattttttttcaccaatcttgaatgcggctccattataagtggaacttttggctcactaaattacacaagcaaaggctgtatttttgactcacggtagttttttttagctcctctgtttagattagttattgaatttagatgacttacatctcaaaataaattgataatattaaaaaaaatatttttacatttattgttaatgtagaattttttaacactagtgtgtaaactattttgatccgtacttgtttatgataaagttaaacccactaattctgtaccacttttaaaccgtattatggtgtcataatttatattttcatatttatttttgtcatcaataaccttatgcatttgaataatgtagcatttgtgtatatatatatagtctttttttctttaataactatgtacgtataccgggtttttaaaatatatactagctcgtgatttgacaatttaacccattaatatacatacgcaatctctgatatacatatatagttatatagttacgtacatatatatatatatgcattattgtacttaattactgcaagatacatgatatcactatatcacataacacttcgaattgtacgtaatatataaaaacttatatatattcacacacatatatatattatacgacctattaatatataaagtctagcttatgatataaatttaattattatttaactgcatctaattatatgtaatgtatacaatctcggtagctctttggattttactaaggggagatttttcactagatattactagagcttttatataaatattatatgattgattcggatgactatgattctatttctattccttttgggaattgtattgtctacttcgctcgttcctaaattattatttggatgtatataaacatatatgtagccctagtttggatgatatgtatgtatttgtgtatttgtatagtatggtatatatatagggttgcgccgaaatacgaaggtgtaatttcgaggaaggttcgtatattaatgaaataattagaagaccgacacgaaggaaagatggcccattgtttgttttggccacatgtaattaagccaaagatttatatacaattaatatttacaaaatttggacccctacgtctaagtacgttctatactactaattatatatatatatactacttcattcagtaattttttgtctccatattatcatcgcatgtgcttccacatcttcatatcaatcacctctataaatctatgtatctatatgtatatatattgtctaggtgtggctgttgttgttgttgttattgtagtatactgttaattaatatttctgtacagaattttcatgtcgtcatcatggatatcctctctttatattctttgactgcttcaattattagagatatgaattgatatatatatatttggatgtatgtatatgtatatatggttataatttcatatacatcacttagatttttgtggttccaaaaaattatagttttacgcatatttgtttgaggtataatatttatgaactaataaaatacagctctaatattatatatatatatatataataaatacaaagacaataaaattgattaaacaaattgtattaatttaactatcttaaccaaaaaatacatgtaaatcaaataaaaataaaaatggaagaagaaggggaacaactcaatgcttgaatacacaaataatgagcacaaataaataaaattaatgaatagagttaattaaggagtctgtaaaaatacgaattaatgtagtatatagctcaaaaaagttagtttaataattgtaactcagaatagtttacttaagttgttaaagctaaatagttagtacaaagatggtgaggtcttctattatgaagatgctcttagattataaattaatatattggaataatagatattttagctaattcaataaaaaaaaaaaaaaa

SEQ ID NO: 187795 - DNA, 1064 bp, Cannabis indica
aacatgggccttttttccatcttcagcagaatcaacagacaagcttttacgaacatcggccctccgtataggccaccccaaatgaggaggcgaggaagaccctttcacttttacatcttccgttgaaatctccgagctcgatctacttgaactagtctctccaaactcaacactcgaatcagtgagcgactcggttgctgcagcagcacccctacttttaccgctcaaaatttcaaacccatctttccgtttcagcaaattctcctttttcttagctaaaacttccatttcaactttcaaactggtttgaaacccagatggccaacaaaggtaatgagccagtgttacgactgaagcttttttttttatatatatagtcctagctacctctacaactactacaaaagttcattcatgggcatggccctcttaagctgagaatttcagataatgtatatgcaatgtctaagactctgtcaagacagtgaagcaggccaaggttcgaattggatttggggtatagaaaactctccgagaagtagggatctcttcgttgtgatactcttccatagaaatttattagctctgcattttaattttcaaaaaaaaaaaagaatatttttcaaaggtgagaagaggggaactgccaattgccacatgccatgctataacggctctcttctcccatacacagtttattttacgttcaaaattataataaaataagatagtagatgaggtggtacgatactccattcaaatttacaattttatccttctctaatattatttgtagatttataaaggagtttttctttttttggccttttattgtgttttgttgataatttttggttgctataaaagctaatacaaaactgtcaaaaaacataaaaaagataagaaaaaaaaggttaacaatgaaaaaaataaattgaatagtagagttacgttagtgtgctcttttaaatattgattcaatgcctagattgcatttggtatttccactactcaaataaatgagtggcactttgtgtagatttcttatactttttaaaataagt

SEQ ID NO: 187796 - DNA, 1986 bp, Cannabis indica
agaattggaactcagtgtgagtacttgtgttgaaagagcataaagttgagagaaaaattgaaggtgtgtgatttaacggtgtgaaccaaattgaaaattgttaacatacctaacaattttatagctcatgcacaccattaaactccaaatgaataatagaacaaaaccaggggattctcataaagcctgtcaaaataattgaagttccatctctagagaattgatattgtattacaaacagatttaaatatcaaatatacatacctcaattataatcaatctgagcagttatggggtaaaatttgacattgggtatgtgactaattttggttaaatctggaaacagtagacatttcaacatctgaaaaacttcactaaaaattccaatgagcatacatacatacatagcaaaacaaatcaaattgtgaatctcaatccataccacctatagattcttataaataatccatccacaaatctttccactctcagattctcagtatatagtatatacctgtcaaaaaacaaagtcagaaaatgtataagaatgccaaccatttatgtgaattggagttcaacatagatttttataatttctcaaatctttacactgaaaatacgtacctcaattaaatcatttgcagcagttgttgtgtggatgctaaattgtgacattgggaatgtgacaaatcttggtccagtactcctcattgccactctccttcgggtcatactttttcctcaccagaggacactcccttacatacaaagacacgagtgaagttggaaacccttcttctgacaatgtctgcaactcaggacagttggaaatatcaagtgtttgcaaggaggtgagttgtctaagcccatttttatccagacttttcagttttgaaaacatgaagatacgaagaaaggtaatagtgggaggcagcccttcctccggaaatgattctgtatcttcattgtaatttccaccaataaaaagattggtaagatggggtaatgtttgccagttctgcttcatcctcaaaagttcatcataagatatccaaagtgaaaacaaactagcaggcataccaccttcaggaaaagtctccatcaatgggcaatgaaatagtatcaaaagctttaaagatgagagcaaagccatcttctcaggtaaccacttcagtttaggacaattgctgattgtgaattcactcagcttgggagcaataagtccaccctttgggaaagatacaaaactacaacaactatctatctgtaaagatgacaaagatgttagttcctgaagagattttcccatctgacactgagagggcttcaaaatagtcacatattgtaatagtaagagttttgagattgggaaataaatccaattggagggatctaaatgatgatccacaatcttctaaccaaagagactgaagaggatggtaggtagaagtaggactcattggctttattgtttggtacaatgactctgaattttctacatttacaatttttatttctctaacacatggtaatcttgggagggttaatgcgaaatgataacatgttgatacctcttcagtttgcattgaatgccattgctcccatgataacatgttgctgaagcttaatgtttccaatgatgaaaatggctttctcccagaactattcccgtaaaactcagcacccactgtcactaccgaattgaatcctgagatgcaaagatgttttagcaaaggcaactgcccaagtggtggtaaattggagcaatgcggacacccacgtagacttactttaacaatgttgctaaacgattcatttccaacccaatatggaaactttttgcccgggtaatgaagaatcttgagctccttcaacgttgtgttaggtgtaagcatttcaagcacactctttccatgctctggatcaattgatctatttaaaaaactccattccaaactcaatctctcaagtttcttcttatccaat

SEQ ID NO: 187797 - DNA, 3877 bp, Cannabis indica
ttttttcagtttagtgtctacaagaaattagatgattttagaaggtaatgggttgttctctgtttgcagcatgggaggcctagttgtcaagcaaatgctgtataaagcgaagacagagaatttcgataaccttgtcaataacaccattggagttgtaagctttacctaaatcaccactaaaatcttatttctttggtcgcaattctttcgttactaagattttgtatgtaaatggtatctctggtttcagatattctacagctgcccacacttcggaagcaaacttgcagatatgccatggagaatgggtctggttttgcgccctgcaccgagtgtgagtattcgttctcatcaactagctgtgtttggtcccctttctttaaaattgataacatttagtacttgttatttctcagattggggagctaagaagtggatctgcaaaattagtagagcttaacgactttactcgacatcttcacaaaaaggggctgcttgaagttctcagcttctgcgaggtaagtcttaaagcgactcacttgcatgttttctcagttttctttgtcagctttgattgatatgtatttcggaatgttttcacagaccaaagtaactccgatcgtagaaggctacggtggatgggcttttcgtatggaaatagtaccaatcgaatcagcatatcctggattcggtgaactagttgtaagtataaataaacttataataaagtctgtatcttggattatagttgcttctaatttattatgacattttcggagtaggttttggagtcaacagatcatataaattcttgtaaaccggtcagccgttccgatccttcgtacacagaaacattagagttcttgaagaagctgaaggaccgctacacaccaccaccaccgaaactggacagatgatcttgacatgaactcggtacagtacgccatgtagattagattcgaaagacggggttggtcgaaatcttgattattaaaaccaaagaagaaagattattgagtacattaacacaccagagcagattattttactttagttcctctaatatctttcactattgttttcgttgtaaataatggctaagggcagtgagtttgaggagatttgtgtatactcaaatgattcaaaaaaagaaaatagaaagaagtaattatattatggctggaatctttatcttatgttctattttgtttgtgaaataaataaaacattataaattaaaagaatataatttaaaggcatgcactttatttacattattttattttatttttattaaaagaaagaagaaaaaaagacttaaaattacacatgaaaaacttgataaatatagaataattgaagaagaggttcaatgagaatgagaatatgactcttaaaaaaactcaaatttagaaaatgacactgttttctttacattatcattatattgaaaaattatataattactcaaatcttaaattctaatatgttaacatactcacgagtaaccaagttttcaagtaaaattactttacctaggaaaatatagtctcaaaatcattatgcatggtttaataatttttcttagaactaaaagagctatgtaagtagtgaagttctataacagttaatcttactaaaataacaacattgtatacaaatgtatctatatctataaatataaatatagatattaaaacatgtaaaataatgtagcttaattaattatgtgctctcttgaaatgaatgagagcgagaaattgcagctggatttgcttcaaggacaggagaagaagaatatagtacattatcctttccttctattttactatgtgctaattttttgtaaacagaattttctttctcaaattcaaaccctaaaccgccttgaatttgattcttcgaagcctcactcgatgccaaaacaccctcctcggattcttctctagagtgtttgccaagagcaggcaaaaccgaaacatttccccgtgcttgagctgcagcccaaataggcatacaaccccagtacgaggctgcttgtacaaattggatcggaacagttgttggaacagacaaaatcggcgcttcaagccattgaacctggcttgaatcgctgggatttgacactacaaattgttgatgagaatgttgtgttggatcccatgacacaacaggataacattgttgaggaggatgagaccgtgcagcgtgctgctcggtcacatttccttccaacggtgaatcatcaccattatgacaaaatgtcaagacttttccatttgatggctcatcactactactagtgatgcgcgcgccttccccagacgccattatctgacgaaactgggaggctaagtgtttgttctttcgccgtcccgcccctataggaacattcctcatcgagccgccagctgtccaatatctctggcaatttttacaaaaatgtctaggttgattgacattgtagttgttgaagtaacaaaattttgtctccatacttttgcatcttggacatggaattatcttatctggtttcttaaacactttttgatcttgttcttctgaattggtttcaacagagctctctatctttgatttggttatatgatcacttttacaatcctgaaaaaattcaattgaaaaaaacttcaaattttcatatatatattttctttctatgaaatattcatatcaaataattgaaagtacaatccaaaattatattattcaaataatttctttctatgaaattatttatttttaacattggttttatatatcaaagaaaacaaagaactcagaaaaatgatatatttacacatacaaacacaaaaaatgaaaataattttttttaaaaatatgaaaaacaaataccttgaattgaggattggttggaatttgattatgtgataagggaattgttcttccaaagagcttaataccttgatgatgatgatgatgatgatccttactactaatacaattttgatcactaatattcttaatttgagacataattaacaaccaaatttatttccacacaaaactcaaattcacatctccaaaaacccataaccaaaaccaaactaaaattataggaaacaaaaataaatgtttcaaaggaaaaaactctttataacaacacttataaaagtactcaacaaaaagaaaagtcatacatacatatcctaagccaaaaaaaaaagcactatcaacgtgaaagcatatcaaaagtttgataacacaattaattattcaaaattttcttcttttttttcaaaaagaaaaaaaaacaagcctttttccatatctctttttttctaacttttaaaagtcactttttttttgctttttttcttttcttttgtctttatctttttccttttttgggttgaacgttgttgatctctcatttgtttaattggagggatcaaaagaagaaaggttgatggggttgtgccacgtggcagacaagtcagcagaggaaatgaattataaccaagagatgtcttattgtaatattaatggctaagaaaagataaaaagatagagacatgaaattaaaggaagtgaggaaaagaaaaagtgaggtgagaaaatgaccttttgtttttggtttatgggaccctttaaaagaaagtaaaagaaaagagaaaaaggtgatgaggaacttgggtggaaagtgaccaaaaaaaggaaaagaaagaaaaaagaaagaaagaaaaaaaggtttctcttgctttccttaagccgccttcaatggctcttttctttttgttgttccaccatttgtgcttttaacttctcaatcctttacttagctaaaaattttatggagtaactattggtaggggcattatggacattatttgaaaaa

SEQ ID NO: 187798 - DNA, 5242 bp, Cannabis indica
gcattatcaagatctaaacctgttctttccttcaatttggttaaccacaaccttccacactatgattgagtacttgacttgatatgagtggacatagtactctatcactaaaggcttagaaattgatgaagaacaaggagaggaattcgaaatactaaggaaagaggctctcttttactagttgtttgacaaaaaataaaaactagcttatgtgaaatggatgagaatgagagcagcttattccttttagagtatttcaattagggtttagaatttatattatatggattaaaaaagataaaataataggcaaaaatcactaagtggccggcccacacaagttgaattccactagttacaattttgtcactttatttcataattcatattttctttcaataatgtcatattttccaatttcaatcttataaatgtcagaactatttatttaataattataattaatatcaagccaaactcgaaagaaatcatcgtttcacttttaaatacttatagaagctacagattccatatctatgattagcgctcccacttaattgtactattatgttcccaagatgtaagtattggcccgaaccaattggttagctttaacgaacaactctaagaacataaataacacagttgagatcgaacctaaccatatcaggattaagatctatagacctaagatcaactaactaatgttgacttagatagatataacggtaagtttatgatatctcatctaagttcaatattggtctagttcgatgtacactccatacatctgatcctagcatactttgtcaatatcttggaaatgacataacacttatccaaggtgtaagtaaactttatcgttgattatcatgtcagtctaaattcagtgtactaacaaatcatgggacatatactttgaaacatataagcatgattatattccattgtgttgacaacactataatcatgaataactatatattctggatttaataaaatttatacattaagcatataataataaaataaatcatgtgaaccatgcaacataaaatgatttctaatcttttattaattagtaaatctgattatattgaaatgggttttatttagggcataaaatcccaacacctccatcaattgaatatgtttccagaagaccgtagttcctaagctaatttggcctttggtctatttcccagatagaatcattgagaactaaaggaattgaagacacaaagtgggtgcccttacgatatcgcttggatcgaatggatttggaaggtctctcatctagaatggggtctttgaggtccccctctgcaggaggtacttctatgggaaatgtcttaggaatctcttcaagattcactaagaccgactggaaattgctgccttcaccaaacactaaaaaattagtaggaaagtccaagcactcaataccctacatccaaatgacaaatatggtacctagggaagccaccccaagactgctaggagaggtcccctctggaatcgtcaccaccaaggtcactaccttcaagtatcttgctatggtaacgaatcaggaacccaacatacaacaacaacaacaacaaagcccaaattctctcttctacagatgaagcaaaacgagtacgcataataaatcaagaagggcgtactcaaagagattactgataactcaaaaatatttagcctaattctctgaaccaaaaaatcctaaataacaagcatgcatctcaaaccaaacataaaggaaaatacctcttcaaagccccaaccccaaaggtgttccctaatgaatcaggcaagctaattctagacacaaataaccctaattcctaaaattaaaccctacgcatgaaaagtggcagattccctcaaatacgaggactatatttcaattaagccttggaaaaaatagtttaaaagctgaggaatacttacttgtaatacggattaagaaatggagatgacggttgtgccactagaattttgctgcttggttggagacggtggctctcctagctccgacagtaggatggctcgagatgacgacgtgcatcaaggaaatacaacgacgaagttgggaaagtaggggttgaggttggttcaaagaggtgtgagagggctaaaatttttgggcaaaaggtttgtttgagaagagtttttctttgggcgaaaggttgttggtaaagtaaggaaagaaaatagtttcaatcaccaaaaaccccatttatatgggtggcaacggttggaatgtttttaaaatgcatggtctagatcgaattgattgagggctaaatcattcaacggttggggatacgaaatattgacatttgatgtgtctaaaggaagagaataaagtgtttattactcatcatttcgtggcagcttccccaatatacctaaggccagacgtctttccaaaaccagccatcatttgtttccactgagaaatgcgcctaaaatgcagagtgtgagtttcacaactccattgaccaagcaccacgcttcaacgagtcatcaataatatcgcctaacttgtaggtacctaacgtgctacgaaagatcccttccacctcctgatggttggtccgcgagttagatacatgaaacgaacatccgagggaaggctgcaagctcccaatactctcaagtcctgagagcttaggggtaaatggtatccctattcccggatgtgttttacatggaagtaatggaaaggtgccgcgttggattaaatattgatatcataaaccttcccctaaacaaggttatggaaggtgttgaaatactcagaagaatgcttctccagcgaaggctgacgtgattatggagattctcatcttatgcttccgctattgggagtgaatgggagtcacatatgctctaggatgatagcggattggctgatccaggaagaccttagccaaacctcctgaaactccgtaaggcctaatctggagctaagcccgttggttacatatcttctgacaccaaatcatattctgtcccatgcgtcagaccatggttgtgcacgtacgtgcctctatagtgcttattgtccaacgacttgtctaggcaatggcttagacaaggagaaacctttgagccacacgtgttaagaccctaacgagatatcttgtgttgatcgagcaccacacgatgggaaaactacttaccaaaccaacagtcagatggtcttgttgtgtttttggccctttttgcgtgttgagtaaggaaccctaggtaagtaaagggtatgccctcactcacatgtgtacctacaaatatctttattttttatgtagagagagtgaacaatttttatttacaaaacctctactaagattcttagagagttttcttctttgagagaaataaaaggaatacaaagttaccattgtaaacacttgtaatacttaaacactcgcctgcaaggctaatacaaagaactcgtggactaaagattgttaacgctcgaaccacgtaaaaaaatccatttgtttatcatttattgttttatattttccttaaacctctaattaatcagttttaaaaaatctcgataaacagtatatatatcaaactgaaagtaaaagatgaaaagattgtttacctcttgaagcctatcaaataatttagagtgtagtcgaacgatatcattctgtataaaacatatcgtatacatagactgttttatcctaaggacgtcgtgattgctagactgtcgtacacacttcggggcagaaccacaaaatatcttaaaaaaaaaaaacaactaagtcagaattttctatcagtaactcattccagctttattattttaaattcggtataacagtatattacataatttttaactaatgttttatagtaatttcactatatgacaatttattttgaaataagcacctaatcatttgtatgcccttaaatgaagcccacggatcaactctttttcacatctatggctatgaatgaatgacacctttgtaaaacacaactagattcaaaagagtcatttagtaataaaagaaaaccaaccaagtcaatcaagataaatcttaacatcaattccattatcgataagagattgaacaacagccctgatcttcccttcaaacttgtccctgtctcttggagtgtaagacgcagtatagacatcagcttctcttgccctctcagccaaaatactcccaacggccaaacatgcaggtatgtctgatctggacctgagaaccgcttttatgtccttagagttcgtgccagcaactgcaacctgcctacttgtcaccctgtgagtaagggaagctgtcacaaatcgcttcgagattagcacatcgagtgtaaatggttccatgtacgcctctgtacgttgtttgaatgatacatgtttctgtggattttttgacttcttctccttcttgtaagtgtacggtcggctgttgttgtcatcaaggaaatcttctaccccaaaaaagcttcttggtgcagaatgaaccttcatcattgaaaagttagaaaacttggtgtgataggaagaaactatttttactacatatcaaatgaacatctaggactgcagccagttagaaattttggctcttaacaaacacaataacaaaagaatatgtccaacaaatcatgaagatgaaacgaaatcagacgagggataacagtacacttagaagaagataacaaggagcaaacagaaaaccaacccaaaatgccattaaataacagtcttgatggaaactgcaaaacatttatacgaaaaacatctaaacacacttttgggaagacgagtatatcactgcctttgggaagtctgacagacatttatatgatcaccatcactgctttttcactactctaagaggaagaataagcgaaaatttaatgcatcagatacaagatggcaaaaaatttcttatcagatgacatcccaatcacaaaactcaaactaaaactagaattccacaaatgcttttctttctcaattatcaaattcaggcaccacaactcacgagtgtataacactataaaaaaaacgtcatgaccacaccacatcattctttctagcttgcaactatttattggaagttcaaatcaagtaacgaagaacataaatatcctccactaccaatttcctagtgtagtgccaaaactgacaatagaagctgtgatgttagtctgattacaaaaactccagaaaataataagaatctag

SEQ ID NO: 187799 - DNA, 2532 bp, Cannabis indica
ctcccagcctatatcctcatcctccgatggttccccagataaagatcatcagaacgaaaaccagaccaacggaacgtcttcagagcctgttattagccgagaacaggatcagaaagaaactgtggtggaggaccttctcaatatactctattttgggtctctttttgatgttaaatctcagagtgacttcacttcaaccatgcttaccaggacccacgagcgcggttgttgcttgacttatgattatgtcactgacgatgctactgatctgcttggcgagagagatttggacctgatttccaaactcggtgggcttttgatctctcgccccgtcgattcgagtttgtcccacaagaatgctctgcagcgttgccttgagcacgccaagctttggttgaccaagtcggaccagctcattgagcccagtgctaatattacctgtaaatatcgttttttcttttaatctgtttattagtatggaatagatgatttcgttggctaaaactgtttgtttgtttgtcagatgcggagttgagggagaggctgagcaagattatggcttcagactacttgaccactacgcctgagatgaaagctcccgtagaagttgctgcaggaaattatgcctcctttcaggtgcctgttcaggattccatctcatcgatcccggtggaagcatcggtttcgcagttccaacaggtttaactcagtttgttctgtattggattaaatgttgtctgggtctgctgtctttcatacgaatgatactttagtattactattagatgatgtagtaaactttgcttttgcattttttgtcttacctataaatgtattacatgcttgctaaccaatggtttgcttgcttgtcgctgcattactcttgcacggcgtgcaatcacataaatatttcagtattattagttgacctataaatattttatcttgctggctagcctggtgctacttaagtttacataagaacagctataacccatgaggggtagctcaaatgatcagagttctgggagttcccacaatgtcaaaggtttgagtgcctcctgtgtacctactcaacaattggtaggttgctgacttgttatagcttccaagtccctaagtatagattaggcgggggatccagtttaaaataaatataagaacaactatcataagtttgagagcactcttaatttctagaaactagtaatgtcaggatagaataaaatagttgatttgtcccctgcagacatgagccggagagtgagtgtgaatatctcgaagaagtaggagagctagtttggggacggtcatagataatagtatgaaggcaaatagcaatccttgacgtgaacctttttcattcttctgtgtagaacttcaacattacatttccctttgtggaaattagtgttgctacttttggttgagaatggttagtataatattcaataggggtatgttactgttttaatctgccagtgtgccacatggaatactgtcaagtaagatgtattatctttattagttagtttggaactttgatgtaatgcgtttctgtttaaagcaatctgttttttttctttgtttggcatgcattaactcaagtgtcattttctctgcttcttttagtagctattattgtgggcaaagtttttcccagggatccctaacatttatttgcttggtataaattatatctatgtaggttttttaggtgggcattggattttcctataaacaatattgcaaatagcaatccttaggaaagtttaatcctgaacaattgtttgaaggcatgtgctgttgtagagtgaagatgagaaaacaacaacacttcaataatgtaaaggttttttcttgggtctgttaaccaaggattcttaatattcagtgttttttctcacttcgatactccacgcaattgtctaaactctgagttaaaaaaatgtaaaataatcaatttgttggagaattggataaaattgaaattaaacgaatggaaaagaaagtagtgatacactggttgatgagaaattataatggaccgaaatgtagttatgttatcactcaaaaaaactggagtgggaagaaaaacacaaggacctttctctactagtaaaatttgactttgtagctattacattttatctattttgaataggttatattagcaaagtattgacattgaagttgttaagattttagttgtttacagtttttaatacccccttggggtttacaacttttagtggatgcaactttagttttttatggaattcgaggggtaaaaaaaagactgaactgtcaaacaagtgaaccaaaagggattaatggcacaaattttcttttctttcaaataatgggttccaacaaaatttggatagaatgtacaaaaatgactaaggtctgccgatgcagtgaaagtgtagatcaatatgccaaataggtaaatttgtatacatcctttttaaaaataaatggttaggcatgaggtctgcttccaccgtgtctgaggtttgagtccctctt

SEQ ID NO: 187800 - DNA, 1860 bp, Cannabis indica
caaccaatcctaatagaagttatggacatagaagtcaaaaaaagtgttgtcctcaagtaaagttttaggagttctgtcttgacggcagtaaaataataatagataatatgaaagagctccttcgtttttgagtggaacttgacttgacaacttaaccaacaattaagttgcgtaactaattttaattatatacaaacttcattctagacgcctacaacgtctcatgatttctttatttccaaaacctgtcaactactaaaatttcttacggccagcctagcttttctacttttacaccataatgaaaaagttacattgtgttaagcagaaaaaaaaaaaacgtttataatgagaccaaataacattgaggcaagtgagtgtattgttttgtagagataaaagtagaaaaatcaagtaacttattcattttgattttaattgcatgaccaatccacacatataatatatatgggacacaagttaaccaaatcccatgtcctagaaattatatcaaaaacctcaaacactcatacaatgaacttatcaagcatcagcatgtgacaatgacatcccatctacgttatttgagcaatcacgtgcttaatccaacaaacaatacatttctctcttcaagcctatatatactattaagtttaccttgaccaataggtgttggactgtacaaaaaaaacggttgtttccattgaccaacaacccttggacttggtttctctatttaatattattattcttcgctaagaatgtttctttattgatgaataagaaaaattgcggtcctcaaagaaaaaaggagcttgttaacaaaagaaacagggaaaaactaaacaaatctacacagttattttccaaggaagaataattaaagaaaacgtgtctgttgtcatgcacaaggttgaatttaatttatggaaaagctatcaaactaaaatcttatacgactaggtgggaaggaaggataattctaagatttctcaatgtttctctctttacaaatgaccattttctttttttcgtaatcattgtaacttgtagaaattcaaaatggaacactaagagaaaggttagccatacaaacaagatataatgaatatagaaataggtaacagttaacttgttaaataacacagcaataccaaaaaaaaagagggattccttcatattatgcctaggtcatgacagttgattccataccagactttatgacatgtggtgtcacgtggttgtacttacacacaagatgaagatagagaggaccaatttctaatttaatgtcagcatatagcatcttacagcaatgggatatacaaggtcctttatggtaataagcaataatgcaaataaacaaacaaacaaacagtcccaaccactcgaatcaactaatatagtaaagaagaggaagacaaaaggaataagaatagacatacatctctagctccagttggtcaagcctaatttgtcagcaaggttgtacattactagttgatcccacacagggccaaacaggtgcgttcctccaattgaaaatgtgagggcccatgaagagagaagggttgtaaacactgtgaacccaattgcagatctcacaacatctacaaaagcgattaaatgttagaccgactagcaatgctcaatggaagaaatcttcttttgatacataactagctgcgccacacagatggacttcatgctcatgggatcaatccaaagtactaacactgaaacagagtgaattaactaaacagtcaattcgtcatctaatattgtgacattcaaaatcctaaatcacatgttcccataaaaaataggaaattgaaaaacattatcaaccaaaaaaaaaaa

SEQ ID NO: 187801 - DNA, 3464 bp, Cannabis indica
tgcctgtttggtaccgagctcttgattttcctattaaactgattttctgctagagatttgaagtgtgtgaaggcttttaatgcatctgattttaccttaagaggatacagccatgtgtacctgctatagtcatcaatgaaatgaatatagtattttaggttggtatttgacattatgggtgctggtccccaaatgtcagtgtgaatgatgtctaacattcctttggctctagaatctgacagtttgaaaggaagagaatgagatttcccaaattgacatgcttcacaaaataactgtttttcattcattgaagtttttacatgtgcattagacaacacttgatttaagactctagaagaagggtggccaagcctcctatgccacaaatccttctgactagtacaagattgactaaaagacaaattgacattagttatagcagaaaaaggactcaagacttgactggaatctgaaaactctctactggactgaggtaagttggttgtggcagaaaaggctgatgaactaacttgagatgaaggaagagaagcttgatcaatctgatacaaaccatctttaagtttcccctgcagcaccactctctttgttgctagatccttcacaagacaaaaatcagagtagaattcaacataaattttgttatcagaagtgagtttagacacactaatcaaattttttgtaatttgaggaacatgaagtacatcttttaacaccaagtgactgttactagtggtatgaagtaaaccagatccagtatgagaaatgttaagttgattaccattaccaatggtcagtttctctttacctccataactggttctgtgtgtcatatttccagcatcagatgttatgtgattactagcaccactgtctgcataccatccttcatgatccacaacatctggagtagcaataaaggcagcagggtctttcttttccttgttctgatctccaccaggtgctgtccccataaaactttcatcgtacctattgtaacaataggctgcagaatggccatatctcccacagacttgacaagttggtttagagtttctgcctcctctaccatttccacgaccagcacctcctctagaatgagtaccagaaccatttcctcttccatagcctcttcctgggttgtgattgttgttgttggaattctgcttgtgagcaaaatgagcagaaggtccagatctagaagaagaacctgaaccagaggtattgggattcttgctgtttccatttgttggaaccacttgaagtcttccaagttttctatcaaaactaagaagaacttcttgaagctcctgccaacttatagattctctggcttcaagaatacaggttatgggaaggtattcaaggtcaagaccacgaagaacattggagactaagtgatgttcagggtaaggatcccctgctaaggctagcatgtcagcccaagacctcttatgttgaaggtaatctaccatagatgtacttcccttgcgaacagtttgaaggttgtctctgagttcatccattcttgcctttgaatgagctccaaacagcttttccaaggcaagccatagccctcttgcagagttacaccccataacttctgttgctatggattctgtcatagatccatacaaccagcccatgagtagttgatcacagatgatccatcgctcatactcagggttcacacgaacttgaacaccagacagaccttcaccagaagcaactccagctggtatatactctagtggagcctgtttcactccactgatgtagccatccaacctatgtcctctgataatggtagaaaccatagttttccaaagagtacagttattacgatcaagtttaaaggcaaagggttgtgaaagagtattagcgaatggggtatgagtgatgcctcctgttgcaggataaaaaccatactgagaacctccattttgaccaagaggggagctgatttgataagggtttttgtaccccttgtgtttgctgagtttcgaacccagcttgttgtccagtagcaacattgacaccaggctgctgacctatggcagcattgttttgatcattctgatcagtaccagacgacatggaagcgtgagaaggtattgctctgataccaagataagaaagaccttttcacagaaaaggaaaaatggaaaactcagctcagaaagagagactgacgaatatacatttatatagacaaacccttacacaattctgttatacaaaggggaccacacaacctttacacaaacgtaccaaaaggtaataacagaaaaagaataaacgtgccattggcacaactgtacaaggttatttcccaacaaataaaacaatcaggattaacaatagaaaaacagggttaacagactaaattgcagattatagtttcttaacaggatacaataataaattttgtcactcttaaattaaaaagtatattataataaatgggtaaatatatgtttataaatatattaagtaataaataagtatttctatttataaaaaaacttaaacacttataaattaaattttttaatgcttcaattaattattataataaccgcgtacgttaactagtttagtataagtgccttccacttagctttctactactatcaggtatatatataaaaaatttctcaaaaaatgtactaaatagagtacaacacttaaaaaataaagagtagtgttgtataataataataatacttaatggttcttctatgcctctatatatatatacaatccacagttaaaaattagagttaacaaaacttcagtgtactatctaattaattctcagaatttgattttgcgaggcacatttggaatcaagaattgtggctgttggttgtgcgaagattcaagtacgcgttagttcttgtttatgttgatttttagttctgataagcatgcatgttgaattgaaggaagatcatgtttcggtttaatattaatatcattatatttattttttatttcttatcttaattatttaaattataactaattaggcaagattgagatattcaatttcaatcacccatgacaaaataaagtgaatgtaagactacttatttatagcttagaaatacaacatacacaccatctacaaaccatgtgggacttttgctaaaagaaaaaaaaatcacaaaattatactaaattcactaattctaataaaatagataaaataggtgaaaaaaattataagatgcctccttacctactttattataatacaattataataaataatattatgtaaatgattttgaaacttaattgtactataaacctttttatatgcatctctaaaaatatttttaaaaaatataataaaagtgataaagtatatatatatatattgtttttaaaaaaacatatatattgttgttacactatatattgtattatttttctaacta

SEQ ID NO: 187802 - DNA, 3169 bp, Cannabis indica
aatattttatattttatcatagcgaattctataatttttatgaaaattttgaagtccactgaatattaaaatgagcgtgattattagagtatctccaattagagtattaaataggaggtgtattgttattttttagtacttttcaataaaaaaaattcttcaatagtgtgtatgtaactatgtattatgtctaatttggccgacaataaatattattttttaattatacttttatcattattcattaataatatattttatttataatattgctattagtaattttttaaatatttaatttattatttgttattaatgatattttattttttagaccaatttacttcttaaaatgttattgtgtcataatatttgtttatttttgtgctaaatttagtacaatatttacattttatattggagatgattttagtcatcatagtgactagtgtcacaatgaggtgtcgccctttgttagcgattttttataatcattaagacttaatattaaattacactaataacaatataatactatgaatgcattttatttatttctagcttcatcgtattattattaggcactacactttctacaagtggcgttctacaattagttaacaaaatttctttaaaactattcacacctaaaagaatgttaggcaagggtagtcacttttatcatttctctatatatatataaataaaatttatttataatttctccatctaccaaaaaacaaaagtgatgttccaatttttgttaatagggtaggtttaatggcgactatatatgtatatatttatcaacttttatcaatttctctttttaatttttttgttcataaaaaagaaaaatggaatatgcatggccccttgttgatattttatttgttatgttcttcttcctatcctaactgattttattttgatttttatttatgagtttattattgctttttcttaacaaaatgtccttttttttgttctcatctcagcaaaacatagagttaaattataagctgcaggtcattcaagctgagctagaatcaacaaaaatggaaatggttaagaaagaggagtacctgaaagacttactcgaactcttaaaatcaacaatgaaggaaagagatgaaacaatgtatgagttgcactacttagagtctatgatgctgaaatgtattaatgatcaacctcctcaacctcaaaataacagtcctatctcaacaatgcctgatgccaaaaccaactcagactcaagcattatatcagaatcaccaaatcatttttctgctgatgagacttacctaaattattctcatcagggctcttattctccacaactctccaacaacatggctgaatattcaagccagattgatttgggttctgatgtgattgagaatctttcccaaggaaaacctctgcctctgcaaggaaaactattgcaggctgtttcggatgctggtacagtacttcctcaaaatcttcttccaactcggcggaaccgcccgcctccctcgcagcccttccaaattctgcctgaaggtgccggtgccggtgaaggttcgtcatggtataataattagaggaataatgattgtgagttgtgacacacactgaacaatgaagtgtaatgttattaattattattatttttcctttggttagtggcttaaaaatggtctcagaatgtatgttcttatgcttcaacaaccaaaaaaaataaatgttctttttcatttttacaattttaaacattttttttacattttttatggaattctatatcgaaatttatattgcaactagcgctgcaacctcgtaacaaaagatcgtatagaaattcctattgcaactagcgctgtaatcactttaaaagtccaaatcgtaaatttaagaaaaaattaaaaaatagtatatagggtaattccaaaaaaaaaaaaattacttattacaaaactgatctcttatagcatacatttttattcaagattattgactacagtgatcattttaatagcattttcattttgaaaaaatgaccaaatactcatcaaaagacaataatgctcacatcactcaattaagtaacctcgttttctatctataaggctaaaactaataaaactgatataacaagtatttaaaaacttcaattcaatttctccttgaaaacatatcataatatcaatctttaactaccatataaggcgaaagatcgaacaaagcaagcagaagcggtgacaactagagcggcaaagactgtagggacaatgagatctattttggatctctttaccatatgggatgggaagcatatgacctccgttaatggatcgctaaatggtattcttaccaatccctttgaattacaagacttggaaaacgacgacgatggtgatatggccataacgaatgcaaactccggtgcaaatgaggccaccgccaccgttaccgttaacataatcgtccacgttgttgcgtaaagaaggattatccgccgagttatgattccttccaatactgatcgtaatggagtcatgaagaattatttttgtttagttttgagaatttttgtttggttggaaaacaggtagtgtttataaaacaggggaagtttaaaacagggcaagtgaaattacgaaaatgcccctctctattctcttgctatgattcaataatgattattggacacactttgtctgctgactcagtctatcgtttaatcctgagactcagtcttcaaaagaaatatattctacttcttttcctaaaaaaaaaaaaagaaacatattctacttggaccaagaaacatatggggatatataaaaattttgcaatagacttggtatttaatatgaggatcaataaatgaatgtatgtgtcctaattgattcaattcacacaaataagagaaagagtaatgctaaaggacactagtggcacctaacacatttttatgatttaatatcgttattggtcctactaaatattgggttccatataatttaatataataatttttaagaaatattgctaaacaatcacaatgcaagaaggtgtcagacaccactagtatttaatagcaatactaagaaatatcatacaacaaaaatacaagtggatatgaaaagtgaggatttattgagtgaaaaagcaattatat

SEQ ID NO: 187803 - DNA, 4707 bp, Cannabis indica
tctaacgatgaaaattaacttcttacagctcaaattcgtaactcccttggggtaaaatttgtagtcaatagcttcagatttgtaaatgaagtcttagacatgacttgatggagcattgatatagcttcaaacacaagttgaattgtgtcaatcagatcaatatttagtgagttatgaccattttattgaaggttattttaggcccagcatccagattgtccagcgcccaggttgaccacctggacgctgggtgagtaagaaaatgcgccagggatgtatcttttgatgtctaagtgatattttgacatcacatagtccatttttgtgttctagcaaagttagtcaccagttctcgaagatgttgttattttgcagaaacgagagactcaaaactatccagtttacaagtaattcaccttgtcggaaaagtaaaaaatatgaagttgtgaatttgactcttttgaattcatagctcttatttattatgaaaaactagatgagtggttaagacagaatcagaatcgaataagcagaacctagtgcaccaggccacatgtcaacctgggtgctgagtgattatttcgaagcttccaggatgatgttttaatgcttccaaggttctagaacttgaggatgaggtctcttgccccgtttttgaccattttggagagaattctcaaagccaaattggcatttgaatgatcaaaaccagcgtaccaggttaattgtcaacctgggcattgggcataactttgatgcccttggacttgtggttttcttctcgagtttgcctgtatcttcattatttatgatgaccaaaaaaatacctagaacactttttggaaaaactgattggaaatagcccaggttgacaatatgtcaacatgggtgctaggcctagtggcaagtgtcaacttgggcactagatccagtttcaggccatctggaaattccgtttgatccccgaaaatagttgaatcttaatctttgatgaagaaagagaatattctcggaagaattttcagaaaaattcctctgaattagtccaggttgacagggcgttaggccagccccaagtgtcaacctgggcgctggtcccttgttttggcacccaggatgggctatttcttccccaaaagaacttgtttccccatttttgatgaagacgaagaagttgcacaagtcaatttttcaatcttatacttggaagtggcccaggttgacagtttgtcaacctaagtgttggagtgtccgggtgctcaaaaatgaaagttctccgaatttgattctgatgcctcaaatatgtctgtggtatgtctagttcatgtctcaatgcaaagtttgatccatttgcactaagacgggcccaaaaactaaaaccctagttggggttgttaacttgggtgctgggtgaaaccctagatgtctaagttgatttttgaggtgttcattcgtgtattttcagctctcgtggcctggccttggatgcttcatgtcttcatggtacagaatactaaaagatagtgagttggaaacgacttatcggagactcctctcaggtcgaccactatgattcgggactactcaactccgagatattatctttcttgccagatatcaaatattggtgtccacgtcatgagaaaaaaaatttcaagttaacaacttccattattgaaactccaaatcttaaatcctgagaccttaaaacactcttcagcgtctattttaccttcatttcaaagtgtcatttcaatcctaaaatccataaatcactcttatataccacaaattattcttttcataataaaaacacacaccaaagctagtttattctaactttttcaaaatctaattttcataaaagccaatgtaatgtttagtttttctctaccaaaaacaactgggatcaaatcatttaactctttttcatgtcaaatattttgtttccatcctaatttagttcctttcaccaaaaattgatgaatagtcaagtggtgtttataagtgtcgttttaagggtattcatggtcgttttggtgtgtgttgtcgatgataagacaaataaaccccagacccaaagtaaaggtcgacttttccatattccaccagaattagaaagaaacaacagaaacacaaccaaacgagaaaatctcagatagaagagagaagagagaaagagagagaagaaagagagtgagaggaccgccgtgcgcgaggacgaagatgctccggaaatgtggagggagatcggagacagagaagagggcaaaactcgcccaaattggttcgcgaatcgcattaagtggaaccgcgttgagaagctcaaattatccaatcacaaagatatcgtctcagctcatagaggttctatcaattctcttcaggtaaactttcactgcacatcaatcttttattttcaaataaagaacattctgttgatgcccagctcttttgaattttgaatcatgaaaccaggtcgatttgactgagggccgatacttgttgtctggttcttctgatgcttcagctgccgtttacgatatccaacgtcctaccgagtttgaaggaggtggagttatagctaagcataagtgtttattcgtggttgacaagagccatgaaaatggtcataagtatgctgtttcctccgccatatggtatcctgtggacacaggtttgttcatcactggttctttcgaccatcatattaacgtttgggatacaaacacaacgcaggtagtcaatacttttaagatgcccggaaaggtttataagactgccatgtcttctttatcaacatcccacatgttgattgctgctggaactgaagatgttcaagttcgtctctgtgatattgcttcaggggcatttgctcatacactttccggtcaccgtggtatgcttaattcgtttcactttctttcactgttcccttattcatattgtaattccattgctccatttgggtttttgttaagttagaatgttttgctagttgtattaaactcatgtgatatgttacttgatccacttaataaggtgagagcttgagttaggctcaataactctcctaatatagtatagagcgggttcagttttgcaattttggttgggtgcccttaatatcgatttgttcacagttgtttggcatggtccatgctgtgggttcgatccacttaattaggtgaggaaatcctctcttaacaagccgcttttgttaggttgagttagcccaataactttaattttcacctttcttcgactgtttccgtactttgttatttactcacataataaaatggaaaagattagttcaaagtttatgataatgaaaccctattgcaggttcaccaactaagctagtagttttgtgaattatattctttttatagcttctgaaattctctgtatctatcaaacttatgtttaactatattaattcttgcattcatgagcggattatattatttttaactgtagatggtgtgatgacggtggaatggtctacttcaagtgagtgggttttggttaccggggggtgcgatggtgcaatacgtttttgggacatcagacgtgccggatgttttcttgttttagaccagtcccaatctcagctggggagacgcccaccgattctggaacgatctgctgctaataaggtgttcattctctcatatttctctgagtaggttaggaataaccttttagcactggagaaaaatttatggcctttttcacaatgttcttgcttatatcattgttttaatgttagtatttgctgctttttgttaagtattagctctaatttcaattttgagagatgtgctcaaagaatataaaatcagtttattaatagtaactaaagaagcaaatattcataatgttttttgtaattttttaaggtttctacatcaaagtctgccatagtcccaagttcgtcagtaaaaagccgagcagcacaaaagaaagccgccaatggttatagtatgaaactgtcacctattaataaaatttctgcaaaaggaccattaaggcagagattacatccagggatgttgtcaactcaggatcgtgccactgctcattacggtgctgttactggattaaaagttactgaagatggcatgtatcttctgagtgcaggttgggttttgttcactttagtagcgctcaacatacataccgatattagtgtgttaacttttaactattatttgatatgatttaggtgtttccagtgctggtttggaggaatggctttaatagatccatctagctaaatttttcttgttaattttatggaatggaatatgaagttgaatttagaataaataagatttttacccccacatttaatgttgggaggtgaaaatcctaattattcttcattttttttttttataattatttattcttcaatttaatacctttttaaacacttgtattacttcatttcacttgtagtttcatgttcaaatatctaataccttgttcccgaaggatgcaaaaatatagaatatcaagtgatatcgtaggcaaagtatatggtttgtttgattgtttcacagtgtgaactaaacatgcactcatctgagtcggaaatgcaaactgcagaagattttggtttggataatggcatttccgatggtgaaatttttacatctgtgctgcttatagaacccattattaaaccatactttttag

SEQ ID NO: 187804 - DNA, 2229 bp, Cannabis indica
gaagaatttgaagcaaaatggttcgatgtcatcgataggattcaactaacagataatgagtagtgccaaacaacatttgacacaaagaaacaatgggcaaaacttatttaaggggctcattcgtcgcaaccataaatatgacagtctaataatgacttcaaaagcaaatgcacgcgacctcacctacttaatcgtaaatgcttgaccacgtactataactaatgtgttgaattctacacaagaagtatgtatcataaggttgttgagcagcttgatctggaaataattattttgtcataggtcaagtggtcgaaggagagtagcagatattcaatattagaaagtttcaacatcccaaagtaaagtgccaagttcattactctgaaggccaaagagctctacaatgtagttgcatgctatatgaaagttaagagtactctatgagctacaatgaaaagattaaacattaggagaattccttatactcttctcatgaagcgatagaacaaaaccggaaagacaaatctccacctacactttaaccagccatcgccaccacaacaacacatttatgagatggctaggtttggatctcttacttcactaactcataacatggctttccataaagcaaaattagagactacctacacccatgcaaaggaagaaattaaacgactaacactaatgctcaaggaagaatttgagttgagctccaattcaaaagaagaaatgccacaacttggaagatatcgtaacaaccccaacattatttaagaactcaaagctgtgagaaccaaaggcacaaaaaatacaagagaatgaccaatttccaaaaaacttaagacagtgttgtatttgtcgctcatccacccataattgtactgttaactactactatttacagaacttttttataccttttgattttttaattaaaaaataaatattaaaatgggtcaaaaaaacctaaaataaccgcttaaaaactcgaatttttttcttaattttttttagccgatggaacaaccccaattcatataatataaaaatgagagattttttaattagaaaaaaaaaactaagcataaaactcaaattttcataatattacccataaaactcatgaataggtgaattaagagttcacatatatatctatacaataaacccacccacccacacaagttagtagttagtaatcgaagttgaattttgtacatatctctacagcctaacacctctagctttttttttctttttttttttttttttcttaatctttctttctttctatcctaatagaatagaaggggaaaaggactaacataattatctctttttttaaagtaaaaaaataaatcttcttaattagctgttgatattttttcgttcttaacattcgaaccaatgtacagcaataagacaaaatcaactcttttctcaatgtgttacccaatcatgagaagagcaacatacacgtttagtcaagaattttgattgagattctcatgttcggacccactctttaggccatctttgtaaacattaacgtcactctccactgctgactcaaaagaaaaactccacacagaagcacagttttcttccgctacataaaacataacaacaaaaacatcattagaaaacgaagaccaggcaaacaaatgagcttgctctgctccaagagaaagaagaatcagacatatcatatcatgaacaaaacatatcatttggattaccacccaaatgcagatcatcatcctcgctgccatcaccgggaacaacaaatctacggtgccctgatgaagaggcagccattggcaaaaatggatgaaacgagaagccactgacagtatctgaagtgtggcacatacaaaagttagaataggaagtgtaagtcatctctagtttaatgtttccacatcctagaagaccagagtatacctaatgcagcttggaagctcgatacccattgcccggttttaagatcatatatatgaacagtaccatcctgaaatcgaaacattaacttaatacaagaaacaatggagtattgatttgcttagggaaacttgcaatcatctcatttggtttcaattatcatctaaaattatgctcagcatatgccttgcagcagtcaagggaacaaatcaacatattagaaacaccaacgtcttaatgtgacatggctttgcactgtttcaaatttggatgggtgcaccatgc

SEQ ID NO: 187805 - DNA, 1533 bp, Cannabis indica
ccctagaagggggacaacaatatcgatccaattgagagttcgactaagtacatatatatctgaccgaaaccaaatattgaactataaccacatttctcatataacaacattcattattagagatgcagattctctatcaattattttttatatctgtacatatatatatgtgtatgcatacactcagtatgtttcaataactcaacttattatgttcatatatatggtccgacgactgtcataattttaaaatgagatcaagctatgtctctggcacaatttcggtacgatcgatgaatattttttctttatttatgtataaaatcacacgaaatatatagctaatttttcaagtacgataatataactagttttcttataagtaatattatgcatagtacaataaaaataagattttagtttttgaacaaaaaataatactatttatagttgagaaaactaataaaacactaattaatttccgatcactacgtaccatactagatctccttaattacccaaaactttaagttacatgaaaaagattgcctactaattaattactgtttttaggaacaaaaatgaaacctacaggctacaaccgagagtaaagaaaattaattaagtgatggtgatcatcgatcaaaagagaaattaacatgataaaccagacatatgtttatatatgtatacattgattcattatagatattgatcaagttgattaggttgatcaatattatatatatatatgccgtgtccatgtcattttgcattaatcattttcagtggtttcactccaattcttaatcgacatcataacggcttgcttcacagcttcagcatccatactgctttcaccttctacattctataaacgtacacatttatacattagtgttagtatgtatgaagagagaatgagagagttacatcatcaagtatataatttgaattagattaaaataaaagagcaatttaattgtgtatattattatagtattaatgcatgcagtagtagtatagtagaagtaataatacatatatagtagtacttacttctcctcctactgcttgtaagtggaaactgtcagcacaggaaaccctagcttcaagcacgttaagacccagatcttcaaaagcttccaaaacggccacaagcaaacctgggcaactcttttccgaaagcacatttatcataaaccctttatctagggttttcaccgagacctgctaattaatattatttatttaattaataacatatagcaatgtagattattgatctgtaataactaaaataggctaaataattattgaaacttgaaagtgctatttatatataccacaggcaatgcattaaaatcgtcatgatcacttgaagatgtaatttgtgcattattttccatgtcttgattcaatctttggactttttcttttaagtcttcaatgtactttgacgcgtccactatgattgaggttttgttgagctgccacagtacacatgcaaagacatatatataattaataaat

SEQ ID NO: 187806 - DNA, 1726 bp, Cannabis indica
tatatatttatatatataagagaatccaacagaacttttatttttcttttaccatttcagagtagtttaaatcatatagatcctcatcatgggcccaatcttcaacgctgtactctggaggatatgaacgagagccattagaataaagccattggcccttctcaatcttccgacaattgggacattgcatagctccctttatgttaaatgctgaaccaatgcaatctgattgggagaaaagaagaataagaaaattaatcgtaagtgtaataagaataaagggaaattatatattgaaaatgaaatatctaatctaatatttaaaaaaaatggcaaatatttgtctataggtaaagatagcataggtgtcttcaaaattttagctcaaccctcaatccaaaaaaaactgagctagattgaagaaatatgtccaaaaacatctttcaattgcataataagatacatacatttgaaactataatacaatttttaagatttataccacaacatacatttacaattaatcaacacatactatttgaccatacttttggaagccgatcagaaatgatcagcttaatttatttagattcctatgagaacagtggcttctcaatacaagtgctctcaggaatataattatttgaagagcaggcacgggaatgaggttctgtagagctcgttcaactatcatatatagagttacagacctaggatcacagagtataatggggctgagtgcattattccttgtatttacttttcttacaatagctctttccatacctcttctgcacattgaaaatgttaaaattcgccaaaatcacaatctcacaaaccaatatgcatccaacaaacaacaaatttctcgaaattccacacccaatacaaaaactctcttgaactgcttcattcatttcatatctacgggtcttcataaacaaatccaaaccgtcataatctaatcaaattgtcaaaccaaatagaaaacatctgcaattcacagcataatatagcaacatgcaaaaatataattccaaaaactgatctagatagagcaattcatccaaaacatgactgttctaaattttaacagctagattagtacaaatacataagcaataaggaaaaaaaatgtaagtaagatgatgacaaataaagtccatttcgttcatatttctctcatatcctaatcgaccaagcaacccattataaaattataaaattcaaaagggtacatacatgcatgaacaatcaaaactgcaaccagatctcaacaattgtaatcaaaaggaaactgaattcccaccaaattaaaactctagtataaaatccaacgccgattataatatatagctcaccgagatgaaattgatgcccgcaatgaagcttagcccaagatcgatctccactttcggcgacgacctcgaggcaaatcgaacacgagacggagacaccacaggacttgccacatccaccagcagcgccacaaacaccatcgctatcatcagtggtaagatcatcatcgttccccaaccccataggagccccaaatcacgaaggtcaaaaccgtaatcgtctcaaaacgtattgttcaccaaaatcaggctaatcagcacagataacgtcaccgcgaaacgagagacagattgtctgattctctattgtaagaaacgaagctaagaaatttggaggagatgggtcgtttttaattttttaattattg

SEQ ID NO: 187807 - DNA, 4492 bp, Cannabis indica
aaaaaattttatttttacagtatattatagttataatgagatttattttttttatttgttttgtagtttatttataattaatttcttgttattttttaattttttactaaataatttatttttataattttaaaattttacaacaatatttttataattaaaaataaaacataaaaaaaaagtatttttaaaaatttcccattttaaatttctttaagcattttctcagtagaaatattttctccccattttctcatttaccaaacaactctttttattttcttcttcccaaccccaactttctctctaaattttgatttccctccactttctttcctaacaaacaaaaggttaaaccatagacgcagacgatgctcattgtggagaagcaaccaaagagagtgtactctagggaggctatggaggctttgaggtttgccgacatggatgaacacaggaagaagatgtggaaccatgtactaacggagctcaattctgacggcattcatatcttacgaatctctcagaatcataatgaaattcaaatcacctctgataatcagcagattggagaagatgatgagtctcctacaattctcggttagtactgaaaatatatatatatttatatatactgatttcaagcctatgaatgaaaattatgaaatgaaatttttgcttgtacctgtgatagtggatgaacttgttaatactcgtgggggagaaggaactaagaagatttactcaagggaggttatggaggcattgaggtttgttaacgcgaaggaaaagaggaaactatggaagagtgttttgattgggcttgatcctgttgtgcagaaggaatatgttaacctagctagctctaagaatcctaagaaaactggaaagaaggaagaatctcctccaattctcagtaagtagtagtgaattttgttttcttttttgtttgtttattaatgttttttttttactaaattaaattcttgggtggaatggattatggatatgtataaatgtttgattgaaattcttgcttctgtattctgtttattatggcatttgggttttagatgttatgaaagatatagcctatagggaatactttgatctttacatgtacctgtttgatgttgaatttatttgttatttatttattttgtgggctatttccaaacctagacaatattcccgaggctcattcgaaggacaagggcaatggattattgagtttggagataagtggaagtgatgctgcttgcagctctgtagttggggatggagacaaccatccaattgttgaaggagattacagtgaagatgatgatagtgatgaggattatgctagcattcagagacctgcatttgcggtccaaggagagcccaactttgattctggtcctccagaagatggacttgagtatcttaggcgtgtaaggtataatttactcctctcctgtcctttttcactgattgttgatattatagtgccctgacatcaacacttttattaatttagtaggagaagaattcccatttagaatccatacaaataaaagagaaatgttggattagagttaattagagtaggcattcccttgctgcactgatagaaatgattggattttggaatattctatgatctataagttaaatttcacagtaaaggataagccaagtatcaggtttggacatatattctaggaaacctaaacagtttgtactaagtatctgcttacatattgaagttcttattatttttcattttaaaaaaagcatgtattacagaaactttgaccatttttcttcagaggtttttgcatgaaaaataagatcaataccagttttgtataaaaaggttgagttttgtgatgtatataacatttaggatgatcttcacaactaattaaaacttaaaaggattttgtttgctctcatcgttgggtttgcaactcttgctggaagtttaacgataacatcattgcactagattaaaagtaatactaaccctgcatgcttatctttatataaagatagagaatatgaaataataagtgttctagctgacttttttgacctaggaaaggctaagatcatgacatctcttactcatgtttgtatcaacattgattagaaggggaaaattgcctcaacacttatacatcaaatatcatgttagcggctactgggtgcgggtgggtacaattctgttttagatgcatatcctagtttcaggttgcatctatagttgagaaatttgccaaactaacatgatctattatttattgtggtgactcaagttacgaaactagtttgaattcaaggttctctatccaaatctacaatattgtggtgagacgtaagccataaaaactaatatatagggtgcttataggagacttgtttgagctaccccaagacccattttgggttaggaaattccttaaattttggacatgttaagaaagataattctgtggttttttatgcatccaaatctttgtacatgaaacatgcctttttgttatctcactaactaaatatagttgtctgctgttttgtttagatacataaatgataacttgagtccagaccacttacacttacctgtcgaaccactatgtttagatacataaacgataacttgagtccaaaccacttacacacacttaactgtcgaatcacaatgtctagccacaaaatacccaagtattgttattctttagcaaagaaaaatgtactgtgtgctcctaagactcagctagtgcactgtcgagattcaagctaatgattttatcattgtttttagtggatcagtccatttttctgattgtgtttgttcaacagttacacttgttcaatactatatgttgattctgcccttcaaaaaggaacatttgcgtttatacccttccctatctcctgttgtttatgagtctgacttttttcctactctactaagtttatggctctttcccaataatctatccattgctccctcccagttctcataaagaatggcctggggacttttcatcttttaccacctggtttcttgctctctccctctcttgaaattcttgccaagagtttttctttttgcaagttagatgacctttatatctcttgcttttgtcactttgtttcagttaaaacttaaattaacacaatgttagtaaatcatataaattaccaatttagtaacacgttaaagctcacataccacaaacagtgttcttagggtcccttaaagggtatgcttgcccaagacgtgaaaagtttcataacctttataggctaaatcttaatgtatttctgctatattgaccaatcaattatgagttcggaggattatttcctaccacatgtacttgatacagttcagttcagtactcttcagccaccttttcatattttgactctccatatttctctaaatgcagttccatttctgtcacctgtgctctatattatttatgatgaatcaatacataagtttaaacagtgttctcagaaacagattctgagtatgtcactcttacccggtagtcacactgcagattctgttgctgataagttaattctatgctttttatttcttaatattttacatgctttaggttttgtgcccaatgcccatacacaatgttatgtaaactaatattacgtacatgatataagttctctcactttctcaggtgggaagcagcccggattccaaaaatcagagtagccaagcttgatagaagtaaattaaacaaagagcagagtgagtatatgcccaagattccagagattgcaaagtgtccagaacaattgttgcctatgaagcagtgggaagattcatttcttgatgatttttcacagcttaggctggtatgatccttgtaccttccttactattattgttaaagcgaaacagtttagttggtttgcacattgtcttgatgttggaagcctaaatagaaacttgactttgagactcttaactctcgattcaggatttgtctcatctcgaggattccagagatattgtatcagaaatttgtccacaacagcaacccgggggcattattttggcgagctttgaaaagtgcagaaccaaagtccagcctgaccagtctcatgattgtctcagctctgaaaatacagatgaattgttatccaacttatccactactgttgttgatggtgatgacgacgataataatgtatcatcagaatctgaaaaatcaacaccaaaatcagttgtaaatgaaaattgcaacaactacccattgttgtctgtaatattaaagatggattctgtagctcgagtggcgatgttgaagagaaggataagctctttcggtggaactaacacattcttgagggaagactgcttgtggctatttgcactgtgtgcagtaatcgacactccactagatgcagactctagtgcttcactgcgaagcctattgcgtaagagcgctaatctgttggccggaaagtc

SEQ ID NO: 187808 - DNA, 2502 bp, Cannabis indica
gttttttttttttcttttaactattttttcaggtaggctcagttgatgaggagtccacaaaatcagatgaagagtatgatgacctggcaatgcaggatatgatggaaaatgggtactggtcagaagatgaagaagaagccaaggataagattgttgtgcctgtttcaggggatcctttactgcggagacaacaaagggatcgtcgaaacatggatcaatttcaaagaactagaagcgatcccttgtctgaaccactgtgttcgtactcgtctctgctcagggagagaaatgaatcgagaatgtcatcttccgccaacagcaaaaccaggaaacggtccctcagtattccagctcttggaaagcatggttcagtcattagtggagccttgtttactggagctcctcaggagtcgggaccagcctaacaaataacaattttggtgtagattaattgtggttttccctttgttctaaaaataaaactgtttggggtagccatttggtttgtaaatcgttcagaatgcttgtgaaatcgtggtggctttgtagaattgcaaaagtttcagtttggttttgggcagcttttctttcgtgacacttaaaatttttagaaacataattaaagaaaccagaaaggcagacgagggaacaccaaactggagtaaaggtatttttgtacaatataccaactgcagcaagcgttccatataaaattatagagctaacaaaatcactatcgtaacgtaccataatggtacaagaaaatacattgtaaaaaactgaaaacttcgattcataaaacataaaaaaataatcacattttccttgtctaccggtcactcttctcggatggaacaaactcgggataaaagaaatctaccatcgactgaatacgcagtacttttcgaatttgatttaatttgggaatgtttatacaaattggtgttctccgacaatttggaaatatttctgtcctacttctccttgtgaaatcccttcaattgaaatatttagttcttttaggagatgaaaatagctccaaaaccattctcatcaaataatcaaattcctctcttcgcttcatatatcaagcatggaagtaaaactcgccaatttaggagccgcacccctcttgaccattacagtgaaaagcctcgtagcttccctagtttgattcatgttacacagccccgtcaatatcttattacagacagataattcagcttcaaaacctaccatttccataacaagtagcaactcataggcttctttaatcaatcctttgttgccaaaaccgtcaatcaatgtattgaacataagatcgtccacttcaattttctttttctggatatcttttaagtattccaatgacattcccatctccccgctgttgcaaaggccagatattacagcaaggtatgtatcataattacggactacatttttctcagccatttcatcaaacacccaacacacactttccgtacaacatgctctacagtacacatatattatcaaattgtacaaatgagtttctactttcattcctttatcatgcatccccttaaccaaactttaagcttctttgacttttccaatgctagtaaatccattgaccaaaattctatatgtgttgacattgaatctcaacccttctttttccatcaaccccaatatcaaatccaactccacaaagttggatctcttagaacaagcatccaagaccatatttaatgtaattgtactgagtgttattcctctactaaccatcgcctgcaccaactccctacttctcttaatctccccattccaacacaacccagcaaccacaacactcaaagaatactcagaaacattcacattcgatttaagcattcggtacaagaaatctaaactaagttccacctgatcagcttttttaagagttaaaagatgcacagtacaagtccttccatcaatgtcaatcccattattcttcatgtaatcaaaaacctccaaaacttgatcgaactttccactatcagagtacactttaagcatcacattaaacgatttggccttaattagggatgtttcgcacaaaatctctagcgtagaagtgatagcaggaaatgggtaccttgaattctcatcgattagtactgacctgaagagattctctgcttgtgagaaatttctcgcctcgacaagtctgcgaaagagggtcaaatgggcttgaaggtcaggtttaaatgagatcaaagactggtttttgataacgaagttgaagagtttcaagcaatttgagtcattgacataagggtctgacagaatgaggtgcagagttttgagatcgagattggatatggaagagaaagatgaggaggagatgggagtattggaacaaacgacatttaagatttctagaaatggttttggcgggtgaagcattttgaccgttttaagatttggaatgacttttcgaatcgacattgttttctagatcaaacaaatattgttcat

SEQ ID NO: 187809 - DNA, 2216 bp, Cannabis indica
ttatatagcaatacaaccgacttagactaactgtagaaataacagaaataacggaaaaataacagcctaactaactcactaactctaatatacactgatgcagcaacagattacaaaaggaaaaaaataagattgggagcagtagttaaagatgatcatgataatataattgcagggttggccgttccaatttcaggttgtttgattcaactcatgctgaagctttggctctcaactctgccttaagatggtgtttagcagtcaatcttcgagtttcaaaagtgttttcagattctaaaattcttgtcaataagataacaaattgtgatcataatctttctctctctgatttagtgagaaatatatatatgtaatcccttatcaaacttccccaaagtttcagttagctttatccctaggaataataatactgatgctcataggagttagtgtggaatggctctctttcaccttgattgtactgtaacttgtatcttcactgcttcttcaatgaaagttaaagtttttcaaaaaaataaaaaaaaataatgatcaggttctccccaactgcgttaatggtcactgttcagctatcggcatcaattggaaaaattgaaagtgatgtatgaatatgtaatgtaatcactcgccccttttctctattattgtctaaatttggtaactgccccttctcttacctattgatccagcaataaatgtcatctatatatatatatacttaatcaatagtaccgtttgttataagggaaacaataacccatttcgtgagatttacttactactttattcaagtaagaattgataaaaaggaaaaaataacactttttaataattaagtaaaattcatttcatattaaatgttatgtttttcctccaaaaaaaatatatattatgaactaatccgtagtactttattaccattctcgccgtttacataattaataataatgacctctaaatccttattaattattaaagtacaagagaaactatatagctagacatcatttcaaagttggcatgatatatttatgaatatatatatatatggacaatctgaatatattatcatagtaccattatttgtgccaattaatgctttcaaatcgatcactcacgagattgaagctcaaccatttttgtttgttacatatctagatctatctaaccgatataaatcttatgcaaattataatgtgctttgggttaattttgttttttcttttaagctgcgtgataccttgaaaattgttcagccaagtagaatttatagtttaattattcagttggaaaagaaaatgtgttagaaagacgaagctgcaggttaatcaaattggtcagagcgatattgaccatatttcattacatcaagaagctattttaagttgatcgggacagaatcttatgttagcaccgaagtagagatgaattgattaaggcagtacattattctgtccttacatttgtggtaattctttaataatgaaaaaaaaaaatgcccatccggcgatttattgctattagggatgcatatattttttttcatgggaatggcccgacccgtttttaatagggcggcaatttttcgtctaaatacaggatgggacggggacgagattatctttcgttttgaatgttaaacggggcacggacggggttcacattccctaccttaacgaggattcgtttagtattttattttacatttttaataatacttttataatttataatttatatttgcatttgttaagtatgttaatatctttttatgatttttaagtttgattttagataacaattagtttattcaataataattaatgtgtaatattttaatttttatgtattttaatatttttatatatttaacatttattataaactttatttattataaactttattttttttattagaggatttctcacccgtctccgccccgataaaaaatatgttaggatggagattaaaattcttaatgaaaatgggattggaggagtactctctactaattcttcgcctcgtgtacattttttaattgctatttatgtatatatatatatatatatttatatatacactagatgaatattacataccaagacacgtatgcttagtttattttagattatatatatatatatttttaaaaaatattatatgtaaatttatattaaatatatataaattta

SEQ ID NO: 187810 - DNA, 1440 bp, Cannabis indica
taattgattgtgaatgttgtgttctcttaatattaaagtcaaccataaacaaaattatcactccctaccacatccaccacagcaacaagtgtgtcctcttacccatcatttctctgccctcatcactcggttattatcacatcattataatatcttcacacaaacataattttgttatttattattattattatttttttttaaaagaaacccaaatatagacccaaaaagtaaacaaatattagttatatataatttttttaaaaaaacaagtatggcatgtggcaccatcgctcaccaaacttcctttttctcttatgttgtacataatagtctactattatgattggttaggtttggcacttaagctaagcaaaactactatacttattattacctcactcattgccatttcaagcatcaaatcccaactctctctctctctctcttcaatataatatagtatttgtgtatgtgacaaatcataaatagagtattatacacacacattgaattgtaataagtaatttttcttttgtattttccttacctatactaaatctagattatacatcattacttttttcttttctttttggtatgggcacaacatttcatttttaattattagtattctatatattgtgtgatgtttatttatgagagttcattaggtaatagagattattatcctttcaattatgcttgctaatatctttctgcgatgtgagtagaagaagtgaaaattatgttccgaaatggaaagaaaattagacacaaaatataagagtagcacacaatgacgaatggataattaaattttaataagacaaattaagtcttaagacttaaaattgaagaaaaatattataagtgtttagatgcgggataaattatttatttatttttaaaaaataggatataattaaaagtaaaaaatttaaaaaaaaaatgaatggacacaattgactggcctttttaggagaacacaataaatttcttatatttaaatatatttgtatgaaaatatatataataaaaatttagaagaccatgactatccaagtcttcttatcattgcttagtgtaatataaaagacatcttatagacacaaaatgtaccccctaacacacttcattccttattttatttttggagaaaaaaatggaaattttccccttaatgcacttcattccttctcttgataattacaatacaataataaaaaattaaaatgaaagtgatcttatttcaaatacttaatcaaccctatattatttagtaattttggtttaaatgtttttgcttaataatttggtttgctttgccaattaggctacattaatctcaaacaaacaaactagacagtgactcctaacgactcaagctggataaagacaatcgaatatgttttaattttttggaaaaaaaaaaagaaa

SEQ ID NO: 187811 - DNA, 2702 bp, Cannabis indica
taattttcatgaattttatatggtatcatgtgttgtttgtcatgagttttatgatattttatgaatttttttcttattgttgaagggtatgccttcccttgaggcatacgcctcgtgggactaagggaaaatgcctcagaacctgataccttgctcactacaatattttgcattacattttacatttgtgataatgccaacattttacattttgtttatagatcacgtgtaatgtatcatctcatttgcatcaccttatgagtattggtcttaccatgtgcgactattcatgctaaaacctacacttcgcaaatggctcattaaagatgtgtcctttaccttgaacatttttcattaacaaatggctcattaaaggcctcattggttttttatatttttttattaacaccaacaagagagattgatgcatatttttgattgttactttattttttccaatgtacgtaggtatgcatctgaatattttgctggaagaattgggattatcactccatacaagtgtcaactgtcattcttgcgttctcggttttcaaatgtttttggatcttctatcatagatgagatagaatttaatactgttgatggtttccaaggacgggaggttgacatactaatactttccaccgtaagagcagctgagacaaactctactgggcctgggattaactcaagcaatattggatttgttgctgatgtaagacgcatgaatgttgctttgacaagagccaaattttcactttggattattggtaatgcaaggacattgaagacaaacaaaaactgggccgctctcatcaaggatgccagtaagagaaatctagtcagaacagttaaagtcccctatcggaatatgtttaaaggacctctacaaaaaaatagtgcttcagagagctatgataaccctttgacagagctaaaatataatgaggctgataatgctggacagcatgtgaaaaaaagtaagagttcaaagagagagggtaaaatgagaactgatgatatatacaagggagctaagagcagagataatgggcgcggaaaagatttttcagctactcgagatgaaatgggaataaataaaaggagtggtagagagggacttaatgcatcggtgaaggattcatcctctctagctgcaatttgtaacaacaaatcttccgaggataagaagttcacaacaacaggggagcatgttgcaaatgatgagtttaaaggaaaagagagaagtgaaaagaaatttagattagagaactctcacaagggaaagagaaaaactaaactagaagattcaagggaaaatgtggaccaccctgaacaagatggcggagataaagttttgaaagcacaagtgcctaaaagacacaaaacattttctggcagtgatgcaagccgggggaatcaggaaggttcaattccctctgctgcaatcagccacaaggagagggatttaaatgatagaggaagagattcaaatcaagccggcccttcagatctaattgcaaaaaggaaaaagcagcgtgaagctgttgatgctattctttactcagctcttattccttcaaaaaagtctgagacttcagccaaaccacttccatctaaaagacattcctcctcgtcatcaacaccgagtgttgggatcaaaccatccaagaacagaaaagattaactaaaatctctgctttactgcttattaaggtttgttgaaacttttatcatgacaaaatagaatcgactataatgttatggttcatattttcataataatttatggtatatgttactgaattaatttaagcctgagttttacatcagaactagtacctgctaaaagaccccttaccctttctactttctttaggtgtcaaatcttaatgtgttctaatatagcacaatcagagttaggtatctgtgtaaatacaataatatacaaacaatgaataatccttaagagatttcagatacaccaaggaggacccggtataataagatttttattcaaaaaatgttgttcctgccaattgttagaggaattaagaaaatcttagcattatcagtttaaccatgttttcttatctggtttagcattgttgtcatctcataatcttttgttgtgtgttgtgttactccagcatttttgtcaagtacgtgtacaatcgaggaaatctgctgggacgttatttgaagattgtcttttgataaggtgaagcatttcatttgtgtatcgtataggtgataggctatatagctttgtatcttcaattttgtgtaaatcttggaatgtaaatagtataggtggtttggtctatgccatgcttagctcaaaaactttcttagaatagtaccaacttccaatatttatgtctttgcagcattcgcaagctaatgaccaaaccaattttgaaatgtgaaaacggattgagaacctgttttgactctaaaacttggagaaacagacataatttctaaacgttcccaataagattacctcatttgagaaaatatagaatcttgagaaagaagattaagaaacaacacattctctgcatctcgttgtacaaatgttattatagaaacgaataatctgaaactaatgaaggcatagagacaaatagcttggaacatgtttggccaggtatgtccttggaaaccaacagaaagtttgttaggggtgttcgcggtgc

SEQ ID NO: 187812 - DNA, 5738 bp, Cannabis indica
taattgatgatatatatgatgtttatggaacattggatgaattagagcttttcaccaaagctattgagaggttagtatatatacatatacatataaatttattaataataaataaatatttagacatatatcccatttagttaattactgtgtagtgtaataagagtttaattaagttgaggaatatttttttttctattagttaatcaaaaatagctacacattaatatatttctatttttacgagaaatgtacctaaaaaatcctcacataacttaatcaacctcaatgaatcgcattcgcaattcaatatattcagtgaataatgagaataagagcaagaaaaaaaaggtaaaaaattaaatactaacaaaagagagataaaaatgaaatgggtatacaatattaatacaattttcctctgtaataaatgtgtgcaatttgagtgcatatatggattagatccgtacttagggtccacactttttggaagccaaaataaaaaataaaatacatcattaggagtttatttaagtaaaaacaaagattcacagtttggttggtatggatattacacaatagtgtaggtttaagtcttataatacttttttttcaaatattttttcgaaagtgaggatcctaaaattttaaatggctttagactcatatattctcaagatcagtcctctttaagtgtgtataattttgtttatatgcagatgggatatggaaatgataaatgagttaccagaatatatgaagccttatattgttttacacaataccattaatgaaatggtatttgaggtattaagagaccaacacatctccatcaacattcaataccttaagaaaacggtaatgatcattatatatataatatatatatatatataaacttatttattatttatttcttattgttaattaaatgacatatagagaagcatgttaatgttaattaggtattaatacctaattaacttagctataataataagaagtatatgttttatatataattagcgtatttgtatatgtattgttgttcaacattaaaccctgaatcgattgacactcatacaaaatattgttaaattgtattaatagcaatataacaactttaaatatacaataaaataaatatgtactaaaagttattaataatactaaatgtcgatcgaatctaattacgtatttattgtgcagtgggtagatatgtgtagaggttttttacaagaggcaaaatggtactatagtggatatacaccaacactagaagaatatattaaaaatggttggatttcagtgggagcaccggttctaattgtgcatgctttatttttctcatgcaaattataatcacacagttacaagtagtaaagagattttcgaatgctttgaacatggttattatcccgccataattcgtcatagtgccataatattacgacttacaaatgacctagcaacatcatcggtaagctaataataattacaatatttattatacttttttgtacctattattaattacacgtatttttgaaatatatgtgttttgtaaaagagcattgctattaggtatcagtggtgcctagcacctttgcgacatgtcgcatttcgattggttagcgatactccttaaaagctattatattaaattatatgggacccgatacttggaccaatagcgatattgacacataggaaggtgctaggcactactggtaccctttagcatttctctttgtaaaattattgaaataaggtctttctatatccaaattttgtgaaaaaactaagaccatttttatttttgttattggagctggcttgttaattttttcttcttttaaagtggtaatcaaaatattttaaatttaatagtattcaaaaatattttagcaaaaactgaatctaagtacgagaggtacaacaagagtacaattttaaaaattacgtgatcttttttttttaatcgatgcaaaaatatgatcctttttcgaatagaaaactaagtaatatataattttatttatatatatttaactgaatattgttatacatatgtaggaggaactgaaaagaggtgatgctccgacatcaattcaatgttatatgcaagaaaaaaaagtatctgaggagaaagctcgtgaacatattaagtttttaataagtgaaatatggaaagagatgaataatgatgttggattatatccaatctcattgattgaagatgctacaaattttgctaagatgggatttttcatgtatcagcatggtgatggtcatagttctcaagataatcaatccaaacaaaaaatttcatccttgattattgaacctattcccttatatacataataataattagttaattaatcgtttggtgcacggtatattgtattgtattgtgttttgttggattgtattgtattatattagtattatttaatataaaactatattttgtattgacttgtactaataaattatgtaaaattataacttctttacaataaacttgaccccaaccccaataacgaactgaaatcaaacccgaactcggacctagaccccagacttagaacatgccccaaacccagacccgaacctgaactcaaatctagacctcaaaccctggccccggactcggacccatggacccaaacccagacttgaacccaaactaaacttggacccagggtcggccctgaaaatatatgggcccaagatgaattaaattttggggccctcaaaaatatataaaaaaaaatatcaaaagaagagtgttatggggtttgaacccatgaccttgaacattatgtcatccacctaattaaccaactaaactatgaatatttgttgcttataatacatttatattttacttaaataaaaacctaataattttttttatttttttattttgggcccccggaaagtgtgcgccctaggcatgggcctagcccacctatgcctagggccggccctgcttagacctgaacccaggactccaaacctaagacctagactcgaccatggccctaaaccctagacccgggacccgagacccaagacctaagacctagactcggccctgaccccaaccctaaaccctagacctaaaaccctaaacctagacccagaccctaaacccaaaactcaaacctgaacctgagccctagaccctagacctgatcgtattggaccccaaacttgagcccaaacccaaacccaaacccaaactccaaaccccaaacccgatctgggtctaagtttgggtccaggtctaggtcttggtctggggtctaggtcgaggtttgggtctgggtcaaggtctagggcccaggtttgggtccgggttcggggtttgggttggggtctgcgttcgggtttgggtctaggtcaggctacacgttaggtttaggcctaggtttggggtctgggttcaaggtctgggtaaggatctgaggtctaggtttgggtcggggttcagggtatgggtccagagtttggatctgagtcaggatttgaggtccaagctcaaggtttgggtttggggtcggggtccgagtcaaagttcgagttcgaggtctaggtcccagtcggggtccaagtttaggtttggggtctaggtccaagttcgggtccgaggttcgttactaggtctgggtccggggtccagggtctagagttcaggtctacggtccgggtctaaggtctatgtctcgatctgggtccagggtttgggtctgggacagttttatagaccacattgcaacaagcaacgggcctaaaatcactcacactatttgggcattttaccttgtgtatgagactcagagtggtagcattaacctctttgagtagattctcaaaattcagagtttcagagaactgttgtgatgacatcctctctaacaatgtgcccagttcaattagttttctgctagctttttgttcaactcaacagagttaaagctcatgtataaatgctcttgtattgcattgtttatcaatgagaaatgaatcttccaaatatatttgtttcgacatggtagagctctgaaattatttgagttatcattcgtctttcttattcttcttttttttacttcgattgccatggctagtcaatcctctactcacagagaactagtctctttcaagtattattctcttttatccaaacttgatgaaaacaaatttctatcctagaaacatcaaattcttacttctgttcgtggtcatcgtactcaatgattcttggaaccaaattttgctcctccaaattaagtttgatattgaagaagattatacaacaaatacaatctatcaaaactatgcaaattaggaggcacaagatccacttctccattatggatattgtcctccatgaatgattagatgaatgacaaggcatgaaaaccagatggttggatcacatttcaagagttcctcactgcttaaacaaatcgaagataactcaaattcgtaatactgagaaaaattcctcctctattaaagattacttattatagattaaatcaactgttgatctgctgaatgcaattagtcacaacattactatatgttagattatgtggagtccattttcaatggtcttggatctgaatatgacattttttacacttcttacaacattcataaagaaaagttcaccatttaagagcttgaaactcttttaatgactcaagaagcacgaaattgacaaaactgtaaaggatcttgatacatcctttgcagaagtgaactttgctcacaatggatccaatcctccttttggtaatggtgaagaggttttccaaatcacaaaggaggctatagtggaagctctacattttacactggacaacaatctcagggtagatacaattctccaagggatccttatggaggctttaacactcgtactatttatgaattttttcgtaatattagtttattttattattaattttttgttaataaaatgtacttgttatattttaacaggggtaaattttttggattgagaaatagtaagtctccaagtcttcaaaaataagtttattttttaactttgagcaaccattattttttgctaattagttttatttttatcatcatcaattttcgtgtgcttattctcacttttatattagtatttttgtggttgtatatatttctttgttttgaagctttttgcatatagagatatatatttttaatttagattgttcattttagttgagattctaaggtgacatttttttaatcaagaagttttcaaagatcaatttttttacatgttaaattttatttcttgtaaataataataatagtttgggcatttttataatataaatttttcataacattttgttgtttgatgtgttaattctactcttatttatttattttgtaggtttgcttaaattgattctgtagaccggatgccatttttgggtagtcttaaattgttttgcttaaatttttgtagtaacttagttttattcaagttgcttttttttcatttttttggagtgattcatattttgactttaaatatatcttagctaaacaattgacttattgactggaaactctttgcgtctacgttttgtactcaaatcactctatcaatatatatatatatagtactattttttaatgggtattacccattgataattattaaacaaattaaactataatattaattttaaaaa

SEQ ID NO: 187813 - DNA, 1723 bp, Cannabis indica
tctctctctctctctcgctttctctttcagattgtttatatgtggcttgtgatgaccttccttttgatttttttttttctttctgtctctgtgtccaaatcgcactgtttggtagaggggaaaatgtaggaaagtgaagaaaaaaaagtagttagtttatttctgatgaatagaaataaagtgagatctggaaaaccaggcatgaactcactcacccaagttaaatacttacttaatttgtacttggttagttgagttcaacagttcaatatgttatagttatgccgtgaacttcaaaatgttgatttttctttctttctatttcctctcatttttctcacgagagtttcgaattgtgtattaatatctccgaatgcctttctccgtgattttctttttctttcaaacacattttactgatgaaatcagtgttattaatgtcctgaattgatatattctaatcacatttgctattcattttgatgttttagagattatttctttcaccaacagtcgagaaacaacgatcaagattgttcaagccaacatatattctttcttaaaacaaataaaaataataatttgtacttttgagagatattcatgtttagaataagctctattgttagtgttgcgggtacatgtatgtttagtgccttttttttttttaatccttgcggattcttgaatgtctatatatgtaagaaactgaacctttttattgttatttgatcagaaaaaacaaaagactattaaatacattagatggagcaatacgacgtgctggagcaaattgggaaaggggcttttggttctgcccttcttgttaggcataagcacgaaaagaagaagtgagaatgagttctgcattgttctttctgctacttttatactgtttttgtaattctataatgcatcagttgaggactgatatatttttatgtgcttgctgtattactaaaggtatgtgctgaaaaagattcgccttgctcgccagactgaaaggtctcgaagatctgctcatcaagaggttggtattggttctcgtgtctcagcaatggatatacacttggttatttcattttccactcattgtctatccctttgttaaaaactaatctttactgtctacttagaagcaaacaggtaaggagggtaacaaggaataactgttaagcgtgaatcttaactggtatttatgattacaattcttctgagcaacatttaactgttttcgtggttcgtgtagatggagctcatatctaaattgcgaaatccattcattgtagagtacaaagattcgtgggtagaaaaggtacaaggggtgtctgttgtttatttctgtaattttttttgtgccacattgtgctgttgtttaattggctgcattctgtataaagcccctgctttctgtttcttgttctaggaggaaatctgtttagtttatagtagttatgctttttatatttttttggtctaattttttgtggactaaaactgtttacgttgttcaccttgttgtcagggttgctatgtatgcattattataggctactgtgaaggaggagacatgtaagtacaagctttgatgagtggattgatatttctgccttgaaaattttcataacctgttatttcttgcattttttttatcatacagggcagaagctattaagaagaccaacggaatcctttttcctgaagaggtttctaaatcttatct

SEQ ID NO: 187814 - DNA, 4603 bp, Cannabis indica
catattctttcgatgtgggacttgagttgataccccaacataatctattctgacaattaaaaaaaattgaaatgacttcattagttttagttttcttttttccaaaaaaatttaatgattcatcaaatttagaaaagaatagaagagttatagttaattaactaatttgtggcaactattgtacaccattattgagtggtgcaagtataattattgagtaaagagcattaaagttagagccaaaaagatacaatcaattatgatgtgatagccaaccaattggtgttacacaaaaaggttaatggtagtcaatttatattatggtttttgttcttttcagctctaacaaatttcaatggcacaccttcatagcataaccacacttatctttatttcaaaaagtattttgtaaagaacaaaccctttattgaaacttgtcaaatcaatactcaataccactttgtgtatttatacaaatacaaaaattgtaagaactactaaaaaaaatgaagtctttcatatatagtagtatacaagctggtgattggtaatgatggtgttactatggatacaaatcacaatactaaaagagtgtatataccaatataaacctatgagattgttaatcaacaaaattcacagctacccaaaaagaaaaaaagaattgagtagaaattacaaagctatacataaaccacactaagtgattttctcttgtgcttatggcccccaaagttcactctcatactacaacaaaagaagtaaaagatttcgaaataaactactattgatcatcattatgagtgttttcttcaatcattaatgttattcaaagctctaaatagttattaactcctaagaatttccttcggtttctgctatcgaaggatctgtttgcgcttggcgaacaaactgtcccttgactcggggacgttgctcagcgagtttctttctgctctcgtaacggacctggaatagacatgaattcgttagaaaaatgaagaacacttaaaaaaagtaatgaaattgagaatggtaataatgttataccttcttttcaaagcatctatctttcctcttcattcgaaattttgtaagagctgcttctctttgaatggctcggtgagaattcccgctgttattaaagtaactttcatcattcttgttctcggaaacagttctaatcatggcagtctgatcaacattgctattacttccacaagcacttccatacccaatactattaagatgacttgcatttccattacacaaactactactagcgctttgatcggttgtaggagagatacgcccacgatcttcgaaaaaatccaatttatgttcttgatttagcaaggattgatctttggcgatgctgttgtttcgacaaaggccatttgactgctcagatttgttcttttcaggagtcgtttggtaaaacgcattgattagcaatgaagattcttgttgggcaaccgagcttggactgatcccggaggaagaacctgattgtgaacagaaccctgaaggtactactacagaaccatagcctgccactggattattaacccttacacctttcacaggaatcggtagaggaaataatctcggttgaggggaatgagttgcaacttcagaatggttagattgacctgtagccaatgtaatatgacttttcggtgagctttttgagggaccgagggggggtatcagagttaaaactaagtccagcagcaaaaccgaacatatgcttttcggtgtttgatccgcctttctttatcttgatcgcatacaccggctgatgtagggtttgtgggctgcaacggtttattgatgtatctgcatgaataatcaccgaaatgtagcaaatacaagttaagaaagataatccaattgatgaaactttccatatcatcatgacatatctcactggtcaaaaagtgagatgatcgaaatagaactcaccgtgtaaaggccgaaccattagaatgaccaaggttgtgcctcttctcaaccatatggctctcaaagtcaccagaacttgatctcaaggtaagatccaatttcggaccagaatcaaacttgctagttccattactagatgaacaattttgataattgcaattttgattttcatcgaaagctccattcaaatcaatggtgcctctagaatgattgaacaggaatttattgttctcacaagcctcactagacataatagcatccctcctactaatactttctggcttggaacacttgcctggtgaaatttcggtttcaccatcctgatagattcccatcattgaacctatttcgattgtgacaccgttagattcttgaacactgattcaagaataatacttaaaaaaaagttgtaatattattcacctcttgcatcatttccatgcatgaatctctgtcctgtattgatgtgcccttcactcttctgtgttctcgagtcacttggaaaagactcgccccgtgttggctgtgagcattcctgcatctgatcgacgtggacattctcaacctccatttctggccttgtacaagagctctgcaggagacagcaaacatgcagtctctatatgaaacctagactggaaggaaattccttttttaagaattaatactaacatattcctcggcgaagaacatactctatatcgcttatgaccagtctaaatttattctaaactaaaaccgttcattaatatcttcaacattgagatactagcaattacatttctgtcaaacaataaaggttacaaattctttggaggctcatacagaaaatatgagatacctgagaatcgctccctttatcgatgttttcttcatttctttgaatggaaggaatatagccattggattgattggttgcagggtcattttcagaagtggcttcacccttattttgtgcaacaccttcatatcgaagaccatttctcgaggcctaatagaatcacgaaacaaacaaaattagaacattgtaagaacaagacaataatattcgatacaacacgaaatcttaaaagcctgtgcttacagattttcttctccaaacatgttgccatagattactcagttcattccttctaataggcttaacaagataatcagcagcacctctcatcatgcatctgtaaactataccgatcgaatcttgtgaagacatcactgcaaagatccacaaaatacataagtacatgaaaatcgaaaaacactaaacacttaacaaatacatcatttttccatatttgaaaaacatacttataacaggaatgtttttgcaaacatcatgttccatgattaaggtaagtaaccgaaaaccggatactgatggaagatccacttctgtcaatataagatctatgttatggggtcttcctttcagtaattcccatgcttttaagccatcagccacagcagcaactgcccaaaccaaagaaaacattttcagttactaatcataataaacagcataaacataaggaagctaagccattagaaaacaaccccctcaattcacttgggctttgtttggatctcagattctaaatttgattcacatattcttgtttcatttttttaaaaccctaaaatctgagttctaaatagagtaaaagtcaaaccatatccttccttcaattggtttttttttttccaatttacaacaaacattaaagcaacaaaaacatgaaatttcaccccaattacataaacttgaccaaaaacacaaaattggaagaaaccccatttcaattttgcaaaccccctaaaaaaaacataaaagcaaaatcaaattaaaagaaacacaatacaacatacatacctctatagctacattttctgagaagagcagtaataatctgccttgttgaatcatcagcttcaaccaacaaaaccctcatcatcattctgggcaaaaatctttcccaggtagtaatagctccacttgagctacacccatctttcatcttaatctccacaacttcatcatcatcaccatcatcacaatcatcaccacaatcattatcaattttattattattctccatttcttccatcttcttcttcctccttttctcaacttcactatctcctttcactgcccaatcctcactactactcaaaacagcctcccccatcttcaaattctctctctaaatctgtaaaaatccagtctttttcttcctaaaccgaaaaatccagtcttgaattgttgataagctgggaaaagcttgaggaagaaagctcagaaaaaaaacttagagttgtgggagttgtaaatagaaaactatatttggtagatatttttatgcagtacctcgcttttcaatttgaggtgtgagatgtctcaattcaatttgagctgttagattggattctaattgtgaaaaagttaaatcccatggatcataattgtgcaaaggtaaagtttttaagaaaataggtaaccgattcaattgtttgaagtgatgtacttattttctttaggaaaatgctaaaaatatataccaatagtgtttggttggtaccactcaaaatattatatcattatattttgattaaatgatatcattgttggtgtaatgtaatt

SEQ ID NO: 187815 - DNA, 3614 bp, Cannabis indica
tatatatatatattaataatatctttataaaaataattcacttgcaggtaaaaaagaagagttatgtataatagaatcacctactatatatattactcctattcctactatttgtttgaatggtagaaaacaaatcacacataagggatcaaagtattaatcaaataagaaaagaaactaaatataataacaaactatacatataatataatagttagtagtagtagctagcaacgatacatatttctacatatctacacttcatattacatgtttatgaaatgagacacttatatgcaagctagtaaacattatagacttgttatatcattcaaaaattcatgactaaactgcatttgggatttaatgaatttaatttttgaagctaattaatatagtatataaattaatatatttttaaaagtatactaattcaattcaaatattgtttatataaagtgaaaatgatgttgagttgtaaatacatgatagaaatataccaaaaaaatggtccgacatggtagtcattataaaactttgggacttagcaataataatatataacccaagagataaagacatgaatggctagtaatcaatattggttaggctagggtttggcaaatgattgagttacttatttcaaaatggcaccaataataaagcattgtatatatgcctaaccactattggtcctttgttgagaaaggaatcaattaagtcattcatgtatatatatttaagataattatgtttaaagttgtggaacggaatttttttgaataattagaaactcaacatatatatatatatatataattattatatatgaattctacaatggggttttggaatttagtaataaacaattcaatattgttagtttggctggaatgaaaatgaaaggaataatataatctgtagtttacatattatatagctcagcatgatatcgatcaggaccattcgtaatatcagtgccatgtaaaaaaaaagaagttttatcatataaaatagctggctttatttgtgtctattcatgatattttcaactaattagttcattcttagtaattgttcatcgatataatgatcaaaataattaagtacttatccaaaaccacaaacaatattaattaattaattaattaattaactcataataaataaataaatagttccatgtgtgtttttactgaaaaaatagcaaataaatatacagttacttattttcgaattgatttttttctttttttcctttagggtttttgtccgtgcattaattactaattttcgtctttgtttttcaagtcaactttatagtactctcttgtcaatttagtagtccagcttaattattggtgtataatctcttatgcataattgataatattggtgtatctaattaataattaactaaacaagttctgttcataataattaactaaaacattaattgtttttcaattatatattatctgattattataaaataagaaaagaaagaaaaaataaatagattacaaatgctttacacactacacagtcacacctggaacagagtcgaccacacacagttctatatgcaccttccagatcattctcttaagacatgtcaccattccacaatcatcttttttttttcctttttatttcttttttttaggtcgactgttcctttattttcttactctattttgttttttcttttcaaaatagtgctcaattgcttatagcgctttattccaagcaacaaaattatatattattatgttattatttaataataataataatagtaataaattaaagattttccgcgtaactatatactttgaattaattaattaattaattccgtcattgcatgcaaatgcaacccccaaactctcttggctataaataggaacaccatgcatctaagtttagacacaccaactacaactacagtttcaattagctttgattttgaaacgacatatatatataaatatatatatatatatatatccatggctctctccaaggttttgatcatttcacttctcttttctcttcttgttctcaatatcgtggaagctgatgatactactgtaagttattattaattaattaattaatgttcccctcattatatacataacatcacatatatatatttttattgtcgtttcatctatatatacatataagctgtgtatttatgtacgtagctctgtctttcatcatcaatttaattaatttttatgtactattactatataaaaataaaaaactgcaggcaatcggggatgtagcagagggttctcttaagaagaaaagtatcggtatgcacatacatattatatatatatatgtaacatataacagctagtagttaatttcataaatttgagaattgttatcaatggagtcacatatatatatatatatattattaatagtgttttttaatttttacttatatgattttcgtacgtacagttgaataaatgaattattttgcagattgtggggggtcatgcgctgccaggtgtcggttatcgtcgagaccacggctatgcaagagggcttgcggtacttgctgtcaacgatgcaactgcgttccaccgggtactgccggtaaccttgaggtctgcccctgctatgccaatatgaccacccatggtggaagacgcaagtgcccttaattaataaaacgtatcaccaactccatccattatacatatacatatattatttgcatgatcttcatgataaatactatgtatatttgccataattattattaattaagttttatttaatattattgtattattaaataaataataaaagtacggaatatttgctttgtgtaaagctaataatatatatggatgtttaattattgtctcaatatttaagtataacgatcgaatatatatattttattttactattaatttctcactttttctttttttaatgtatttttttattagtatattattattatattgtagacgaataaacttgctggggatatattactttatattagataataactagaattaatgtggtatatatatcattatgtttcatttgaatgttattatataataaatgtgttccattaatcattagcattttatagacagaaccaaccagccaaccaaccaaaacaatttaagtgtttgatattttatcacttattaattaattataattagcagcatgaaagttatccattaataattagttgttatgaaatggtacaaggcacaattcacatgctttaattagccgcgagaaagagaccaaaacgattatgccaactaaacttataagtttaaagtttacacttgtgtatatataagactactaaaatgtgtttgattattgaatagatttataatacaatacaatttaattaatatcaaaatcttatatagtgtattatattataaattgcagtttgtgggacgtatgactatggggctatagcacacccacaaaaaaaaattatacttaaaaaagttagttgtttattttattttattggataattaagcatcaaaatagtgaaaaagcccccccacaatttatcaaattaaataaatttactaaaa

SEQ ID NO: 187816 - DNA, 2029 bp, Cannabis indica
tatatgattatatctatataataatatagataaaatcatattgtatagtgaaatgtacgtagtaatatatagtttaaagttttagttacttaattaattatacaatttagagaattatttattttaaataaaaaattatatatatataaataaaatagatgagggacaaagaaaaacaatttaatatttcgttagcgttgaaattattgtagttatgtttatccttagtgagtattaaatttaattaattataacaatatattttgttaatgcataaaaagctaaatttcaactttgaagccttaaataatgatttaattattctttttcttttgttttaggtattctttcttatctgattttttctttttggtgggttaaaacgttttaatttttctttttaataataattagttttgaaaaaaaaaggggtcttttggtttaattaaccatcctaactaaaaaggtagcaaaggttgataataatatatattattgttagtaaaaaggtatgaaattatacatatttttgaaaaaagcaaaagaagaaaaaagtagtaaaaaaaagttttaaactttataaaaaagttgatttttatatgatctaggagtttagaaaccctaaaaggaagaaattatttacaagcgtggcttgatgacataataaagtttcatttttgaaccctaaaaataatttaaaaaaaaaacaaaacaaaaagtgttgaaaagtcaaaaaagatgaaccattttttgactgtactatactttagctatatagtaaaagaaaaattatataatgtgtatgaaaggaattgaacaagtgattgttattgttttgacttagaaaaagatatgcatgaatttatttatttatttttatacatatttaaccacttacttatgtgatcataagctttggcagctttttctttgtcataattgtattattgtacacacaccaacaatttcatagaattttctttcacatctagtaaaaaacaaaacaataattatttacagattgatattatagattgatttataatttatttaattttctatatatatattttttaaaatgggtaaatatattttggagtttgtactttataaaagttattaattagacattttattttgttaaatgataaaatagacattgtattttttaaaatgataaaaataggactttacgcttaatatttgacaatttttttttaatatgaacaacttgaaaataattccttgcacaaacagatatagaaaatgtaaacgattttgtcataacaattttcgatcagattattattaaattttattttgacaaaaaatcagttcaagatcctatttgtactattttgaaaaatacatgatttattttgtcatttaacaaaataggaaaggtccaattaataatttttgtaaaacacaagatcaaaaatgatatttacccttaaaaaaattattcaacatttaaatcatttatgaagaaaacaaattagaagttgttggattggactaattatatatggagagataccaactttttattgactagcttgaaaataatataattatgaattaattaaccaaagattaattccctatttaaaaaaaaagtttaattaataattcaacccatattattatttttttagagagagaaatatttgttgtttagtgagaagaatgataattattaggagctaatcaatttctaaaatgtgttaaaagtttaaaatcacaaatgatcaatcaaagtctttttcccattagtttccaacttttaaaaaggtttaaagtttattttttctttttgaaaaaggaaaaagaagttgtagttctatagagaaccacgaaaaaaacgaataaaatgtttaataattatctttttgaagatggatagatttaattggtttaaactcaaaatttgaagcgtgttgaaaattgaaactataataagaacgacatctttagtttatatttgaaaataaacaccaaataattataccaatatatatatatatat

SEQ ID NO: 187817 - DNA, 6985 bp, Cannabis indica
gtggtatgagactcatccaaaatttcctgtttgataccattgtctgctggaacacaaaccctacctttataccacaataacccatttgatgaaattgagaaatcctttgctaactagcctcaaacttttctttatactctaataatgctggatcactttactgagtggtcttgatcctctctagcaatttagactgtaacttaatgttggctaatttcacatcacaaactcaatttctgctcttgtcatgtcctcaggcaatgtcggtgaaaccatcttcaatttgtaaacttgccttggacctctctcttttagagaatctgctaccacatttttttccaggatggtagaggatctcgcaatcatagtctttcactagttccaaccatcatcgctgtctcgtatttaaatctttctgagtgtaaaagtatttgaggcttttatgatccaggtaaatatcaccgctgccaactcaatatcatgtgtgggataccgctattcatactccttcatttcctagatgcataagattactagattgcatcaaaacgcaacataacctttgtttcgaatcatcacaataaattctgaatttctcatcaataattggaaaagtcagtattggtacaataatcaatgattaatctctggttcaactcatggaagctactttcacacttatcaatccaaataaacttatagttgttctcggttaactctgttaagggtgtagaaatcttagcaaacccttccacaaatcttctgtagtatcctgctaaccccatgaaacttctaacttcagtatcctgcctcaatctttactaagtccaccagaattccatcttcattctcaacatgccctaagaaatttacttggggcaaccaaaattcataattcttaaacttagcataaagttcatgctcccgaaggcgttgtaacaccatccaaagatgtttttcatgtgcctcttccaaattagagtagatcaagatgtcatcaatgaagacaatcatgaagtcatccaaaaattatttgaacactcgattcatcaagtccataaaagtcattggggcattagttaattcgaaggacatcactaggaattcatagttcccatactgggtacgaaatgtagtctagggaatatccttctcttgagtcatcactggtgataacaatatcaaagatcgatcttagataagacggtctttccttataattaatcaaatagatcgtctatccttggcaaaggatacttatttttcactgtcaatttattcaactcttggtagtcaatacatatccttagtgtcccttccttcttcttaatgaaaaatacaggtgcaccccaaggtgaggtatgtggcctaataaactacaaatccaacaaaccttgccattgaacctttagttcttttaattcttttggtgccatccaatacggggccttggaaacatgctctgcccgtggtatcaatttgatctcgaaatcagtctcccgttttggtggtatcccaagtaactccttttggaagacattcagaaagtctcgtaccactggcacgtgtttagatcctagtagtatctctcttgtggtatccaccacactggttaaatagccgatacatccatcacataataagtctcttgccttaagcatgtgatcattggaattaagatccttgaaccattcccacaaacataaatgggtcctcaccctcgagttcaaaagttaccatcttcctctaacattcgatggttgcattatactttactagccaatccattccaagtattacattaaaatcttctaagtctaattagattagatccaccgacagttctctaccctccacatgcaatggaagggacttaacccacctgctgaagataaccaactccccagtatgcaacaaagtaccaaaaccatttggtaaaaaatcactaggcttgttcagactaccgatcactctactcagcacataagaatacgtagcaccagaatcaattataggagaaaactaaataccatcaatagaaatctgacctgtcatggtagaaggataagcatcggcctctgcatgggtcaaagcaaatacccaagcatgaataaaagcatcctccttattatgttctggttttaataactacgggcaattcttcttcagatggtctactaccccacactagaagcaggctcgagcttgacattcatcctgatggcatctcttgtaccttcgacactcaggataggttctctagttctcatttccaccttagcaaaatcccttattaccttgaaatttctttttgggatccgcggctggtgggtcattagatcttttcttgcattctttagggtcaacacccctacccatatcgacatttagagacggcctccacaaatctcttctcatattacttctcttttgtatctaatcttcaacaccctcagcaataagggctaactcaaccacttaagcataagctcaaacaaaccctggttgtttagcatgtacagccacatcccaagaaatatgttcttccaacccccggataaacttaacatgtctagcagcctcagtggccacttcgtcaaacgtaaactttgccaaccggtcaactttggtggcgtactcggtcactgttatactaccctgagttagcaatatgaactcttttgccttagcagcaaggatagattcattgtagtactttttataaaataaggtccaaactatatcccgtgtcatgttagtcagatcatgaccttaggacatgatttcccaccacatgtgagcatcctctcgcaacatgaatatagcacacccaacctgatcgttacccttaacttgtataaagtcaaagatagaagttatcatgctcatccattgctccacgttaggtgggtcagcaccacccttaaacactagctaattctagtttttgaactgctcatacaacaactccaaacgatttcccatgtcctgcggcacaaccaggggtgccaaaggaataggattaggagcaggccaaacttgctactctcttagttctctaatttgatctccttgctacagaatgatctcttgcattgcagcatacatttgttcctaattttgtggtggtagaggatttgtatcctcactaccatccccgagcctagaaagctcgcgattaatcctacagtattacctcgagtgcataatataatatacctatgaccatatactctctaacatttagaattcccaaaccaacacatataacatcattatgtataacatattatgctcttctaatgactcatgcatctgaaataaccaaatactccaagtaattaatagataatcaaataatcgattaccacttactataccatgagtcgaatgagtctttatagccaatatacatatctaaccagtcttcatgatccttaaacctttattaccctgatatcatgttgtaacgcccttacccgtaaaggcgccacgtgtgtgcttttataaattagtttataataataaactaacggtttaagataaaatgtgatttaattaaaacttttaaaaaatttatttaaagtataacttaaactcttttccaaaatattaccttatttggggatcccctaggttacaaacttttaataaaataccattatatttgtttgttataaaatattgttacatattcaaagtattacaaaagacagatcctgtcaactgcgcacaaaagatggcaagactgatatacacattcgtctggagacctctaacctattatccctttcccttacctctgccataacgcacccgtgagtcaaaaagactcaacaagaaaagccaaaaaaaaaatacaaatatcatagaattcaaaacaacaatgcacatacattaacatataatttaacactctactcactgtataatcaaatgctagtaatcaattaattgtcaaataagacaagccaaactcgatatttataaagtgtcattaaccctcgttagcaacgagttgctaatgtcactatcattgcctaatgaagcaatcaataagtaataaacctaacaatagtttcgaattagagtaataactcttacgtattaacggtaattaccgtatcataattttgacgtggtatgcggtacaatttactttacttatcttaagtcaaaattcaagtgtacgggccgacctaagtgaaatgatgcttgacgatctcggaccttatgtcatgacaacaacaatttggtaaataacttaatcaatcctgctctaggacttaaactcaaaaccggacaaacccctatcgataaagcacaaaacttaattgctggaaacacccaaaaatggttcgctgtttctaaaaatggaacaccctttttctgggttctgccctctattgtttttacacacaactgtaaaaacaataagccatttttcctgcagattagtcctgcctcgggtttttcacttcaaacaccttcaaaactcctccaaacctaataaaaatttccagatcaatttaatatcatatatacaagatatcccaacactcaaaaccaacaattaacttaaaatcacaaaaatattattcttgggtgagtttttaagttcttgaacttaactcacccaaccaaagcataacaacccataattcttgaaattaaaacttaaaaaaccttgaattaaacttaagaacatgctttgaacttatcaaaacctacagacctgaattcatccaattttccccaaagactaaacccaaattctagaaatcatcaagaacaaatgaagaaacttacctcaaggtttggatagctcctaaggttgaagaaattgactagaaatgatgaaatagatgttgattttgccttgcttctactgtgtttctttgagccgaaaaagagagagaaagagagagtagataagtttgtgaaattttcatattattaattttgacattatctcttaattatctaataacataaactacatctattttcttcattctaaggttttcaagacaatcaaataaaacaaaagattgaaacctagtaaaattaccattttaccctaaatccaactcttaagcaaatatataacttaggagtattttgattaaagttatccaaaatgaacaagaataaccatagttgtccaaaataatcacagtatactctgtaaagtttgactaaaaaattatcactaaatgtaacagttttttgtagtgatacaatcatattgttaaatttcctagacattacaacagaagagaaaatgaaagaaagagaaagagaggagaaagaataaagaaagagtgaattgttattcaatgaacaaagagcatcatacaagcttatatacacaagctaaaaatagaaagagaggaagaagagaatcagttagaacagtaaccaactaactgaaaagctaactaacatctctaactgaattaacagaattggtacccttaacactccccttcaaacttagaattgaagcatcttcaattctgagtttgtgtcgaaagttggtaaatctattgctggaaatgaacttcaaagaccatcagcaatttgatcgattgttgggacatgcctgatgtcaacaacatgctgcagaatcttctctcgatcaaagtataaatcgagttctatttctttggtcttggcatgtagaacgggatttgtagtgagtagcataccacacaacaggggttctagtaagaagaacatgcagctcagagagaagagaatggagccatgttatttcagcaacaatattagcaagtgatatgaattttgcctcaatacttgatctggaaacagtatgctgtttcttggaggactaagcaacaagattcgagccaaaatagattgcatagcctgaagtagacctctgtcatcaatgtctgcagcccaatcagcgtcatagaacgcagctctttcagtgtgtggaggtttctttagatgaagaccatagatcattgtgccattgaaataccttagaatccgcttgacagcaacccagtgaattttcagagggtgttgcatgaattgacaaactttgctcacactataggaaatcccaggtcgagttatagtgagatattgaagtgccccaacagtagacctgtagagttgaacatctttaacaggatcactcccataagctgaaagtttgaggccactggtcataggagtagatgtagccttggctccttgcatttgagtcttgaccaacagatctctgatatatttcccttgagagagatgcaaaccatttgaagtgtgctgaacttcaattcccaagaagtagttaagttctccaaggtccttgagtgaaaattcagtgttaaaattagtgacaagttgagacaaaacctcattgttgctgcctgtaatgataatgtcatcgacataaactaacaccaatgttgtagccttaggtgagtgttgaatgaatagggagtgatctgattttgatgagacaaaaccaaacttggaaagtgaaagttgtagcctttcaaaactaggctcttggagcttgcttgagcccatataaggctttatgaagcttgcaaacaaggttaggcattgttgtaacttcaaaccgaggtggctctatcatgtaaacctcatcttgcagaacaccatttaggaaagcattattgacatctagctgtcgaatctgccagccttgggacagggcaagagttagaacaactctaatggtgacaggtttcacaactagactaaatgtaataccctaggattaagagaatggattagcaaaaccctaactagttgattgagtattattatgaaattatattattatataattgaatatatgagatttgatatgttaagaccccgttggtgagataggggcatttcagtaattttgacccgagaagggtaaaatagtgaaattaatttaaaaatgtgcttacggaactatgttattatatggtat

SEQ ID NO: 187818 - DNA, 2055 bp, Cannabis indica
ctgcctgtgtggcctgtggtggcactgttctttcttacccgcattttaatctttttgcaaacaccactctctcagggttcttttacgggtactgctatgcttttctctatctctcgaacccaacgttgtgtatttcgtttatatcttttacgaatgaaagttgggatttttacgtatattgattacaaattcattttcacacctttgtctgattttaggtgctggacctcgaatgggtcctttaccgctaaccattgaggccaaaagctctacactggtttctgcaggtaactcatttcttattttttttgtttttcttttatgggttgaagttgaataatatgcatgacatggtgtattgtataattgttagtagtaattcttatggaatacaataatgcctaatcaactatggtattctgagttcagcttcatttatttatttattttttattttttgcatattaaaaagaatgaatgcaaatgtagtagtatcgtaacgtgcttatattttcttaaataaaagtttagtaagctcaaaccggcatcccaaatgcccaactttaacttctcagaagttgaggtaatgttggctcattctatatttgatatgcccagctggtactttctacttattttttttcttttcttttttgctggtattcttatgttccttgggtaaatctactgcattcttatgttttgaactgaccttaaacctttctgggcatctgaagaaaccaaatatttctgttatattgctcccatctgtgttgaatgatactttatattgggaattggaatggttcctgatctattaacaacaatgatattatgaatcgctttaaggaactccttagcccttagattgagctctgaagtaaggttttttcctttcgagggatgcgcctattcgacatgttcatattaagttaagggatgtggttattcgacatgttaagattaagttatggtagttgttgatttcagcttactgatctctcacactcttagtattttttttttctctcttctcttgtgtggcttttaacataacgaaggaataagaaagccataaggaacgtaaggtgaaaaatttaatatagctttgatggctatagaataatctcaaggggactgaaaacagaaaattttatgcagatttaagaaggaaacaagtggtccttcttccttatcttttttgtcactggttttttcatgaccaaagttcagcttctaaaaatagcctacaaacataacatggcacagcagaatttccccaatgccttgcaagttctcaaatgcagtcccaaatgctaactattgatttgtattcctttctttttagtactttatgtattgtagacatttgctctatctttgaccaaatgatgtgattttgcagatccatgccacaagagcgggcaaaacttgtcacttaaaagaaagaagatttttgcagctgctagcatggaagcacaaaagccgtttgactttttccgtactttatttggtaggctacaattactttaattgaagatcccatagagaatataattttggtgttcaaattccttatatattactctcacatattaaatcgtggttaatgaacctcaatttgtgctcttactcttcaagttgttaatcatgctgaaaaaattaatttgaactctaaatgatgacatatccatgctactattccaaactctatctctctttcatgtgaaaatgtctgttttgtcattacgattgtttatcatgtagactttggatatgtattcctgaatcaatggaaagttagctaccgacaggaatgcacaattaggttttgcatagctagaaattgcagatttccatattactactccaatttagcttgtgatgagtggcttttctaagttcctcggcgacggtttaggaaagagtgctaattttggctggatttaatgagtccctggcctctttttttcaaaaagctgatgtcaatttgaaggaaattatgagctcattgaagatagatatatacttctgcgctggaaaggaatatttttt

SEQ ID NO: 187819 - DNA, 1471 bp, Cannabis indica
aaaggatcttgcaaaagcaatgagaactaatgctacaaacctctaaaaaggtgatcttgagttgattggtcgagcgaattatgacactaacaacttcagaactatatgtatgaacaaataacaagaagaataatcaaaataaacttacaaagtacggaaagctaataagattgcaataagatcagtactctaacaagccactctcagaaaggaaaagaagaaaagccccccttataataaacaaaatgaaacgtgtaaaaaatatgatagatgaataattgagtgaaaaaacacatagaagattaagggagtttcatgtaaataaatacacacccatcagaagatgcaaaccgcgccgcaaaggtcttcggttttaccttatctccataaagagacaatccctcgttgaaatcctaaaaaaataaatatataaattagtctttaagaaaatataatgaaaaaggaaaaaagtatgggtttatcttgttccagctaacatgtatcgcttaaaatcgcaatgcagctacaaggagtacagcttccaatttcagagcaaacataaaatctcaaatcatatataggtacctcaggctccataacgtcctcaaagtcaggggggatcctaatggaaaatccattgccaaagaattggaaccaagatttggtgttgacgatgccggaaagcgagggcttcgccgatgccgaagaacgggcaagtgggaattgcagcggggcaaaagagatgaggaagagcgaagtgaacttgttaatcaaatgtctcctggtgccagtggggagagtggtacgagtagagtttgcagtggaaagagaaagggttttggggattaagtagggtttagggttcagggggtgaggggagagtgagagggagagaagaatggccatgagagaatgaagaagaaggtattcatggctcagcaaattttggagggagatgataatgtggggacaccagcttttgtaatgaggatcagtcaggggtagtttcgatatttaagtctaatgtcgttacatgaatcagatgaagagcgttatttctcgtttgtagtttaaatgggtttgctgtcgttaattgactatacgacaggtcgtttctccgtatctaaacagcatactcttcttaacatgtactttacaatagctaagataagaaaatagagaaaattatattctatactttttttatattgttctcttttttaaaatttattatttttacctctttttttaaacattgtaccaattttacccctgtcactttaagatactctccatgtgactctcttatgttagagtattttgggtacaatacatataaaaacaggcatatttcaattaaatataaaattagaggtaaatttgattaattgattaataaaaatggtatttttcaacttaccctaagaaaataactatgattaaaaagaaaaaaaaaaaaaaaaggaaaaaa

SEQ ID NO: 187820 - DNA, 6982 bp, Cannabis indica
agtacctaaagtgctctgatatcaatgattctatgagagtaggactagcatttgcaccctccatatgcagctttgacagcgaaaattctcttatataaatcagcaatgaggttagagattaaaaataagaacactgtaaggacctgtcatgtagtccacatatattaaaagaatgatttgattaggactagaaaaaacccatgtgtgaagagagaatcctgtgctgaacaattagtttaacaacttagcaaatgtttaacagaaaattaatacaattagagcttactgattataatgctattattatatggggttcttctatttttttttcttcttcaacagaagaatgattttttactaaattatttgctaggaaaaaaaaataatgatgatagcttaagcaatgattctatcaatgttaaactctactatatacaattaattcaggtgagtgtagagatttattgcaggcaggtctggtccatacattatctcaatcacaagaatattcttcagttgaactcctcccaagtttaaaattcagcaaacatttccgaatgcaatagatgtcacaacattagaaaccaggtctgtctggataaatgtgtgatatagctcccatgcaatctgagtaggaaaaacttccaacgcctctgaaacatgcttgttctagcacagtgacagtccacccaaaacaacaacatatgtagttgcatccggtaccagatgatgaacttacatctcaccgaacagtaccatctataaaggtagtgtatgtactacattgggcctaattcccatgccaatctttgatttcttcttgcaaagtccacaaatcaaaatagcttctttgcttccttaagttaagcctaccaattttacataagtcatctaacaaagtgctgttagtgatttaatcaggatacaataagcttctctcagtcatatcataagcttctttgatcaaaccacacactaaaagtcacttgatctgtcatctcattgaacaaacctttggcctcttcccatttatctgtgctgcacaaaccatgaatcaaagagctacctttcatttccaagaacagttatcaatccttcctcacacagcccaacaattatagctccacaccaaattagacttggtctgcacttaaaaccatctccatgatctttcccactagccattttctcatgtaacttacacaatccattaataagagtactaaaagtgacaacattgggattacaaccagatgttataacatactgttactgtttcattaaaagaaagcaaattaggaaagtggaaggcagaagactagaactctagttaagaagaaatgcagagcaaaacttaaacaaaaaaaaagaagatgaggtgtgatgactgatgatgagttacgtacgataaccttgatttgggattatctaagtgatcacaaacaaactgatgagtctcaggcagcaaacaaatacaatacaacatcaacatttaccttaatttaatttataagaaaatatcatttaaaattacaattatttatttatttatttgaatgaaaatatgtattaagttttgattaattaggagaaaattgaatgagtcagtgaagttggttccaccaaatatggatagcatgataaagcgacacgtgtcactattacaaatcaaaatgatcaaatgaatcaacaaaaaccaaaaccaaaccataatcacttccctaaccaaatttccaaccttttttcttcttcaattcatcaaatttcgctatgcaaagaggtaaatcttaattctttctcttcattcattcgttgattatgtatgttactagattcatcatcttctttaatttgattttgtttgttgtttgttgtttcagacaattatggaaacaagccaacttttacacagatcgtggcggtttcttccatcggattaatgatagctgcggcggttcattaccgtctccgaaagctcaaggctgagaagatggttcctcgtcgtaaagcttctcaaaatggtcgacctgataagcttgagaggttttctcattatgtaggtaattaatcaattaattccctcattaattaaatgtttgattattaacatgatgatgatgatgatgatgatgattgtgtttgactaattaatggcagctaggcaaatgggttttaaagatagaagagaatgtccgcgtttatgcaagttagcttctgaatacgttaggaaatcagagggttttgaagatgatatttacactttctttgccaatgaaccagatgctgattcactttttgttaagcttgttgaagagtttgagagatgtattcttagttatttttcttttcattggaatcaagctgatcttatgattagtcaggtcactccctcatttcactctcaatcatctcaattacaattgtttgctttgtgtttttgagttgattaaacagaaagaaatgattctgaattttcaggccttgagtcttgatgcagagcctaaaaagaagtttaaggacattgttttacaggccacaaggtatgaaaattaagaaatgagtagcaaatgtttgatgatatcaccgacagataagaactcatttgtaattagttaataactataccgaagtgagtttattatagctttaatctcttgactatacgagtgaataggcaacagaggtttgaaagagtgacaaagaatttgaaggtggctagagttttcacaaccttattggaggagttgaaagcaatgggactttcatccaatgatgattctcggtgtactgaagtgatggccccggtggctcatgctgatcgaagtccggtgctccttttcatgggaggtgggatgggagcagggaagagcactgttctaaaagacattctcaaagagtatggaattgaaaaaaaaaaaaacaacaaaaatatgttttgttatattatatcttctcatggaaaatagctaatagtattcatttgaattgaaatgttgaacagaccattctgggcaggagctgcagggaatgcagtgatcattgaagcagatgctttcaaagaatcagatgttatctacaaagcccttagctctagaggccatcatgatatgcttcaaacagctgagctggtgatacattgattctcttccaaaaaaacaaaaaagaaccatttttctcaaaatgattgaaatttgattctgaagtttaggatgtaaacattgaaacaggtacaccagtcatcaacagatgcagcctcatcactgctggtgacagcactgaacgaaggtcgagatgtgatcatggacggcaccctctcttgggaaccatttgttgtgcagaccataacaatggctagaaacgtacaccgacgccgatacaggatgggacccggttacacagtatgtgaagatgggaatgttaaggagatttattgggaaaggattgaaggggaggagcctgagaatattgaaggcaagaaaagaaagccatacaggatagaacttgttggagttgtgtgtgatgcttacttagctgttgttagaggcataaggtgattcctttttattctttttctaattgaaatgatcagatttaagaaaacacttactaacaattgggaataataatattaggagagccatcatgtgtagaagagcagttcgagttatgtcacaattgaaatcccacaagagatttgcaaatgcattcttaacatattgcaaccttgtggacaatgcaagactatattgcactaatgctttggaaggtccacccaaggtaatagaacaacaacattattgactttgtgtttccttaaattagagagtaataaaatgtgttattgttgttgtggtaaaagatgataggatggaaagacagagacaagacactactggttgatccagatgagatcgattgtttaaagagagtaggaagattaaactctgaagccacctcaatctaccaactctacaaatcacccaacccagcctgcgaagccggttcagtgtggaaagacattgtattatctccttcaagattaaatgttcaacaggagctcaagtacgccatccagaaagttgaaagatccaaatgaaaactacttacatatatacacacataagaaagcaacaacatttttactcatttcttttattatttattgtgtcctatgtaaaattttcatgttatgacaaattaattactcggcaattgttgcaacttagacattaaaaccccataatccaaccttttaaatcgatctaccatataatatttcacactcgattattccatatgatttaaaaaacaaacaaaagaaaaatcacaagccagaaatggcttcaaaaccaagctaagcaatctatatttttgcaccaaattatatccataaatataataagaacaatttaaacacgaaaaatgtacattgcttttcttatttgaacccaaaaatctaaacgttaataataaaaaaaatcagaaaaaagcacaagcaagaaaaggcttgaatcctaagcaacaaaaactttgatccagaaaatattaagagggatgtaaaatagatcgaaaaatcgtccaagaacataataataatacagtacattcaaactctaaaaaaattaaacaaaaaaaaaaaggataaacattttatatcaaagaaaagaaaatcggttaatactttcttcctcatatgaagcaaattatacgggtacgaattttaccccaatttacaactacagaaccaaactaaaaaaagctaatcactttctcactctcttctcttccaaatttcacttctttcccctagctggggcctttcttgttggtgttttggctttggctggagccgccttcttggcagccggggctttcttcgttgtggcttttggagcaggagctttctttccaggtgaagttcttgatgatgttcttgaaactttagcagcagtcgatctatcctttggctttggtcttgacttagcagctggcttcggtttagcagcaaccttcggcttcacagtagcaacagccttggtctttggcgcagcagcagcggctttaggcttagcgggagcagctttgggtttagcagcaggcttcgatttaggcttagctgctgcctttggcttagctggagatttgggagttgttttcttggttgacttagcaagctttctttgcagctggcttagccttaggttttgacttagtagcagccttggacttcggctttgccttaggcttagcagctccggcagtcttcttcttcgctgcagctggcttcgctgttgctgacctagcagctggaatcttatacgaacctttaacctttgaaatcttgctagaagaaacaagcttcttcaaatgaaaaagcaacagtttcttgaagttcgatggaagctgtttatgcttctcttcaagaaatttagtaatcgcatactgactcgaaccgcttttctctttcaatgaaacgatcgcatctttaaccatctagtacataatcaatacgatcataatcagaaacagatccagaattcacacaattcaactattgaattttcaaaaaattaaatacctcttcgtaaggaggatgagttttgggagcacgaggcttcgatggtttcttggcctttggttcctttgtagccttcttagtcttggttgctgctaccggagtagcttcctcggccgctgctggctcgtcagaaggagcgacgatctcagtcgtcggctcttccactacgattgcggtaggctcttcggtggtcgccattgatgagttaaagagaaagagaagatgagatttgtttactggtaattttcggttgtgaagacgaagacggaaatgaaatactttatatagtcaagtgactgaatgaagatatccgaatgctgagctctgattggttcaaaggcttaccacatggatcgctcttattattaagtttaaatttccaccctacgattgaatttaaatccacggttaggattactcgctgtgaaattaatagatggggaggtttggggggtattggggtgttgaaggttctacctagttgtgcttctatgtctatttgatttgattagattttaggttatagttcatggatttgaatgaggtttttttcattttctttatttttttctaagctttttaatgagtggtttttgtggtttggggttttttagattgggagatatttgggtttgaagctgtgatggtcaaaattagggtttgttgtgatgttattgaggttttaagtgattttagagaaatgcttgggtttaaattggggttttttgaggtgggatgataggaacttagttgaggaatgtattgattcaagaattttgaaaattggattagatttgattaggaaattattggttacaataccactaaagttgaacatattttggtagctatatgttctatgttgtgtaacatataatatatgtgttataggtttcttagttgtgtaagatcaaatttaatttttcttttctactaatctatgagtgattcattaatcatttaacatgatttaatcaaaattgttaatgagacatatgatgtaatcatcatctaattaaaccaagtcatagtacatgtgacatagctagtttttgtacacatactttatatatgtcacctatgttgttacatattacatcaatttatatcttcaccatattaaaatcatatcatacacaaatcatttagctatacatattctctttgattatacacatacatagatatatatatatatctatacttcacatactctaattacaactataactattcaatttcttcttcacatgttgagtaccctttagtaactcctactcacatagctcattagttcacacaaaattaaaaaagagattagtatataacatgttttacaaactatatttacacttttcatttgattcgagtactatatatgcacttgaagttatatgatatggt

SEQ ID NO: 187821 - DNA, 1932 bp, Cannabis indica
aaaaaaaatatatgtgaaatttaatttatattattgtaagagtaaataaaaaaaatcctttgaacacaatgcactaaaagagggtacgttctcttgctttaaatttatgtttgttggtaacaggtggggtagcttcactctctctcatggggtttgtttcaaaagcggttaattttgttacaagtaaaacaaccaacttccgttattttccttcacttttactggaatttaccgtacctgatgaccaggttaaaattaatttagaaaatagtaaaaaaaagacaaaatatttaaatacggtatttgaatttttcacctaaaaatataattacaataaattcttatttagggaacgtgtttgaaaattttttgagtggcaaaatggtaatttggttaattctctttcttctaacaaaccttctcaggtagcggattttgagctctctagacatgaccaacccatacttgggtcaaacatatgaatcagcacttgtttcagttatcttttgtttgttttacttgcctatgatacggtttttttttcttgtgtttattaagaaatatttcttttttgcgtaattaatatttaattattgaatttgtaaaaatagttctttgagctaagttagtgttaacatgcttttagtatgtatgactatatcaaaaagaaataaaatgtcttgcataaatgtatggagaatatttatatcaaaaagagaaaaagaaaagtttgtaaaatatattatatacaaatagataaaataaattaagaagttattactttgttaggtttgaaatcctgaccttagtaatggcattctataattatattatgtaatttctaaattaaagttgagttctcatttcacttactaccattaagtattaggcggggtttgcttaaaaaaaatgaaaatgtcgaaatagagataaaagtgagaatgaaattaaattaaatttaaatgtatgaaaaaaaaaaagttattaaattttttctgatccttatatttgaatgattttttattttattttaaaatataatagtcattttattaaaatgatagaaaaattattctattagaatgatttcaatactttaaaatacaattaaacaaactaatagaataaaattacttcatttttattttattacttctaaccaaataccacttaatttaaagacattttcattgctcaataccttttataattaataagttgttattgatttaagaagagttttatttgtacattataaagttataagttcaccttaatttaaaaaaaataacttaaaataatttttaaagaatactctgaatatatttttaattttttttcacattatttcgtgttaactttattacctattttaattatgttttcataattattttctaaatgatgtgtaatatttttcttttataaattttatatcatttttttgtcataataatttttaatttgataagtatattttttaaaaatatgaaaagaaaaaaaaacaaaataataatataaactaaaaatatatgtttatatcaaataaaattattaaaaattaggtgcctttataaattttgaaagggaataaaactcgatcccttgctgtaattaatttttgggtccatatatgttatatttaataattattataaaaaatttctagttatttgcaaagcattatctcatgatagctaccactagcatcatttcataataggcactactatgcgtaataacaatgcataattcattattaattaatcaagtgactattatgcttctcttatatcctcctgagaattagggttattcatacagttttgccatatgtgattttaaattttaaccaatttttgatcaaattatttgagacgagaactagtgaataatggtgtcaatagtttggtgaattcaaactgtttatga

SEQ ID NO: 187822 - DNA, 2793 bp, Cannabis indica
ctaacgtttagagaaacagagaactaaacaattttcgtttattctagtaataataattttcgtttatactcagcgatttagaagtattgctccaagtgacactaacagaatcaagagaagaaaaaaattaattaactagaatgtgatatcattttctacataattgtttttcctcatctaaccaaataataccaaatatgagattgctttcggcaaccacaataaaccacttatggcagattggtttcccattaaaataattgagctattaagattaaccagataaagtatatcaaagcatttactatattggaaatcttgaaaaatggtgggagtaaaaagtattacgagttcagttcatcagtcttgcttttgatatcactcgaccaaaatactggattgatattctgtggcatggaatcttgttgttgggttttctctctgatccactgttctgctttagtgcactcactaataagctgaaatttttacaacgaattgattgttaaaaacaatataaaacaatattagatagtcttatgcaagtaaaagaaataccaattctttatccttgggagaaagcgaatccgcagccatacgataatcctcgatgcactttaaaagatctcttgtagcttgtaccctagcatcctcatctttatatcgactatcaattggatccaccagctataaaacaaatgaaaacataacaactaaaaatatataataaaagttatgatgtataaagaaattcaattaacaataccaaaagttatgaacttcaaagagttcgaaatgtgacaataaccttcttaagatcatccagcttggaaacataagcattttccgtttcgtcatctccttcatcataaagccaatcctctgtctgttgtaggctcctggaaatgtcctccctctcttgatcactagcaaagctccgatatgtgttgaagagctttcatgagcacaagtttaattaataccaggcaaaagaagacaacataatatgaacaaaaggcctatatgactagctaaataaacatgggattaataggaatgttccagtttgtggagggtgtataaaaagagaacgaaaggatagtagtgggcatggaattattctgcaactttgggaattctttagaactcattgggaagcttaaaggatcctccaatttccctctttcatttttatttgtattttctaagattgtatttcaatggattagactcaatagccattttatatatgagttcctattaagtggtatcaaagcaatctcaacccaccatgtgagcagaattggtcattgaacgggtacattacaagctcgagatcgtgaaccgaatgttgccgcagttcgttcaacataagggaatggactccccgtcttgagtgatggcgcaagaagaagaggaaggagtcgatcatgtggcaatttgagattcaggtaaaacttttcaatatttatatcctgctgcatcttgtgtggggatgagacttgcagacttcaactcagggtagccgccaacaaaacaggtggtgattgacaccgtgagggtggccgggggaagcagacacgaccgaatttgtggtatgaggaggtggggaatacaactacttgttggatttttgtgagaaggagaagaatcgcctttctggggtttcttacctagcgtagcttccgaaaaccgatttgggccactagcttgaatattaatttcaaactgccagagttttgttgattgcacttaactataaagttattattctcaatgtagtgcatggaatatctgttgagtctaatcttgttccacatctgtccttcatttttcttgtattttctgggattgtatttcaatggagaaggctcaatagccatttatatctgagttcctatcatataccatgagaaggtacaagggataaattcttatttactgaatgcagaaattaagctcgctagcttaggcttaatgtagatcaagaaattccacaatttggagactgcgatattcattacatgcactaagtctaaatctttctacaattatgataaaagaaatttgtcacacaagagatttctgcagcatatagactcataccttaaagataattatatctatctatagtgaagttggtgatttcaagtccaaaatgggtttcagcaagttaggaaatcatatcaataatctaagtaatgttgaaattgtaccttgttacgcatctcatagacataggactctaaagcattcttcttatttttagtctcttccatgatttggtcctgtgggccaactgaagttctttatctagagcttctgaaatctctccctccgtcattccaccatttataatctcactaatggggagttctagcctcctggtggctttttcatttgttgctgcattggcctgaaaaagaggaatttattataaacgatcttacacccaatcaaataattgtaaggttttagttagttttggatcttggcaaaattttcagagatacaagatacatcaatttcaacgaaagtaactaatagccattgttatattgagaaacttacagatgcatgtgcaaattcagactgtgcagtaccatcttctaccccatttgaaattctctcagaagaaccagaaacagatacatcatcaatgtccatttgatccacaaatgatttaccgacataatcttctaccaactgaccttgtaataaacccattaattagatacctacaatgactaaaggttgtatggtcttaaaagaatttttttaaaaaagaaaaaa

SEQ ID NO: 187823 - DNA, 3880 bp, Cannabis indica
acatttctacttcctttgacgtctttctgggttcaggaggctcttctgttttcgcttctgactccttcacaaaacttggcggaatctctgcctcagattgtaaatcatccgtagatagtggttgatcctttactatcgcaggagtgcttgatttgtttgctgtacttacactaccagaagcttcatcactaccagctttaatatcttgttctttcgcactgtgatatatctcggaggtttcaacatttgggacatccaatgttttcgcttcaagaacagaatcttgacttttcttgtcacaatgatcagttggtatatcttctttcggaaggtctgcttcgattttttcattcacaaagctctcattagtagcttcagcaaccacactgcaaaataagttgctaacataagacccacagatctacaagaggaatatgcgatccatagaaaatgaaatacctaggcaacccagctggttccttaatgtcatttggtggatcctccaaaagaaagcagtgtcttgaagccagctcaatgcctggggagtttccagatagggattttaaagaattgtgtgatgaagcagtagcaacatcaggtccaaccaaatgtgccaggaaagctgcctgaagaaaagaagagaagcattagtagctataaaaaataggtagatacatgagaataactataataaagatgcacaagtacaataaatactggatagcagattcataatgcaaacaaaaataagattttaattatttgatgataaatgacactcctggaatacaaaaaaataaaaaacaaacttgaaggtgctatcattgggatgtaaattcaacattttcccagccacgtgataaccgtaattacagcttctcctatgactgaccccacttactaataacccagagtcacatgtgagcattcaacttaccaatgccatggcaggattccccacttcagcaaatgaaaatggtcgttcaggtatcagaggataaccaacagcttcaaatgcttccttgagagccttcattgcacaattttcttctgcatccttgccacctttagattcactgccatcatccagttttgaagtgtcctggtcaacttttcctttgtctgtatcttcatgttttgaagtgtcctgactagcttgaacttcagtcatttcttcttttgaagtttccattggggaagaagtggactgatttacattaatagcagtctcactatcatttgtttcaagagcatccttggggtttaatttatcactagaagctggatccacagcttcaatatcatcacaactatcaaaaaagctatcctcaattggcatttgaacaaaatgtaatatgcattgagcttttgttttcgtagcgacatgttcagcaatctcattccagttttctttataaagttctaatgcctcaaggaggaggagagtctcctgatcggtccactttcccccactgagaccctgcatctcaccaggctccatgagaataaaatccgaagatgacataccagagtcaaacttcccattgttaaagcaatcagtacatagatcaaaatctgcctgccaaatatgattataatcagtcaaaatagaatagctcattccaaactaaagtagcagttataaatgctctcgtaattaagagaccatagattcatcattactcaaagtaaattatgataggttcttgggtaaatttatcaatgttcctttatctttttgaaaacgagaaagaggtcgagatagacctcctcccataactattagggaccctcacttggaggaaaaccgtggtgtcataatattactgtgaaaaaacagtattagagcacacataaggccttttacttctcaaaatacaagagttaggccctacaattttccattcacaatataaatctccactctctaatggggtcttgcaatacagaatttgaacctatcacacacctctgagttacttgccaatgttctcactaactcaaatgatgcaactgaatcaagagcaagattaagaaagaaaggtgaacccttcttatccatatgatcgggtggaatgggaattcctggatttggttttgaggaaaaaaggatttggggagttatggagaaaatggattacaggatgtatctcatcaacatcattttctattttcattaatggaagaacgagaggaaaattaaagggtactaggtgtctagacaaggtaaagacaaaattcaacttagccatttacagtttgagaatgacaccctaatttttgtaaataataaggcatcactccaaaatttggttaagattgttgaagctttttgtggtattttgggttaaaagtaaatctgaagaggagtcaacttttgggaatttttctgaatgaggaggcggtggcccaatgtgcagagcaaattggatgtgaggtaggcagctggcctatgacatatttgggaatgccacttggtggttcaccaaggaaaaagactttgggagcctggtttggataaatgtgacgaaaagagttggagtgggtggaaatgctccttcctttctagagggggtacgctcactcttattcactatcctatcttcctttccaatatactatctttctatgttcaaagctccaaagcaggtcataaatgctctagaaaaaatgatgttagactttctttgggaaggtggagatatagcaggtggtgatcatttggtggcttgggatgaggtctgtaaaccaagaaatgagggaggtctagcgattggaagactagagatgagaaacaaagggttgcttatgaaatggctacggacataccctttagaaacaaattcaatgtttcacaaagtgatcaaaagttgctatggcaaagcagaaaacttatgtgatacaaaaaggggcgctagactatccccaagagagccatgaaaggatatatcagagtttcatgaagagtagagggccatggaaggatatatcatagtttcatgaagagtatggaaaactggtgaaattcaaggtaggaaatggggtgaatatccacttttgcgaagatgtatggattggggaatcttcattgatgaatcgattcttgaacttagctactatttctagggctaagaatgaaagtattcagaagttgattgtcaatgaaggcgaggtggggaactgtgtggcgagctgagatttcaaatttagaagaaacattgtggaaagagaaattcctagcttggtacaaatgctacaacaattggaacagttagagtgcttaacattctagatgatagttgtctttggataccagattctagtgggatcttttcttctaaatcagcatttagttggtttacctcaagccaaaattctgatgagttattctggacaaagaccctatggaaaagtaggggacctttaaaagttaaagtgtttgggtggttggtggctctagataaactgaatgtaaagaaagctttcttgtgcttgtcaccaggatggcacatttgtttctaagtcgttgccttgcgcgtagtctttggataaagctaaggaacgaatttgagatccaatgggtcatgccctattcgcttccccaaatgttagtgagtaaggtggatggcagtaaatagaactcatgcttgtggagatcgacgttcgtggcacttttgtgggctgttggttagaaagaaataatagattctttgaaggttatgagtgttcagtagtgtttggacagcatcatgggtgtacaagacaaagcattaagaaaaattttcatttttagacttaattagaaaatggagattaatgatgtagtattcattgctttgcttcatatgaatattcttactgtgtttgttctggtttctgt

SEQ ID NO: 187824 - DNA, 4077 bp, Cannabis indica
tgaataatgtaacttgctttgtaattgagatcctatctctcatatattcctatacttttgcccaaaaataaaataaaataaagggagatgcttgttgtctaccgttttggtggtttcttcaactgataccaagatgctgttttcggttgcagcttttctaatttcaacggtttaaaaaaaaatgaaaattgaaaatatataaaaaaaaattagatatgtatgtaatgtgtttggtttggaacttgaagctaaagcctttgaaggggtttgtggcatgaatcttttagttatttcttttctctttttttaagagaaggaaaacaaagaaacaaataatcagaaatagaaagataaacaaatagtgggggagtgtggtggagtcagatttgtgcttgtgggtgtctctggtttttttgaatagtttagtgttatgagtctgttggcattgtctcctgtgctgacttggtgagcccgagctccgtgggctttgccgccgaccaaggaaacacactcttttcttggctctcttgccattcaagagaatcattttcttttctttcttaaatattgccacaacaacctatctcctctttcacatttctttcttaagactttctcagccttggttgctgtcaagattcggtcttgccttgaataatagcatatatcatttaccatctttgagatcctacttatttgatttattttcttaatctcaggaagttgattatatagtgagaatctctggtccacatcttacacaatctgagaactaacttctcttcaaatcaaagtatgcacttttgtattaaggaatgagtggtgtttcaagcaagtctttgatttaacttagttgagtagtgggaaaagtttgtttcttttagcaccagatctttagctttcccaatatgaagtttatgaaacttggatcgaagccggactcttttcagaatgaagggaaaaatgtcaggtgagagatcttatgcactcttttctattttatctatgtattatgttttttcttttcctccattgattttgaagatcttgtattgatgcacccttccaatctaaacatatatcacatgtttttgcttttctggttttattcagtggctatcaatatataagctagttactttgccttttctcattgttctttgtttttctcccattatccatttcattattattaaataaaatgagctattaaagattctgttttggactatagttattgcagttgggagaatgagtaaagacaacaattctatgataattgctatcatattgttttcttactcttaccaactcttgtcatttcatccatagtcatttagatgttaaaaaaaatcattgtactgcaccagctggtgggcagaatctactggcttttgataaattttttggggataagtttggtgtgttattcattacctgttagaatggtggtgatggaacattacaacttcttgctttgtcttaacaatgttattttacctatgtgcggtggtgaatgtaaaatactccacacaagcagtactgaacaatcttttacacatgtgcaggtatgtgccaagtgagttggctacagacatcactgtagttgttggggatgtaaagtttaatctgcataaggtatgatgatctattatctaaagctttatactgtatcgtgaccgatacaaatgcacgtctttgtgtttctgtggtatatcatgatgaaatgagtaccttcctataactttgcccatgtattttcttgtttgaaacagttttgatttaaaacaatttcttcagctaatttatactaaagccacacacttgtttctcatttcgagttgagtaacacatatttagtgttgctgatggactgaaaatttcatttgcagtttcctcttttatcaaagagtgtctacttgcagaagttggttgcaacagctagtgatgaaagcaccgagggagttgacatttcggacattcctggtggcgctgaagcctttgagatctgtgctaaattttgttatggtatgaccgttaccctcaatccccacaatgtcgtcgcagcaagatgtggggcagaatacttaggaatgcatgagactattgaaaaaggaaatctcatttacaagatagatgtcttccttagctctagcattttccgcagctggaaggactcaatcatagttcttcagactacacaacctctcttaccaatgtctgaggacctgaaattggttggccgctgtgttgagtctgtagctaccaaggcctgtgttgatgtatcgaaagttgactggtcatacacctataacaggaaaaagatctatgaggaaaatggtagtgaaccgaatttgaatggtggcataaagcgtcctgtgccaaaggattggtgggttgaagatttgtgtgagcttgaaattgatctgtacaagcgagtcataacaaatattaaaaacaaatcactattgtcttatgaagtaattggagaagccttgaaggcttatgcttacagcagaaatatgcctggtttaagcaggggtattatccagtctggagatgtggtaaaatatcagtcaacagtagacgcaatagtttgtttgttaccagccgaaagaggcagtgtctcgtgtagtttcctgctaaagttgctgaaagcagcgagtcttttggactctagagatatagtcaaagaagagcttgtgagaagaatagggcagcaacttgaggaggcatctgtaaatgacattttgatacgagcaccggaagaggacactgcattgtatgacgttgctgctgtgcagagaatagtcgaggagttcttaaggcaagatcaaaacactgagattgaatcactggaagacggcgatcacctccagaggatgcagcctgggattttatctgatgcttcaaagttgatggttgctaagttgattgatggatatctagctgaaatcgcaaaggatccaaatttaccattgtcaaagtttcttggtcttgctgagatggtatcaggtatctctcggcctgcccatgatggcatatatcgagctattgacatgttcctcaaggtaagagcttgaaaagtatttgctgtttcgattactatatgattcatggtgtttaacataactatttaaatgcaggaacatccagggatcaccaaaagtgagaggaaaaggatatgcaaactaatggattgcagaaagctatctgttgatgcttgcatgcacgccgtacaaaatgagagactcccactacgcgtggttgtgcaagtactctttttcgagcaggtgagggctgctgcatcatctggcagcagcactcctgacttgcctaaaggcatcaaggatttaaacagcaacacctcacacgggagttcaaggtccgcgacaacaaacacagaggaagactgggatgcagtggccacggctgaggagctcaaggcccttaggggggagctagcttcattgaggttaagcaatggagttggtggaaatgagaggaatggtggtgatgttaaaagtggggtggacaaagctactataagtaaaatgagagggctacttaaatcaaagaagatctttgcaaagctcttttcgagcaaaggggcacaaggcgaaaatagtggctccgattcctcggagagtttaggctctgccaatccagaagaagctaaatcaactccctctagaaataggagacattcagtttcctagtgggagttagttaccagacagaataggttttggtcctttttttttcctttttggaagttctcttctgtttatgacattagcaacttggaaaaactatggttgtcttctaattaagcaaggaatgaagtaaatatatcatttagaagaaaacaattttaggttgattttgtcctgactgatgaaagttactggaacttagaatatacgtacatatgaataacgttactcatgcataacaatagaatatttttcgttcaagtcaataaaaggagagtgagaattacgtcacatttcataagaattagatagtgcaaaagtattggtataatctacagaaccccaaatgcttttttttttt

SEQ ID NO: 187825 - DNA, 6984 bp, Cannabis indica
ttttttttttttttagggtttaagctatatctcattgtcttaaatacgaattaatccacaataactattattcaaaaaaaaaaaaaaaatccataataatttagccccttttttattttttcagagcgaggtaaggtcaaaagcgtaatttagtgactgcgaacgagggtataaaagccaccgtctcattgagggctttagggttttgtggatttcgtttgcacctttttcttctcttcactccaaactttctcaaaggcaaagcttaaccgaattcatcaatcatgactgctcagacccaggaagagcttctcgccgctcatctcgaacaggaaaagcttgatgtaactaatctctatatctctatatatttatataataagtgtatatatataatcaaaatgcttcttgaactaggttattaaggttatttattaaggtcgataatcattgagaacattggaaatggatttttctattcttgctgtgttctttagaccagatctttgtttttgaaatatcttttatggaaccatgataatgaaatggaagctgtgggattcttgcctttattttctttcgtgtattttgttgtggaaaattcctagtattttatttgaccgttgaatcaggacagtggctgctttagtagctaaaatgaaaacattagtggatatttgaaatcttgttcaagaatagttcttacattgttttgttttggattctttatagaaatgtcaggtggtggtaatgggtccgttcattaatttcattgttcttgcattgttttgttttaagctctatataagtggctgctgtagtgattgcgtctggatcttggaagtcatttacagaaatattttcaaactttgtgcgaatactgtaattgtgtgtttgcgtcaaatgtgtagttttttaatcctttgattttaaagtttcttgactcgtttttttagttaatctcggtaaaatgacaaagttgcatgaaatgcgggactgctttgagtatcgcgtattttataccagcagtattcacgtaatatacatcatgtattgttttctctttgtagacttgtagtccgtgattttgttgctatttcacttaaagttaattcttaaatattatttagtttttttgggggggcgtgtgatatataatgattttgcgtagtaacattttgtcctgaaacattgtattcacagcctgatcagcctaccgttgaggatgatgatgacgatgatgaagatgacgacgatgatgacaaggatgatgatgaacttgaaggtgaattcatacagtttactactctttgcattctattatttttaaatatactttctttctctcattttcaatttgtcattctgacccctatttggacaagagctatgtgtgggcttgtattttattcattttatgttacttaagtaaaactgatataaactgagaaaaattgaatgtgagataagaaatccaatgacaactggaaaattttccctgaaaacaatgaaagatgttacagtgaacctgaagctatcagactggctgacaggctacacaattatgtgtttgtgctcgtgtaatatattatctttttttgagttttttcttaatgggttgagaaatatttgagtttttatagtttgcatttgcattgatttttattttgatcaactaattaaatgacttgccaacatcatttaatctgctctggttcatagttcaaatgttgtatgttctgaattatgtgttaatactttgtgtttaaacaggacaacatgatggagatgcaagtggtaggtcaaagcagagtagaagtgagaagaaaagcagaaaagctatgttgaagcttggaatgaaacccattcctggtgttagccgggtgactgtcaaaaagagcaagaatgtttgtaccttttccttccctggcctattttaagcttaaatgtacttatgctagaatttgtttgattgctaaattaacatgtacaatgccaaccagatcttgttcgttatctcaaaaccggatgtgttcaagagtccaacttcagatacatatgttatctttggagaggctaagattgaggacttgagctcacaactccagacacaggctgcagagcagttcaaggctcccgatctcagccatgtgatctccaaaccagagtcttcagctacagcccaggatgatgaagatgtagatgatagtggagtggagccaaaggatattgagttggtcatgacacaagcgggtgtacccaggtcaaaggctgtgaaagcattgaaggctgcagatggagacattgttactgctatcatggagcttaccaactaagaatagttgaattaattgttgtttctctcataggtgtgtttttttaagtttgagatgttcttttaatgttagtcttttttgcaattctgccctgttgtatgagttgaaaactaatatatgccctatatggataaacagtgctcctttcttctcagttttatcccccatttttcaagttctccccttggaggagttgggactagtttttggttaccatttttgagtttcaacttcttttacttgcacatgttgtagccaacattatttttaaatcaacttttacttttattcaatctatttgctttgataaaaggtattttcagacagttaagacagtttttggggtattttgcaccaaaatatttagagttgcagctctacccatattaagctactacacagaagctgagtgacgataaagacattttttccaatgaaattatttttaaaattgtcccatattgatgatttctttttgatgaattatagcaattataccagtttaaaacgattttttttttatttatttattttaattttagacctagttgtttcttctttctaaattttactatgaagttatcaaaaaaaaaaataataataataataattaataagaaatggacaaaatttctaaactattacaaatttgagatttttttttcgctgatataaatttgagaatttaaatactaaaattaatatttaaaaacattttaatattaacaagatctaataaaaaaccttggtaggaaaaatgcgagtgcaatttgtaataccagagagagtcctctctagaactttcgagctccttcaacatctgatcactgatgtcagcgcatatataaggatcaatcgactacgacgattcatccaatccaaccttactactacgccaagcttcttcctttttctacttcataatcctccctacttgcctccatttttacagctcggaatatatattactctcatacaaaatgaggtaaacccaggtgatcatataatttgtttatgttttttacaaggctttttttttcttggtcattctcacccagtagtttacatacatcacattaatttagtttctgtaacttttgttaatgttaacacagtaaggctctgtctgctctgttagcataaatgcataatggttcaaaaccaagttttgtttctatcaatttatttattggcacacacatatatgttttagtttggtattagggcagtttgaatgatatctacatagagcatgacagcaagaaatgctgtacaaattcatcacaggtgttgtaaattatttctttattttaataattacccaccttacattacaatcataaattagttcaagctggatttacaggttcttgattctttattctagtcatcttctttttttctcttattgaagggaacatgttgaggtctttaaggaattatttaccagctttttgtgttttgcttgtattttatagtatatgtattagtaattcacattagtttctcaatagaatttgatgacacaagaatctttggtagttaatagaacacattttcacaacctgaggtttgaattgaaaaatccttttttttcttttcttttgttctgtgctcttgcttgttgcagtcgacacccatatgtaaaatgggcccaaagatcggacaaaatctttatcacagttgatttacttgatgcaaaggatgtaaaactcaagcttgaacctgatggaagattcatcttttctgctactaaggactcaataccatatgaagttgatattgaactctttgataagatcaatgttgaggtataacttttccttgagttaagaatgagagtgtgagagagtttgatatcaatgcatttatgaggatgatgtggaattcatgcaggagagcaaatataacgttggtgcaagaggcattgtatatgctataaagaaagctgaaaagaaatggtgggacagactactcaaacaggaaggaaagcctcctgtgttccttagagtagactgggataagtgggttgatgaggaggatgaaaatggttgatactaaatggataaagctgagtggttctttgtgcttgtcttttttatggttgtttgtgatatcattgataatatttctgttttgtatgttcacagaaaaaggaggaaggggtttcgatgatgttgatttctcatcggtaagaactcctttgcctctataacatttatttcattaaattgttgccattgttccaaatttcaaggtgaatgaaaatgtgtgtattgtaattttctctttcttttcaatgatgcatgtgcagtgcattatgttatttgagttcatgatggtttaagaatgttattacaaaatttagttctttctgaagattatttgatttaagactgattttgatacttgatattgtctcgtctcgagtaccattttctataacatctctgtttaccccctttaaatgcatcaattgctaattttgtgttaccaaaacctgttcttagttttgttttctagggggcctaatagtgtttacaaactcatttgatgaatctacacacttttatgtcattattattttttgaaatcttcatcattctccttcctaggatccagtcgagtcaaggccatgcctgtaatcgtgtgctgctctaaacgccaatcatcttagcacttaagtaaatctctcaatcaccaatgttctcctaagacagagccaatacaatacatattggagtaaacttcaaatagtgtaaatacatttgaataatgttactcaaaagaaggatgtaaaatgatgttcttactgctagcttaaaaatactcatctgcctggtctttctgtctttacccaaacaccaatgtagtaacaaaatgtaagtgaagtagatatctagactggatgggaagattgagaatgagtttccatctatgattcatttggctcagtattaaaggaacacaaaaatgttgacataatcagtaatcacattgatgtttcttcaattggtctataactttctatccttatgggggtaagtaatgaatttgggtaaaatatgcagggtaatcatgagaaaagtcgggtgaaagaacgaaagaagcgtcggagtacattaaacaagtttcttgggaagttaaggcttgattgctttaggaagccatgagagttacaggttctctaaatttcttggcaaaaaagattttaaccgttctgttcacagtgaagttcagatgtatgtatatttgaattttgtttagtatttgggctttgtaaatcatatgtgtgtgacagtgtgacttaatttgtagtgggttttcttgtttgctttctttatgtttgatccataagacaacttctctacaaattgagaagaaaaaaaaaaaactgaaattattattgaagtaaaaaatgcactcaggtttggttgtacataagaataagaaaatccagttttaatttcacgtttcacctcactatgggtcctgttttcaatatattattattattattatttttacaaactatttgattgaaaataattttattagaatttagttgatttgaaaactataaatgataattaagttagttcaagtcttgcaatatatttttagctatattgtcattttgcttttatagtagggtttcttattttatggtagtggggaattataatatatttttgatattggggaggggattcgaacttacgacttctttttgtgaagagaagtgtcaaattactacactatgcatatgacctaccttagatgcttaatctatttttttaaaaaaatatatgacgaggttaaaaaaaaaatttaaaatagataattacacttgcaatcatacttttgaattatatttttaactctataaattatttgggtttttcttttaaaaaaaattattcaaatatttactatgtatattggagttacaattttcactattatagttaggaggagacattatttaatccaattaaatcaaactgatttaattggattaaattgaatattaaaagttttattctaatttaattggaaatcaattttaaaattcaattaaaacgctatccaatctaatcacacttaataaatattaaaaaattatttatatttatttatatataataaaaaataaaatataaattttttaattatatttacattggttttttttttttggttgaatttgtaattgttttgtggtttgtctatttgttttcatgatattttgtccaattttataacttggtagtgttgtttaggtctaattaaattgaattaaatgatgattttttaaatttaattactaattgaattaaattaaattaatagaaaaatagtgaattggatcagatgtccaatcttatttatagtcatactttctatgaaaatttggtgaggtaattaatattcttccaataaacaatttataaaatgaaatactattttgtaagtcttcatattttattctaattctactcctagctattcatatacttgtttttcttttacttgtgttgaaagtgaaacttttgtggtacactcaagtttccttttattctaacactaaaatttaaatttaagttttaaatcacaatataatttttagcattgatttttttttttt

SEQ ID NO: 187826 - DNA, 5619 bp, Cannabis indica
ggaataattacataaagcaccattttttgtaatataattacatttttacgttcaaagtaatattttttttttttcatttttaacggttttactaaaaaaataacaacaaaaacaatataaaatcaacaagaaaacaaacataaaagtaacatcaaaataacaacaaaaaataacatacagataacaaaaaatgaacaacaaattaacaagattacaacataaaaaaaccgtattctctgtaaataaaatcaaagaaaatcgtaaaaatatttaaaattccgtgaaaaccgtatttttattgtttttttgttgtgtttgtgcatttgtgaaattatcccattatagatttttatatcttttctgtaaaaatatagtttttttttttttttcaaaaagattattttatgaaaaaattgaagaaaaagttgaaaaatatagaaaaatcagataagggtaaccagatactcttctggtaagcatatggataactagttaccatatgaaaattaccagatagcttatgctgtctttttctatatttttttaaacttttttctaaaaatatttctatacaataattttataaatttatactttaaaaacaataaaaataaaaatttcccaaaaaacaataagtaaacaacataatataattataaagtaacgtgaaaataatataatataatacgtgaaagtgaaaagaacataaaaataaataaccgttcatatttttataaaaaaaattaaatccataaaaatattgagaaaaaactgttgattcatatttataagttttttaattaatatttaggtatttatgaaaatatcctattaattaagtattgagtatatatgaggtatatattttatgatcataaattttaaataaatatttaaaacagtctaaaaatcattttgcaaataattttggaaagataattttataaagttacattaatatatttattctatataaataaatatgatgtatatattttatgatcgtaaattttaaataaatatttaacagaaaaatcaatttgttaataattttagaaagataattttataaagttacattaatatatctattctatataaagtgtggttaattaatagaattctttgtttaaagatattttcttagatttttatgttaactttaacagaatattatattacttaacagaatattctttattaattttataatattattattatatatttaaaaataaaaattatatagatattttatataaagaaattttaatttaaatttaaaatacttaaaatattatagatatttttaatttattcatttaactttaaattaaaataaaataaaaaattatgcagatatttcatataaaaaaatttaaatttaaaatattataaatttatagtaaatcgattcacacactatttttaaatttacgggaataaaaaacatttatattaaatttacgaatccaacctatatatagacaaactcaaatttggttatgtgagttttggctaagaataagtaaattacaatatatgcattatcagatatgttacctaattaaaaaaaaaattaaaaaaattcgtttatatataatcacattcaaatgacacactaatgtagtaatagctaaaaaaaaaattaaaagatcaaaatctcaaacttcatttcaaaaattaaaaaaaaatgcattatttaattaaaaaattaaacatacatttattgcacgtaacatcaaccttgtatatttgcagtcataaattacttatatttgtaccaagtaaatttagtatgtatatcttattacaaaaataaatttagtgtaactacaaaatacaaaaaataaaaataaaagaaacaaccttgtggcttgttccattaaatcaaatttgtctcccagaaatgtgctttccctttttcttatctccaaaacaaaatttagatatgaggtagtatttaggtatgaattctaaatatcttgtttgacaaaatagttagtaactacacgagaaagtaatattttttggtagtttatgtttaaaataaaaaaaattagtaattagactcaatttttatggggaccatgagaattggagagtaattggaacccctcaatcacttccaattacaccgatagaccatctccaatgagagatgtaaagttaagctatatttgacataaaaaataattttgtgacacttttacttacacgaacttttactattgtgctaattgcatatttgtaaattttgatgtaaaattttatgtaatttaatgctcaattaataatttattaaaaatatataaaataataataataatgtaaaggtaaatataaaatttaagagatatgctaaaagacaccactggtgcctagcactctctttagtgtcatactgctattggtgtaattaaattttagatcccatataatataaaaaaaatagcttttacagaatatcgttaaccaatcgtaagacgccacctatagatagtgctgacactattggtgaccaatgcaatgctcaaaattaaataataataatacaagtcatttaatgcaaaagaacatgttaactaaaatttaataataaaatattaaaaataatataatggtaaatataaaaaagatggcatttattgtaatgtaaattttgtatcatactaattcaaatttggatattttttgttgtgtgacatacttacatcacaatttgacacactattggagtagacttttaacaaaattaactatattttacatttgtatcactttttttgcatctccattaaagatgcttagagtgtaattatataatcagacaaacatactaaattatgtaattacttctaattgcacacaaatatgtgattttctaaacacgcccctaataatttgttcagcaccttaaaatataataatgattccacagttttaaaggaattctaggaaagatcttgtttagctacttctgatttcatgtcttttaaatctattaatatgtaaagcattgcattagattcagaattcagacacaaagttacaaccataaaaacctctgccaaaatctcagcaccaaccaaacaatgttctaaattccatagagaatggctcaacttctttcctttggaacaaccagagatttacatttgtagtctcattattcaaaaccaaaagatagagacatacatatataaattatatataagactagttaagctgagaatctttttcacaaccatgctggtttcttcaaagctgtaacaacagctttcacctgcaagtagttgctaaggctgtagatacctttttccctgcctataccgctcattttgtaccccccgaaaggaattgcagcgtcgaaaacatcaaagcagttcacccacactgttccagctctcagcgcccttgtgagggtgtttgcagtgtctatgttcttggtgaaaactccagccgctaatccatatttgcttgcattagctcttctaattacttcatcaatctccctggggttgaacaaagtatacttagaggaaatccaaagaagcttttgtttctgaaatagacttgtaatgtttcttaacttacttgaatttcaagatcgtttgaactggtccaaagatctcctcttgggctatcaacatatcatcctgattgttggggaaaaaaaaatgaactataataacaaactcaaattgatcttgttttttcttggcatatgtgttgaacttgattgaagctgttattatggacaaagcatacctgaacattagagaaaacagtgggttggatgaagtaccctttggagccaaatctctcacctccacattcaagggtagcattgctttcaacaccagattttatgtactttaggattttcttaaactgttcagagtctatctgggaagtttcacaagattaggaggaagaagaattagtgtgctactccaatttaactgaaaatccattgtttagagctacttcaaattatcaagagtgatagggaagagtacctgaggcccttgttccacacccttcttgaaaggatcaccaacaatacgattcaaggctcgtgcctttgctttctcggtaaattcatcatagacactttcatggacgaaagtacgagacccagcacaacaacattggccctggaatgaagccggcattgattaattattgacatgaacataatgagattcaagtgaattagcctcgtagagaacaatagaacaaacctgattaaagaacaaagcaaaatgagcaagctccacagcatggtcaatgtctgcatcctcacatactatgaaaggtgatttccctccaagctctaatgtcaccggctttagattacttcttgcggctagttcaagaacaattttcccagtatttgttgatcctgtgaaagctagctgaaattggaagtaataggggttttgagaaggttaactttctttgaaagacactcatattttagtggccagagaagtgttttctaagcttagcataggcatgtcattgttatgtgtgctctctttaaaataccttgtcaacatccatatggcttgcaagagcagcaccagcagttgggccaaagccagaaactatgttcaaaacaccaggtggaaggccagcctataacaatgtgacaagaaattagtacacataaaaccaaaacttataattagtatgaaatccaaaacaaattcagtagtattgacaaaagaaatctacataatcctcttcatgtcagtcatgagaataccaacattcaaggttaacatggttaaagactgtaaatcagttatatatagttcgtattaatcaattttatcttctaacaaagggatgaaagggttcaactaaagcctacctctagaagtaaccttcccacataaagagcagttaaaggtgtttgctcagcagtctttaggacaatagtgtttccacaagctagagcaggtccaaccttccaagcaaacatgagaagaggaaaattccatggaataatctgccctgcaacaccgattggctcgtgcaacgtttgaacatgataattcccatcggctggaacagttagtccatggattttgtccgcccaacctggaaaaaaaatatcaggaaatagaatcattggaaatgaagcaaaaagaaccaagggacagtccaaattcactcttgaagtagtcttaccagcatagtagcgaaacaagcgcgccagcattggtacctcggcctttgcagcctgttcaaaaggcttcccattattccatgactcaagtgctgagatttcatcattatgcttctcaactaaatcggcaaagcgcagcagaacccgtgatctttcctgaaagttccaagcatttggtgaaaatgcagctttaacatcaacatggggggttatgaaatgaaatcattcatttggtaacttcagaaacaaaaaagccataacagaaagagcacatagtattgtcatgtagagcttattggatacttaaaaaaatgaagaaagaaattaacataagcagtcatctttggccatggtccctcatcaaaagccttgcgcgcagcagccacagctcgatctatgtcttctgcatcaccctctgc

SEQ ID NO: 187827 - DNA, 3427 bp, Cannabis indica
ttttaaatataatgtaaatgggcctggacaggcgaataaagcccaaacctgtaggagaaaaagaaagaccacaatcggcatatattcttctccccgccatgatctactttctacaggattcatctctatttccctccatctacagctacaacacaatcacccgcgttctcccctttcaactccataagccctagaatttgaatctaccgtagagagtcctcacaatttcacaggccctgaacaaacctaaatttagctctacctatatttctcggcttctctagggctcttccgttgattcgcttacttaatttcggtcatcagaaaggtacataactaaattataagtgtttgtttgcttatttatattggttaatcttttagccctttctttttccttcaatcctttattgattatgagaaaaaaaaaatatgaataggaggggtaaaatgtcgatggatctgatactgaagccaacgtgtagtggatgtggatcgccgacggatttgtacggaagtaattgcaagcacctgactttgtgcttgacatgtgggaagaaaaaggctgagagccgcgccacatgccctgagtgtggcgccactgttacccgtttaataagagtacgctttctatttatttttcttatgttacccaatatgctcacgaattcacctgggttgtctttacaatgtaaaattagccctttcatagtcttggctattgttttcttggacaagcggtcgtcgttttgcaaccctaaatttacactatgcgatcatctcacctatttttttttactgtgtgtgcgaccacgcgactatcacagtttaaattcaatgtggttattttgcaaattttacactagtttgtcaaatttctcttctatttaggaacttgtttgttggattaagttttctactgagacagaacttatcttcaatctaaataaacatggcaatgtatctgaaccccggtgctttccagatggtttatggaagttatacattgtcatgagttataatttcattttttttattattgcagtatattgtgagttttgttgtgtttatttatacttttttggggccacaggtttatccatttcttggtcgtttccgtgccaggaatataatgttcgagccagtaccagcaatgacaagaactacttattggtagatttgtgactggcttgcccagcttttcaaaaaagaaaaacgctgaaaacagatggtctctccagaaagatggattgcagggacgccagcttactgataccttgcgggtactggatcttctctacttagtagtcactggctacttatttaccgtttgtagttatggagattgttagactgccatggacttggaataattttcttcttaacttataatctggaaaatagaagcgttcttgattgtataaatatatatatatatatatgtatgtatgtattgtggattaagtggttgattgttagcatctgagcaagtttggatttgtttatctaagtttttttaaaagtggtcatgtcatggttaatgtcaatgtggaacttattttaatgtacttacttaccgagctagagcaagctagcaactgaacactttaaagattatcgtggagtataatttattcacctatatttgtttaacatctatatctatagccctttgtcagtgtgattattgttgtcttcctttcaaagttgggatttccattatactattgtctgccatttttttgaatacacctgtatttgtttaacatctatacctataacccttgtcagtgtgattacgttgtcttcctttaaaagttggatttctgttacctattgtctgccattattttttctttcttttaatatctgtatctgtttgggcttctcacataataaagtaataaatttctttaaataggagaagtacaagaataaaccttggcttttggaggatgaaacagggcaatttcaattccagggtcatcttgaaggtgcacaatcagcaacttactacctgctgatgttgcaggggaaagagttttctgctattcctgctggctcttggtattatgctctttgatcggatctggttcttacatattagtgctattttgtttttctccctccttatttggaggcaatattgaattccatcatttgataggtagaagcaacggacaactgaacctcatctattccactttgttttttctgtagttattattaaatttttggtttctataatattatcatcagttatggtgatgatatatgtttaacttatatatttcttaggtacaattttaacaaggttgcacagtataagcaacttactctggaggaagcagaagagaagatgaaaaataggaaaaagactgctgatggctatcaaagatggatgatgaaagcagcaaacaatggacctgccgcatttggtgaagtggataagtttgacgacaaggaaagtggtgcggctggtgggagggggcgaaagaaaacctcaggtgatgagggtgaaggaaatgtctcagacaaaggagatgaggatgaagaagaggaagcagccaggaagaataggcttggtttgaataaaagagctggtgaggatgatgatgatgaaggtcaaaggggaggtgatcttgatttggatgatgatgatgtagagaaaggtaatagtttctctaattgagaccgtgctcatttttttaaagagtgttgctgtcaccgctggtgagtgacctttgtgtttaatgcagatattctattagtatttctagagtttggaactgaactttaacttgcttcacaagtatagaccatgaaattgattctgtttcttttgaagctttaattttaaattcttttagcctttattttattttcatcctttttctaatagcacgcaagataatatatactttgtaattctatctttacatatgttgcaggtgatgattgggagcatgaagaaattttcaccgatgatgatgaagcagttggtaatgatccagaggaaagggaggatctggcacctgaagttccagctcccccagaaattaagcaggtttgcttctgataccaatttcacacgtttatcttaattctttagctttgggggatgctactatttgtattgaggatataatctaaactaaatgcaaaatttgagcactgatgcgtgcgatttctgtaacatgattttgtagggaagatgatgaggatgatgataatgaagaagagggtggactaagtaaatcagggaaagagttgaagaagctgctagggcggactagtggcctgaatgattcggatgcagatgatgatgacgatgatgaggatgtaagctgtgttaattttctgtacttttttacttttgttttggggcattcaaaaaattgataaattgctaaattgaaaatttgag

SEQ ID NO: 187828 - DNA, 2150 bp, Cannabis indica
taatacgttggtacacatacattactattggtgcacatgataattatagaacattgttaattaattagtaatcttaaaccaaattaataatatatatataacagtgttctaaataattatatcatcaacatcatcatcgtgagttgtagtgaatatataaaaagttgattctagtataatcctatatagagacacacatgatagtaacagtacaaaatagtgcacaaaaacatatatacgatgagaagaaatttgtggtgttgttacacagtaaggaaggtagggaaaaaattgatacggttgggaataatttcacgggggtgagaatatgtgtgaacagtttagcattgtccaaatttgggcaagaaaaaagtaaatttaactttatatatgaatggaaggatcatcgatcagccactattggggaatggattggatggaatggggtgtgtgtttttgtgtttactatatagtgtgttttgtgttagtagtattgtagtatgtgtaacggttgagtctgtgttttaaattttgtagggcccattgaaaggggagcacatggccccaacatgtcttgggtttattaagacaggattaggggagggtgcctttgcgtgggcacccctttgttgggtcaactagagcatatttccccacctagaccacagaaacaagccccaaaatagacagccttgttcccatgtgcacaaatttaagagcaacattccaaaaccacaacccactttgtgcccttctctctttctctctctctttcaattctctcaaaatcatctttttgggaacaaggaaattagaagattaggaagaagaattctccccctccctaccagtctcttccacatactatctaagatgattatatgtttttctcaacttcacaattggattttcattagattccttcctctccaaatgccttcttctcattctcatgatatgacttttgattattatttggcctggaccatatttcttacatatattcactgtcggtaggagttacattatgtatttttttttttgctggaaagtaggagttacattacatatatatatagataaatattacacacacacacacactttatatatttttccttacacaattaataaatactatggtaataataaaattatttttttaatatatattctcatgcatgtcatacaggttggagaaagctactgcaaaattaagtagagaggttttgtcttgtcatgagatagatatgtatttatatataattaaagaaagtcatcccgtcgtcttgatttggttacaactatttcaaaatcatttatttattgtagtgagctatatatagctataaaatagatgatttattattgaatgaagtcatgaagttgaccctataattctttatcatacgttttctgtgggctattttcatacgttaacttcatttttaacgtcctcaaatagtaaccattcaaccatattaaatgtcaattgcttaggtaaaatatacatatatagtcgttacttttattatttattatgaatggagtgtaacgtacatgtgatttaatccggagagcgttttattttaagcccttaaaatgtacaatttctctctctttatatatatatatagttttgttgtacacctaccaaaacaatagatgatatattttttttaccctaattaaaataaaatccaataattcattattttagataattatattttttatataatattttgaattggatatatttatatgtatgaaattaatactatattatatatacaggaagaaaagggtatcagggataatactaggtagttaaagaagggccaaatttccaatgcgagtacatacaaaattatggattcattttaataaagaatacattttttttccccttccaaaaaccaaaataacttaattcaagacactacaaatacaatcatcgagaaactggctaaccaacaaaatacatatattcaccactaaaaattgagttttttttaactgtcaagaaacataaattttaaatgatttttttattcatattaatttctcgacggttttaaaaacagccaagaaagacactcaggggctgtttggaataggttaatcctaataagagaatggtaatgtga

SEQ ID NO: 187829 - DNA, 2658 bp, Cannabis indica
accattttatttatgatagttaatgaaaaaagaagaagaaaaacacatatgagatgggccatgaactgtcttaattttgtaaatatggcataatttgcttatttggtttttttagtttgttccattagattatacagcaatattgaataattatattttttagtcattatatattagttaatgctaaaagttatgcttacaactttatattcaatttggattttacataatttaattttataattattataaaatatcattaatcatttacaaatttagatgccttgtattgcaatacttaattataagtacttttaatcattaacaaagctagataccagtgtaatcctcatatgtataattatttataataaaaatttaatctttatatgtgaaaagtgtgcacaatttttgtatcactctctagcatttctcattactacatatacataatataataaatcaattactttgttggtagtgtaatcccctttgtgctaccttttatactcatcatttctaatttgggcaatgcattggttatgatatattattctcatttctttaagactttaattaagtacatgaacttgaagtactaaaagtaatgatttgatcataattttacaacaaagtcaacaaacaaaaacaatcatatttttgtgtgtgctgatggaaataggtctttgagatggaaaaatcaatctcgagtggcatcaaggtttccgaacttcaaatcaccacactaattgaaatgcttatgagacaagcaatcaaattggaaaatatacaaactgaaggagaaactgctgctcaaaagaatttacaggtatatataataaattttgtttaactctataactgttagattaaatttagtcaaagtacttaaagtacataacaaaaaagtagcaaaatccaatgtatatgtgtatcaatatagggtatgaatttgcagggaaagagggtgcagaagatagttgaaactttggatgcagttaaaatatcaaacgcaagactaaagcatgcggttgtgacaaataaatgggagacctttaatcctaatcctgctgcttctactactgccacatgggaaatttttgattaattttatttttcttaattatatgtagtaattaataaattattaattgggattatatgctactgtagcttcttttgttttacccttagtttgtgtcctctattaataataataaaaaaatagattttttgttttgattatgtcattaactctaatctagtcaacataccattaatttgaaagaaagaatagtacatatatatattttaatcaagatcattttacaaactatgccgacttataccatgagtatttttaggctcatgaagaggacaattaatagtctccaccgaatggcgacaagattttggtggggctcatgatcagaacacaataaaaaaattcattcgtataagtgttcttatctttgtaagccaaaggaaaagggaagtctgagatttagagatttagggttgttcaatcaagtcttctagccaagcaaatttggcattgcatacggtcacctcattgtctttgtaaccttatcttgaaagcttgctatttttcgaatcgaagtatagaagctaagtgcggtaatcatgcattttttgtgtggtgtaatttgatttggggcaagaatattatattgaaaggatatcgatagcaaattgggaatgggaattaaatgcgtgtgttacaagatccatgactctcgagacagatcacattgaacgtatatgataaacttgaaattcctggctgacttgaaactttctaacggttcttaggattctaacttcaccaatgcggtttttaatgatgatgatgaattgatacaaagtattcctaatggaggttgggagctaaaggataaggttctatggcactatagtaaaaatagcgagtatactattaaaagtgggtataaggctgcagtagtaaggaagaaagaattttcacaaattgatcctcgacggatgaattcatggtggacttctttgtggaaggtaatggggcctcctaaaattaaacattttgtttggaaggtctgtcattcttggttaccaattacgaatggtgtacttgctatgagagggatccatgtgattccttattgtaaccgctgcaatgcaagtcaacaagagggatgtttgttttaccatctactgtggggctaccgaaaaagtgtggaaatctggaagaaggtaacgtttgggaacaaattcgccaaataaaaataaggctaattatgatttttactccccgaactttaacatgtaccaaattatgcccctgaacttttaagatcgttaaaaatgcctcctgaactgtcgagataattggattttaggacttttgtctaattttagtaaaaaaaaagtctaacataaatgaaagttcagggggcatgatctagtatatgtcaaagttcgaaggacatgatttggtagatatcaaagtttaggaagcatggtttagtacataaacaatcactgaaatagtaaaattgaatgaaattaaacaaaaattcttaaatataataattatcaaagaatacaattactgctacttactgccctgtttttcctctgttactgatctttgtattcttg

SEQ ID NO: 187830 - DNA, 1826 bp, Cannabis indica
tttttttttttgaaagaaccttagttcagctataagctattaattgattgtaaaaatactattatattacaaaacaaaaaaaaaaaaatactaagacagcatcatctttgatagaaacgacataaaaactgttgtcgttttcttgggttaagtgatgatagctcgaacttccaaaacacctatgcatgtctcatagggagagtaatactaataacgactcattaaacaaataagtaagagaatttatttttttttaaaaaaaattaaagtaattttgggtatatttaatatccttagtagtttacagttttctatcggaaaaatagtaatttacagttagagtaactaataatattaattatttcaaaaaaaaaaaaaactaataatattaatttgaatttaaaagggtcaaaccgagtgagggagttacttgcttagtcaactatttatctatagagtaggctattgacacagtgcagaattgttggaagttaaagattcaaataaagacagttttgatagttcatctaacctggtcaaaaagtcataaaaaacaatcaatgacaattaaggaaaattttcatgcagaaaattccattaatatatcatggataaaattacaactaaaatccaattttgaaacagaaaggatgccaaattaattaaaatgtaattttaaaaaaatccttaatcaattattgattaatatcttatgaaaaaaaataaaactactgataaatatgaaaaaaaaagttccttcattctctttttaatggtattattaatatgatctctcaaaagtattttatttatttgaaaaaaaaattaaaggctttataataatttattttcaaaaaagaattaaagagaatatcaatatgagtaatgtatgagagagagagagagaattaaataatggaagcattggactaagctctacaagactctaaagcttgaagctttgctttgctttgctttgccacttcttctatttcactgcttacagtaataataaccttcacccatacatacatacatacatactcctttttatggtttttttttctctcatggccaatgtaggagtgtgaaatctagtgaaccaggttttttttttttttttttttcttgtactgtttatgcatcttattctgtgtctataaagatttgatattagttttttttttgtatttagttaagattatcttttatgcttaaaaagaacaagaagacagatatatagaatatgtataagaatcaactgcaggagctagcacagagaagctgtttcaatctaccttcctatgcttgcatcagacaaggccttgatcatgcaccaagattcaaagcttctgttaatttcaatggtgagatctttgaaagcccaaactattgtcccactttaagacaagctgaacatgctgctgctgaagtagcccttaatgtcttgtccactaggggaccttcaaggtctcttactgcaagagttcttgtaagttagttagttctctatatgtttgtgtatttgtctctgtctaaatgtgtaaaggtctcattttttgttttgggtttttattactttaaaggatgagactggtatttacaagaatcttcttcaagaaactgctcatagagctgggttgaggctccctgtgtacacaactgtcagatcaggtcctggccatgtaccaacttttacttgtactgttgagcttgctggtatgaatttcacaggtgaatctgctaaaaccaagaagcaagctgagaagaatgctgctattgcagcctggtctgctttgaaccaaagtaaagttttcatctttttt

SEQ ID NO: 187831 - DNA, 1932 bp, Cannabis indica
aaaaatatttcttgaaataatatcaaaacgttagtgtccttggagaagagatattggtactaaagggcagagttgtgcgtggagagaaggacaagaaatctattttatgcttgctacgcccatcatcactttcaccattaagcattctattattatcctacaacattgcatataaaccacattaattaatatatgatatcaaattatatcaaattatactaatttttttttattttattttaattttctacttaccacaagattcattgctgcagagaagtggttggaaacatcctgattagtattatttttttgcgattttcgcacagcgacaaagggatgctcaagcagcgcagcagccgagagacgctcggctgggttcctcctaaagcaaatgttgaggaaatcttttccctcagatgataatgtgtctggtattggtggtgttttgttcaacaccttgaacatagcttgaggctgccaattattatatatataaggttgtgaagagaaaattaaagcttagaatagtactaacatttcatgttatgtattaataattgttactcaccccagtgaactcactccatgggggtttgccattcatcatctcaatgatggtacaccctaagctccatatatcaatagcgtatgcaacatcagggttgctgttattctgcatcacagcttttatcacctgcaattttcatatttatagtatatagtcattacattacattacatacatgtaaccaatgtaactaatatacgtaataattacattaattattagtatatggtacctcaggagccatccaatatggactgcctttcattgaaagttcatatgatagtcctgtaagctaaagcagaaaaaaaaaccaaattactcattttgatctccacacacatatcatatatgtatgtatgaatcttttattaatttaaaagtgatgacctacatgttttgccattccaaaatcagcaagcttaacaaccccaaaagaattaacaagtaagtttgcacctttgatatccctatgcaagagagatctttgttagaattatacacatagagcctaattcataatatatatatcattcttactcacctatggattgtctgtttaccatgcaaataagctaatccagagagaatatggcgtgtgaaattacgaaccacagactctgtaacagctctacaatgttcacggacatatttattgatggaaccaggatgaacgtactctaaatatatgtagaagtgatcttcgatctacaaattacaatatataacaacataacttaataattaacttattgttactacaagcaaattaactacattgattattattatcattctattgacttactttttcacaaccatagtaccgcacaatgttagggtgatcaagttcacggagaactttaatttcctacaacaaattataaccaatatataataagaaccaaacatgtttttatatatatatatatatatataattctaaaatgtgaaagatacctgttccagttgttttacacattcagcagacttaggatcatctggaataagatccacttccttcattgcacataaggccccagtgtttctacattaagaaaattgactaaatatttttacattaagaagattgaaaaatcaaaggtaaaggatagtgacattagtattattatgattattattattattattattaccggttcatagccatatacacgcttccgaatgtgccacgtccgattagtttacctttttgccattgacctttaatcgatgatgatgatgatgatacgtctgtgttacggggtagggtaacaggctgtgatgatagcgtgggcccgggagggagtggtaaaggatgggcataagtctcggtcaagggtcttttactattattattatta

SEQ ID NO: 187832 - DNA, 5170 bp, Cannabis indica
aagatcataggccttacttatctgttttgtttctgttattatttttatgtttcttttactttataataacatgttgttttattgccttgctagattagtagggatttttatttatttgacaaatggagtggagtttgatccccattgggtgatcggtgtgttgttgattagctcaaatttgagaggcgggggtgggtctttatttttatccttgtcattcaaatctgtttattaaccctatgtgttgtggtttttaagggctcgtttggaacgagccctaaatctcttatgtttgtttgccttctcatgtcgtttgctatttctttttatttcattttatttcatttttgaataatgagtttatttatttattttttttttgttggaagatttttaacttatagttattgattaaatgatgagtacctcgattgttgtatgttcgtttggattatgacttgttagcctatatggaatttttttactctatgggtttctatcttcatgtaattcgactatatttaatttgcctattaatgaatattgtagtttatctttaaaaactttgttgaaaaaaacatacattaatttgagttggtaatatttgaaggtagatttccattattatccttcaagagagagaggaagaaaagcccatagccactaacaatctttacttcctccagctcattgtttgccatgtattgtcggtaagcatttcaaaatttcgggcatcccctcgagggtagtttaggcatttcctatttacttaaaatcaaatcaattcctcttttggacaagtcatataagaatgtatatggttaatattcaagtcttaattcatcacccgaactattataattatagatattaattcattaaaataataaaaacgtgttaagagaaccacagctgtgtagtcgtagccgagccgagccgcgggataggtggaaatgaaactggctagggttggtgaatgaccggctattaccggtaatagtaacgtcaaatcccaccaactcccccaccgatcactccggtaaggggtcacacagagcttagctctataaataccgagttaacaagatgggaaaagttgccagtcgttgagtttcggtgaagaagaaaggtctgggttgagtgagagcaccatttttacagatctacgcattatacaacttcctcgctctttccttcttccatttcaggtactgtttttctcttctctactctgattttagctcaaatctcgtttgtatagctgagaatacaaaatttgttttcatttccagtatgtgattatgttatggtatcagatctggcttgtttgatttggcatatttgtgttggagatctgattataatgtgtttgaaacgtattatgaagttgaatttgagaaagtatgatgaagagtctatatcatttgtaatttttaagagtattagcagatcgatctggttagatctctgtttcttttgaagttatttgtttcgtgttttgaaattaaagaaaaaagagagaattaattttgagttagtcagataacttgtcattgtataacggaaagctgttattattctgactgtgatttgtgcaggcttttattctttttcactttgttttatacattagattctggttcgtttttctctgcccttatagctcttgatgagtatataaagagcattttgtaaagtttaacgacaaatattcaggctctaatggatttcgtattgttttttgttgagctttgtagttcatttatttttgttttgtattcattattcttagcataggagtgtgtaaatatatacatgtttgaatgtcggtggttgtgaaatagtaatttctgaatgaatattttaagcagagaaagttctttcggctctgactcgttttcattgtatctatatttaaacgtttggttgttttgatttcagatataaagatggagaccttcctatttacctccgagtccgtgaacgagggtcacccagacaagctctgtgaccagatctctgatgccgtgcttgacgcctgccttgcccaggaccctgacagcaaggttgcctgtgagacatgcaccaagaccaacatggtcatggtctttggagagatcacaaccaaggctaatgtagattacgagaagatcgtccgtgacacatgccgttctattggattcgtttctgacgatgtgggtcttgatgccgacaactgcaaggttcttgttaacattgaacagcagagccctgatattgcccaaggtgtccatggacattttaccaagcgccctgaggagattggtgctggtgaccagggccatatgtttggttatgctactgatgaaactcctgagttgatgccactcagccacgtcctcgccaccaagcttggtgcacgacttactgaagtcaggaagaacggcacctgcccctggttgagacccgacggcaagacccaagtgacagtggagtacttcaatgaggatggagctatggttcccatccgtgtccacaccgttctcatctccacccagcacgatgagactgtcacaaatgacgagattgctgctgaccttaaggaacatgtcatcaagccagtcatccccgagaagtaccttgatgagaagacaatcttccacttgaacccttcaggccgctttgtcattggtggtccacacggtgatgctggtcttactggccgtaagatcatcatcgatacctatggtggttggggagctcacggtggtggtgctttctctggaaaggaccctactaaggtggacagaagtggagcctacattgtcaggcaggcggccaagagtattgttgccagcgggcttgctcgtaggtgcattgtgcaggtctcttacgccattggtgtcccagaacctttgtccgtctttgttgacacttacaagactggaaagattccagacaaggagatcctcgaaatcgttaaggagaactttgacttcaggcctggaatgatcaccatcaacctagacttgaagagaggcggcaatggcaggttcctgaagaccgctgcctacggacacttcggaagggatgatgccgacttcacctgggaggttgtgaagcccctcaagtgggagaagccacagtcttaaactctttgagccacaaactcagctgttgagttgtcttgaatattttggtattgaattttaataattgtgtgtttgatttgctgctgctgctgccgcgctcctcttagttatgcaatagctttaatatgttctaatatcatcatactgaagtgaagatgctctgtttttttttttgaagtttatattttattttattgtaatgtttgttaccatatatcagtgtctctgaattgaacagaattttccgagttgatggcactggtggtagtagtagtagctgttgtaatagtagtagtagcaaatttgcagaactatactgaaatggcaacactgaaatattatctcgtgatgtttttctttattgaaaacgacatttatttgaatgattattacatctctctgtctatatatatatatataatatatacacagcacattatggtaaaaatgtttagtaccaggactcattagacatggtattttctttcttttgactgacatttatttacttatattgacaaattcttataactgataaactttcatttatgcctattaaaagaaagtggcacaagagacaacattctgttctgtcagttggataaatcatcataatatttcagccagctagtgtcgtttagtacagctttttctcagagataagaagctcagagagtttgtttgttaacgtgttacgagaagagtaccacagatgccatagtcttaatttgcgaactttagatatatattcagaagatgaagtagatgtgtgaattgatgatatgctaccaaaacaataaatatgtgttgagtcaatacttgtctaaatgagagtccttatatttgatatttgtaatattttaatgcacattttatcattatactatgatctattagtctcatctatattgtaagaataaatcaagagtcgaaccacattaacttatatgtaagtcatatatatacatttgattgtttttatgagatttatttatattgatgtgtgtatattgagtacctgagatgtctcgtaccattgctttgctgtaaaggtagagagaaattgacaagatttgtaaggtggttgaggaaaattccagaggtggacataatgtcttcttttctactggtcaagttcttggaatttttgtgcaaggatgagggagtgacatggtggagaagggctttgccctttgggtcctatatgttggttggtttggtgtctgatctaatgttctcttctcttgcattggttgaagctgaggggtgcttctttgctagtatatgatatttttggacaaataaatgtgctcatggcactaccaaacatgctaggcggccttcagaacatgtgagaatatattgtcattttctaatgatgtacttgtttctactcactcatttatgtgatgattgaaagtttcctgactaatcaatgattgagggtgaacagtgtaattattaatttgttgagcatgtgtcaaaatgaggagcaacttggtaaagcaatttcgacactattttctcttacacgctctccttagtcttaccatgctacactctttgccgacaaattggtgatcacacgaagaattaccagtgaagagtttagattaccaaaaacacggtcctttgtgcccaagtagctagaaaataagcgcctagactaaagtctctaccaatccaaaatataggaaaatatacagaaataaaagtatgaagaacattattagtaagcataactagattcttctaggctctagtttggacaaactccaccatggagaaaagaatcctgcataaagtttaaacaatcagagaaaagaactatatcaagctagttctgagaggcaacggatatagcatttgttgtgaatcaatcaatgatttaagatgaaaaagcagtagatcaacaaacacacactcaagaacaaaactatcaaagaataacaagaaccagataataaattaaagcagtaaatcaagaaaaaataaaactaagatttaacgagttcaaaccatgtgcaatactctacatc

SEQ ID NO: 187833 - DNA, 1646 bp, Cannabis indica
ctccccaaaaaccgaatcactcaccaaaatatctctctctgtctctcaacaatatttatatgtagtatatgaagaagacttgaaatttgaaataaggagaatcatataatattataatatatattatatatatagctgctagcttccacatggatgtcaaatctgtatattgatggagtaaaaaagtgaactctagctaaatgggaccttgtctgctattttgttgttcaaagtttcattattagtgaattcttattctactgtctctagaagctagctagaagaataaaagcatgcaaatgcatgtggctgtagtctgtagatttatatatatgaagtaggatatgtgttttaattggttaaaactcagtaatagtttcagcctccaatcatcagaatctcaattttaaactaacttcaaactatatagctttgcttgaaagcagagtaatattgactaagaaaataagtagagggagttaggtgatccggaatgccaacaatattgatgatatatatgttttaacaatattaaattcccctctaattatccctagagccctttaaggatctcactctctgcagtcaaaatagagagataattgtttttagtgaaaaataaacattttgaaaagagattggaatttcagaggtacttcatcatactttcatttcattactttggtccatgacacaaaaagtaacatttgtcaattttcatctcttatctcccattacataaaacagtaattaaatatttatacaaacaaacccatactaaaataataaattcaaaattatacccacctcaaaaaataagattccgcttcattctttgtaattgttccaatcactaacaatcccttgtctatgttttgttttcctttattttccatttttacaggtacacattaaaccgccttaccacttttatttttatattttattactagtaatattttatatcatatttcttctttttctcaaaacttctccaagcatataaacccaaaccccctcttctaagattccaaagaaattaaaaaaaaaacacctactttacaaataagtaaagtaaactaattaaaaaagatctcttgtttaccttcactttcatttccattcctctcatcccttcttccccacaaaaaaaatgtcttccaaaaggaaccaaaccagtagtagtagcagcccaattggaagcccatcatcacctgatagcttatccaaagaacaagacaagtttctgccaatagccaatgttagcagaatcatgaagaagtcactccctgcaaatgccaaaatctcaaaagaagctaaagaaactgtccaagaatgtgtctctgagttcataagcttcataacaggggaagcctcagacaagtgtcaaagagaaaaaaggaagacaattaatggagacgacctcttgtgggccatgaccactctgggctttgagaattatgttggaccccttaaagtttatctcaataaatatagagaagttgaggaagagaagaactccatggccatagctaggcaagaagaaaactcccctactcacaccactactactccttctcatacttttccaaataacaaagttgattttcagaatttcagtgttggtgggttttattcagttgggg

SEQ ID NO: 187834 - DNA, 4263 bp, Cannabis indica
atgtttggcagtcgattgtaattagatcggtgggttgttattggattagattaaaaaattaatataataataatgaatatgtttttagtgtaatttttgggattataggcaccaaatttagtgatattgtgagaacgaatttggtgagctggttggagatgatcttagaatctcatcttcttcatttaccgttttcagggtttatctttatccacttctctcacttctccaattcccatggtgatcaccaccatatcccatcattcctcactacccaatctccacactcctcctcgaatctccctccgctgcaacaacagctcctccaacgactcttcatcctcctccaccttcctcgacaacaagaagcatgtctccgtcgactacgaccagggtaaacaccacgccaccactcaccttaccggcttcagaaaagacgatatcccaaaacggtaccgtttgcgtgttattggtgaccgattcgagaaggactggaccttatcggaggtcgtcgaaaaggtctaccagctccgacgttgggaggatatcgatggcgttttgaatcactgggttggccgattttcaaggaagaatttccctcttctcattaaggtaattggcgcgttttttttttgaaaaaagggaaaaagttttggtttttgtttgcggaatttgaattgagtaattttaggaaatgactaggagaggatcgcttgagcattgtaaggaagtttttagatggatgaagaatcagaggaactattgtgctcggactgatatttacaatatgatgataaggttatatgcaaggaatcatcaaattgatcaagctcgtggtttgttttttgagatgcaagaatggaggtaggtaaagcttatacttttcaggtgttaatgcttattatcaccattgggttttgtttagttgataagcttgaattcaaaacaatacctttctctccagacatacatgttgtcttgtattctgtctttgaaagctcactctttggatattagttcatacaagaaaataaactttgtcagtaatgttttgcccggtttcttaatcaatcaaggaacattttcttaaacctgaaagtttggctactttagtatgtacttgaagattagtccaactattttttttgtttcatttagctatgtttagaagttagatttcggttgggaatgaagaatgtaagaaagaaaggtgtggaaaattaaaaaagaaaatcaattcttcatgttcgatataaaaatttttgttgtatctaactttttttatttatttttttatttttcctacattttcctcacctctttcttttccaaccaaaatacaacttccaaacatagccttaaggttagtccagccacattataggtttgatctgtgttttgtgagcttattgaaatcttgacacggtgcctggacctttctctttttgttttgttgtcattttgtttcttgattataagaatctatatgacagttcatgaattgtcttttcattttgttattttgattgtgagccatttataatgctctttgttttgttttgttttgttttgttatggtcattgttttctgtaggtgtaaaccggatgctgagacttataatgctcttattaatgcacacggtcgattgggtcaatggcgttgggctaagaatatcatggaagacatgctacgtgcagctgtgtgtatttgtattcttcttccttaatcaaatttttagtggttggtctggcttgatgtgagcaactctctttttgtctttgaatacttgagaataaacgttttcaaaatcacttcatgacataagcattttgtgttttgatatgctcaccaaaataataatcacaataatccttcttgttgttattagtttgtgcaatttcattctaacttttcaaaatatttttccaatggtaaccttgttgtgggtgcacatgaattacaggtaggtatgaacttccatttagctgattttgagtcatgagatgtttcttatgagttgtgctttcaaaatcttgtaactacttgatgactatgttcaacattctcatagtgatgcatatttggtcaaatcaatacaaaccatcttttttcaatagaatggtacatgtgcgcttgagctttgtattttaaatcctagataacaaaacaactcgtatctgcttgacttcctgccaaactaattgaactttatgtctataattagtcaactatcgaatttactgtccttaaccagtatgcttgtttcaagtcttctgtgcttttatctcaacttagcttccgagaattcaaaatcacttctgtgagagagcttcatgacttttatcttatgattgcagatccctcctagtcgttccacctataacaacctaataaatgcttgtgggtctagtggaaattggagagaagctcttaaagtttgcaagcaaatgacagataatggagttgggccggatctagtcactcacaatattgtattatctgcgtacaaaactggggctgagtattcaaaagcattatcgtattttgaactaatgaaggggacaaacatccgccctgatacaatcaccctcaatattgtgatacattgcttgattaagcttggacagtacgagaaggcggttgaaattttcaattctatgagagataaaagagcagaatgtatccctgacattgtaacattcacaagcatcattcatatgtattctgtgtgtggccagattgaaaattgtagggctgtgtttgatacaatgcttgcagaaggattgaaaccgaacattgtttcatataatgcattattaggagcttatgcttcacatggtatggataaagaggcattgtcggtttttaatgagattaagagaaaaggtttttgccctgatgttgtgtcgtatacatctctacttaatgcttatggaagatcaaagaaacctcaaaaggcattggaagtatttgagatgatgaagaaaaacaagtgcaagccaaatcttgtgacctacaatgcactgatcgatgcctatggatctggtggtttgttagttcaagctgttgaagtgctgcgtgaaatggagcgaaatggactttacccgaacattgtgtcaatatgcacacttttggctgcttgtgggcgatgcggtcaaaaggtgaacattgatactgttctttcagcagctaagctcagaggcatcaaattgaacactattgcatataattcagctattggaagttatatgaatataggggaaaatgagaaagctatcaatttatatagatctatgatgaagaagagaattaaaccagattctgttacttacactcagttgataagtggttgctgtaggatgtctctatacaatgaggcacttggtttttttgatgaaatgatggatttgaaagttcctttatctaaagaggtctgttcatctacaatatgcgcctacagcaaacaggcaagtaatatagccagagtagcctctgaatagactcaagaattgatttgagctaaatctcttaatcacccttcttcttacattaattcagggccaacttacagaagcggaattcgtgttcaacttgatgaaagaagatggatgtattccggatgtagttgcatacacatcaatgctgcatgcatatagctctaccggtaagaaaaagtgttagaagtactaatttgattgcgttaatttcaataagaatataattcaaaattttttattcttctttctaaatcagaaaattgggacaaggcttgtacactttttgaggaaatgaaaacaaatggtatccaaccagactctattgcatgttcaactgcaatgagagctcttaataaaggaggccaatcgaccaaagttctaattctcgctgaacatatgaaagaacaagaaattcctttcagtgattcagttttctttgaaattatatctgcttgtagcctgtgagtttcccttcttaccttggttggtttctcatgaatccaaaaggtctaagttcaatttcttgtaacaatactacaaatgctaatctaccgatagcttcgatgcttcctgtcattatttcacttagagactgacaatgggacattggctacagattacgagattggaagacagcaactgacctgattaagatgatggagccctcactccccgcaatctcgagtggcgttataaatcagctcctcctttttcttggacgaagtgggaaagttgatactatgatgaaggtaaattttcaatata

SEQ ID NO: 187835 - DNA, 2323 bp, Cannabis indica
gttaagtagaaggataagaaaatatataagaatttgatgccacatcgagttattctagcaagatatcattaaacatacatgaactaaattttacattctcctcaagatttttttattcatgaacaagaaaacttgtacttataataatgtgaaaatcccttcaaagtgttcatttctcgcataaaaatgcagcataacttacgatgtctacatacaactaatttagaactattacaaaattccaattctagcattatgcgacatagaatttagacttacctgaatagtatccaattttagcagcagtctcatgatggtttctccaattaaaaccttctgcttttcgtccattcggacttcagaagatgactccaaagcttgaagacgatttcgaacatcagccaactgttcacgcacctcacctatttgctttaatttcttcaagggctccgatctccttaccatgaatccgcggtaaaaagattgaatacgcacagcagcctctgtatctgataacattttcttctcgagcttactagcatcaccagattcaacattctctgtggatctatttctctcttccactctctcagttgttgtatctacctccttagctattgcagcctccttaggttgatgtccatcactatcttcatcagctttctcagtaataggcttctccatctcagaaacctcagtactagtgttcgctgatgaatgaacaggaacttgagggccatcattatgatgttctgcattgcttgtattctcagtcacagtaatttcttttgtctcagccctctgtctctcacttggagtactttcacgggacaccttcatctcatttgaattcttttgagaacgttctttcacagcaggcggactaagagacctggaattagcattttctttcttctttcttggcaaaggatcaactctaagacaaacaggaggtagtttagccgatcttggcggagaggaccctcttttaccatttgttccagaaggcttgcttgttaagctcttcttgtcaatgtcctcaggcttatctacatctgcatgtggttgatcaacctgcttcaaaagagtgtttttcttagttgcattgttatccttcacctctgtcacattctggcgatcgaaattctctccattggtcttacaattgtctgtgtggttgtcatcaccaagatacttcactggaataagcttgaacttaattggttgattaccatcacactttccagagccgtccacttcctcacgccttttgtcatcagaaggcatccaaactataggaaaaggaaattgtcttattctatcgatttggttctcactcttctgatcctcgttagcatttgtatccttcttatccttgtttccaatctcttctcccatgccattgtagggcatcacagcagctggtttcttttgctcctgagtgcccttgtcgtctccgacatgaattagatgccttagcttatccgcatcaagtgggaaccatccattcaagagattttgctcctgttcttgagttttctttttctcaatgggcttagtctcgcaaggagcggtttcatgctctaccactttaggtggttcaagaggctttttattatcttgcaaatactcagggggaatccatacgaccgggtaagaataatttcccgtctgaactgggatcaaagacttattattccctttctttgccacaacaacatcaggctccccctgatcttcaattctcaaacccttatcttccttctgttggcaatgatgattatgacacccacaacagtaattattcccagacctgttcctgtcgtactcgtatctgggaagatcagtggaatagagtgagggaggaatgtaagacatgtgatgggcttcaggatatggaatagaataacctccatggaagtgatgaacaggtgaaggtggcattggcggctgaggataacaaggtctgaaaccatgaaaaccaggaaagctaccatggctgtaacaggaatggcaaggtgctggatagccataattaccgttacaaggccaagaatcgtataccattggagacttggctggatccacctgtgcataagttgggaaagccctacatccagtttggttggtttggtgtgggaatgtatccatgtgtgtgtatacaggcatcattttgaattatcaactataacaaagcagagctgaagaagtgctctactattatagatacttcttgtacggtctggtgacaaacacgacaatgcaatgcaaaatgttagaaaacgaaacataaaaatatgcggaaaatatagtaaatttggat

SEQ ID NO: 187836 - DNA, 3734 bp, Cannabis indica
aattaataaaaaattaatataactacaaattaaaataataatacttacccaatcttattactattattgttgttgattttgaggatgagctttccatcattatgagtctcaactattaattgtgatgcattttttaatttttcttcaaaagagaatacatatttaccaccaaagttaaaagtgaggacaggcttagttaaaaaataaatatttttggaagcaccaggccatatctcttcaataatttcatcataaggattggaagttgtgatctgaatataatacccagatttattatgaattaacatattcttttccttccccatgatcttcctttcctatacacacaaatttaaaaaataaataaaaaaaaaatcaattaatccaacaaactattaatcaaccaaaactaattaaatgtaccttttattaattagtattaatgattctggagtaggagagaactgataataaagtacagtagtatttatactaaataatatacgggtagggctcaaagggtgtgatattattttgctattaattataatatattttttgaaatatttgatctttttgttacgctatataactaatggattattttggatcgtatttaattattaaaatattatatggaataataattattttttaaaacaaaaatatcttctttttttcttttttctgccagagttatattgttaatttttttttattattattattagaataaataggacttatacattaaaaatgcagaaaatttggtaaaaggaaatgtcagctcaaaagaggctgcattgtactgttctatttataggtgactgattacaagaaaatgacttaaggccacaagagtacaccacgtgttagtggggaccaaagagaaaagaatacagaaaggatatttacacccaataaagaataactaactcgatataaacagagtaactaaacataattacaccagaattaatcactaaattaatactacatcttaacaccacccctcaaacgagaaggggatgctaacaccccgagtttgctcactaagtaatggaatcgtgactgtgaaagacttttggtgaagctgtcagcgagttgctcaggtgttgggacataacgaactttgatttgtctttgcagcaccttatctcgaacaaaatgaacatctattttaatatgcttcgttctagcgtgatagaccggattagcagcaagagcacttacactcatattgtcacaccagattactggtgtagcagtcattttgaacttcatttccttgagcaacccttgaatccatgtgatttcagcagccaggtgagcaagggctccgtattcagactccgtactcgatcttgcaacaacattctgcttcttagaggaccaggagatgattgaattacccaagaaaacacagtaaccagccactgaccttttgtcgtctgggcagcatgcccaatcggcatcacagtatccagacaaatttagttgatccgaaggagcaagatgtattccatgatccatggtgcccttgagatatcttagaatacccttggcagcactctaatgagtggttgtgggagcctttaagaactggctcagcttgtttactgcaaaggaaatgtcttgtcttgtgtgacttaaatactgtaaagctcctatcacactcctgcaattcttaggacattcaagcaattcaccatcattgattgacattggttttcccactgtcatgggagtaggacttggttttatggtagccatgttgtgtctttggagaatttctccaatgtatttcctttgggtgagaaatattcctgtagaatcacgaaacacctctatcccaaggaaataattcagttgtccaaggtccttgagagagaattggtcatttagtttggtgatgaaactttccagttcttgtcagttgttgccagtgactacaatgtcgtctacatatatgagtaccatgataacaaacttagtgtgcttcagcatgaaaaatgaggaatcagacttggaactttcaaaattccacttgaccaaggtgttcttaagttgctcataccacacccgtggcgcctgcttcagactgtaaattgatttctgcaacttacacacatggttaggataggtcttgtcttcaaaaccttgaggttgagccatgtatacatcttcttcaagagtcccattcaagaaagcattatttacatctagttgtttaacttcctagccaaaagtaacaacaatggttaaaactactctcacagtgcaagctttaataacagggctaaaagtctcaccaaaatcaacaccacgcctttgatgaaatcccttagcaacaagtcgagcttttaagcgttgaactgacctatcagtattgagctttatcctgtaaatccacttgttgccaatgatgttgtagctgggatgaggtggaacaagaatttaagttcatagtttcttcaaggcttgattttcaacagacatagcattattccacccctcatgctgaagtgcttctgcaacagagacaggttcatgaagagagagattaaatttggcttgcccaacataaactttgggtttgaaaacccatgcttttgggtttcaacaagtgggtcttgaattgtttcctctaccacctctggcttgaccacggttacctcctccacgatttgacccaccattatagcctgtgcctcctccattgttgtttcctgaagctggttttcgaggatatccatatttgtttggtttttgagctaagctagctgaaggaggtgaggttggtgtgtttagaagcttgttttgagaagacacagcaccaagtctctccaatcgattgtcaaaattgagaagaatgctctgtaactcttgccaggttgtgtgctcacgggcttcaatttgaacgacaataaacaaatactctatgtccaaactagaaataacattagatacaagaagtttttcaggataagggtcacctgcaatagctagaaagtcagcccacattctcttctgtttaagataatccagcatagattgagttcctttcctcactgtatgtattttgtttctcagatcatcagcatttgctctagaatgagcaccatagaggtcttcaagtgcagatcacaaggaggctgatgtttggcaattcatgacttcagatgcaatgttttctgacattgatccgtataaccaacccatgaggagttggccatgagtgatccagatctcgaaatctaggtttgttctgagactaacttctgcagctccttcaacaatggtgtctgcagcaatgtattcaggtgggcatggcttttgtccagtcaagtatccgtcgagtctgtgccctcgaatgatggtggagaccattgtcttccacaaagtatagttatgcctttccaacttcaacgtgaagggttggctgagagtgctactgaaaggagtagcaataggctgagctgcagtaagttgcaactgattgttcgaagaaaagggaacagcacctgtggttccctggccatggttggctggagtctggctattatctgaggacatgaatatggcgtgggccaatgaatgtgctctgataccaaataaaaatgcagaaaacttggtaaaaggaaatgtcagctcaaaggaggctgcattgtactgttctatttataggtgactgattacaaagaaatgacctaaggccacaagagtacaccacg

SEQ ID NO: 187837 - DNA, 3161 bp, Cannabis indica
tgttcaaccactgcccaatccagccaagtcgaggtagtgagcacacaacactccctagcctgcacccgagacaaggcatcagcagcccggttgcccaccccaggccggtactgaatgtcaaaatcataccctaacagtttcaccaaccacttctgatgttccggagtcaccaatcgttgttcaagcagaaacttcaaactctgttgatcggttcgaacaatgaagcaacgccccaataagtaaggccgccacttgaggatcgccaacacgatggccatcaattccttctcataaatggatttaagctgagcacggggtttcaaaatctgactgaagtatgcgataggacgaccctcttgcattaaaacagcccctaacccgtaccctgaagcatccgcttccaccacaaagggcttgcgaaaatcaggcaaagcaaggacaggtaccgtggtcatggcggtcttcaacgcatgaaaggcttcagtggcagctgtggaccagtggaagttgtccttcttcagttggtccgttagtggccgagcaatactcccatagtctttgacgaacttgcggtaataccctgtaagaccaagaaatccgcgtaactccttgagcgtagttggcacgggccaagataacatagcctggatcttggagtcatccacggctactccgtgtccacttacaatatgacccaaatattcaatttgccgctgtccaaacgagcacttcttgagatttgcaaagaactcgtggtcaaggaggagttgtaaaaccatctcgaggtgctgcaagtgagtcgtctcatcaggactatacaccagaatatcgtcaaagaacactaacacgcactcgcggagcaatggcttgaaaatggcattcatctgagattgaaaggtcgcgggggcgttggtgagtccaaacggcataaccaaaaactcatagtggccttcgtgggtacgaaacgcagttttgtggacatcctcgggccgaacccggatttgatggtaacccgatctcaagtccaattttgagaacacttgagcgccatgaagctcatctaacaactcatcaatcaccggtatagggaacttgtccggtattgtctctcgattcaaagcccggtaatccacgcaaaacctccaactaccatcttttttcttcactagtaagaccgggctcgagaatgggctgttactatcttgacaaatgccggctgccaacatttccgctaccaatcgctctatctctcctttttggaagtgtgggtaacggtaaggtctcacactcacgggtgctgcatcggggcgcaagttgatggtgtgatcgtgttggcgtgaaggtggtagcttcgtgggcacctcaaacaccttggagtaccgtgccaataacgaagaaatgtcctcattgtagtgtatctctgttgccaccactgccgcactgccgagttcaatcaacactccttgtttttcagttcgcaaaatcccaagcatagccttcaatgacaccggtatcttatgaagagaaggatctccttgcaacacaattttttgaccgcccaccatgaactccattttatgatcttgccaataatgagtagtttttttcaaagtttccagccattgtacccccaatattacatccgtgcttcccaatggcagaggaagaaaatcttcccttatgtaaatactttgcaactctaacggaaccgagcgacacaccccagccccttttaccgcccgtccgcttcccatttgtaccccataagcctcagtttcagagattggcagtttcaatttggtcgccaattcagtggtgatgaaattgtgagtggcgccactatcaattaaaaccaccacctcttgcccgttgatgcaacccaagagtttcatggtctttggtgatgtcaacccagccaccgaattcaaggagacctccactatctgagcttcagccgcctccattgatggtgtatcgagggcgttgggagtccaatcttccggtgggtcttctatcggctcatcttgtaccacaatcacttgtaactcagctgatttacattcatgccccctataccaccgttcatcacacttataacacacacctcggtttcttttttccctcaattccgcctctgtatacttcttgaatcgagtgggtgaagttgaagattgagtggacttgtagctggaactagacgaagctggggaaagaggagatgacatgtgaggttgcacgtgagtccctttagtggcttcagagttgaaaaatgagttgatgggtcttattgggcctgggctagacttactcggcccaatccgtgagttacggactaaagcttggttggcttcaatggactcagccagctccattgccttgatcaacccattgggctccaagaggcgtagtgggccttgcacctccatcttcaaaccattaacaaaggcagcaagcaatgcctgatcggacatctgccccatggatgccgccaaagcttcaaaccggcgtcgatactcctgcaccgaagtcgcctgctgctgtagttggaaaaaacggtcatacaccgtcccttcgtgcgccggtcggaacctgcgaatcaccatctcctttaattcttcccacgagttaatgggctgcctagaattttcccaccgaaaccatcgaagggctgccccttctaagcacaacaccgccgcctcgagttgctctgttgggtttaatcgttggagaccgaagtatcgatcggctctgaacgtccactcatcggggtcgtcgccggagaagacgggcaactcaattttcctggctgtgaactccgaacggcgtacccaatctccctctctactgtttgaagcgaccgctgccggagaaggaggccgttcgttgatggatctccggcccgtactcggcgttggtccctgggtttcacggagggatagcatctcatctgagatttttgcttgaccgttcaaacacatccgcacctgctccgccaaccccgatatcgtccgatctttacccatttggctattcttgatctctcctaggatggatttgatactgctcatatctgtcttcaaactgttcatatctagcttcaaacttcccacatccgcctctattccatcaattcttttttccatcctcgtcgacggcatcca

SEQ ID NO: 187838 - DNA, 3656 bp, Cannabis indica
gcattgaattctcgcaaaggtaaacagactttggatggagcaggactagtctcttgggaaaaacatattgatttgccatataaactttcaaacatgtccaagaagcctagcaaagtaactactgatcatgacaactgtaacgatacttggattcagtgtgatgcttgtggcaagtggcggaggtttctggaaagcagcacgtcggatgctaatataacatggttttgtagcatgaatactgaccctctatatcagagttgtactgttccagaggaaacatgggacaaaggcgagccaatattatctttacaaggattctacaccaaaggaacctctggagggcaggaacagaatattttattctttgctaatgtgctcaaggagcataggttcttgatgaattttgcaaccaagacagccttgaggtggttaattacactttctccagaaaagctgtcagaaatggaaacaattggacttagaggccctttcatcagcacgtgtgtagagtcaggtgaagatgccattggttttcagaaaatatttgaatcatttggtcttagaagagaagtcacaaaacgtattattaggtggtgttacccacaaaaccttcacaacttggtctttgatgtggctgctctgaaaattgctctttctcagccactggattcaactagtaggttgtatgtatcaagagcaaccctgatagttgttcctgcaaatctagttgatcattggaaaacccaaattcagaagcatgtcagacctggtcaactacgaatctatctttggactgataacagaaagccttctgcacacagtctggcctgggactatgatgttgtcataactactttcaatcgcttaagtgcagaatggggaacccgtaagagaagtgtcctaatgcaggttcattggcttagggtcatgttagatgagggacacaccctcggatctagtgttggcttgacaacaaactgcaaatggctgtttcattagttgcttcaaaccgttggatattaacaggaacaccaactcctaacacacccaacagtcatctatcccaccttcaaccgttgcttaggtttcttcacgaggaagcttatgggctgaatcaaaagtcatgggaagctggaattcttaggccttttgaggcagagatggaagaaggacgctctcgtctgttgcacttacttcgcaggtgcatgattagtgctcggaaagtagatttgaagaacattccgccttgcataaaaaaggttacatttgttgattttactgaggcacatgcaaggagttacaatgaactagtagttacagtacggcgtaatattctactggctgattggaatgatccttctcatgttgaaagtctgttaaatccaaagcagtggaagtcccggagcacaactattaaaaatataaggctatcatgctgtgtggcagggcacataaaagtaacagatgccggtgaagatattcaggaaactatggatgttttagttgaagagggtctcgatcccatgtcagaagagtatgcttttattaagtataacctcctttatggtggaaactgtgtcaggtaagtaattattgatcttttgattccctctggtttcctctttgattttctggattattaataactggacgagcttttattttaggtgtggggagtggtgccgtttacctgtcattacgccatgtaggcatcttttgtgcctcgattgtgttgaattggacagcagaagatgcacttatcctggttgtggcaatttgtatgagatgcaaactcctgataccttagctcggccagaaaatcgaaatccaaagtgggatgtccctaaagatcttatcgagttacaaccatcatataaacaggcatgtttatcttaatggtgcattcttcatttttaaaacaaccaaatttaatttttcatgtttttaatttgtttgctgcatctaacttatacatgtcatttgatgcaggacaactgggatcctgattggcaatcaacatccagcagtaaagtttcttatcttatacataagctgaaggaactacaggatgctaacagggaggtctatcagtctatggacggtggcactggcaaccaaaatattgagtttttactttcttcttctagaatgaatgaatttgatgaacggacacaagactttggtagttttagaacgagttctactcacaaaagaattaaagataaagtattggtattttctcagtttctggagcatatacatgttattgagcaacaggtaatcaatctaaactgaaaatatttctgttttttaatttattttttatggatttcatttgtacgattagatctttgacttgttattgtttccagctaaccatggctgaaattaaatttgctgggatgtatagcccaatgcatgctggcaacaaggtagttatccttttttttttctttattattattattattattctttaatgcttatttgttttccctattttaaattgctaactccctttatttggttcagatgaagtcgttggctacgtttcagtatgattcaaattgcatggtgcttttgatggatggaagtgctgcactcggtctcgatttgagctttgtgtcacatgtctttttgatggaaccaatatgggacaaaaggtaatattcgtacttcaacttttttctaatgactgttagaatgattgtttatgcaaaagaaataattttgtatttctattttcagaaacaatgtttttttttctttttttttgtgcaatatattctcatccttgtttgtaatattattctattgatttggacctgattagtatggaggaacaagtcatcagtcgtgctcatcgcatgggtgctacacgtcctattcaagtagaaactttagcaatgcgaggtaccatagaagaacaaatgctgactttcttacaggtaaactctttggatgactctgccattgataagctcacttacaatataattcttatcatatccccctcattcttctaccctcatatttttggtatcctattcattctcattcactgccccctctcattacaatgacccatgtacttatttattatattctactaatctcggggtctatcatttcttttggttcttcctctgttggtgagaagatcatctagtagaatatttaaaacaagatatagatttaaatatattaagggatataagttaaggatatctaatgttcaaaaaaaatatattcaaggactcttttggactaaattgaaaaaccgaagattagtttttaatttttgaggaatttgtaaacgtggtatctttatttctattttttttattctgtggccaaattgatatattccatatatatataatataatcaaaaattgatgggagaaaattattgtcttattggtttatctttcaggatcctgaagagtgcagaaaacttttaaagcaacagtttggaaggactgattctgaaggtactcgaaatcatcgctcattgcacgatttcgctgagagtgattatctctctcatattgggtttgtagcggaaaaatcctaagacataaaaaggtttgtgcataatcccttatgctttcttgttaacttttgtagatattgcttgaagttttgtggattaag

SEQ ID NO: 187839 - DNA, 2021 bp, Cannabis indica
gccactgagcagccaccacaagctactgtgaaaccacttccagccactgtgcaaccaccaccggctactgtgcaaccaccgccagccactgtgcagccacagccggtcattgtgcagtcaggagcgcaagccatgttgcatccgccacacttgcagccagtcaaagaggtaactccaccagccaagcgaggtcgtggcaggccaaaaagggtcacaacagatcaatcccctggtgcagcggctcaaaaactttctgtaactgcaaaggtagatacagggctaccaagaggaacaactgtcagctctgaaacaatctcaagttcgaataccttacaggcaggtattcctggacaagtgcaatatgccaatgttggggttgcaagctctcagccagtcattgccccctctattactccaggtcctcaatctagccctgttgtttcttccacccctggtcaagtaagggggcaaggtcgcagatctcaaagcggaacggaaacacctcgtcgtaggggtaaaaaacaggcggttgtgccaccggcggttgtgccaccagcggttgtgccaccggcggttgtgccaccggcagttgtgccaccagcggttgtgccaccggcggttgtgccacctgctgttgctggtagtttaattggtccagatccaaaactaaatgatcttacacagaataaacccgtggaactgttagcaaatcaagcgactgtcaccagtgaaaccacctctaccattcctgcaacccaatgtcctgatattatatctggttctactgctgtacaaagtactggtggaactgaccatcatgccaatttagatgctaccttaaattctccacaggccaatctccagcttgctgcacctgtatctctctctcctatcccgtctgtgcctgtgcaaacaaaaggacaaggtcggaggaatcaaagtggaggctctggaactcgaaggaggggtaagaaacaagtaccaatggctccccctgtgtctggtgcttcagctggtgaggaattaaaaccaactctgaattcacatgttaactctgacgatatgtcaaagggtgataccgtgagaactaaacaagagaatatttcagaagtgacaaatgttaccaaggagcaagtattcctttcacctgaaggtgtagcagctcaagccataaaaccaactgaaaatacagttgatctttctcaaggaaaacagacagatagctcttcaaccttgcatggcagtgctgatgggtcccatggtgagtactatacatgcctaaagcttataattttttgcacttaggtggtgtttggtttgatggaccaaactaagagcaccatggagctggaatatgaatgggaatatacagaataccggttgaatgctaatcttttctttagttggaaattggaattaatgtttgaccacgattgctatgttcggttagttgtttgaatggaataatatctattttaacaaaaatacccaaattatttcttatttatgttttatattattgaataatgtctattttcaaattatatatgaaaaatttcaaactttttgattaattttaaatatattttattattataaataaatttatataaatatgttcaaagaacactcaacttatttataaaattttgatctatttacttttaggtgattgagtgttgactgcaacaaagatatatgtgtgtgtattaatgtatatagtgtttgtatgtgtatttatatgagaaagtaaccagaaaagtcgtacaatgctgacaaaaatttggttaaatacattacctatttttggtttaatgtaagtaaataatcatttcattgattaagcattggatggaataagtattccactggtcctctttagaaatgtggttttagttcaaattgtcgaatagttatttctatgctttttttttttggtcaaaacgactaccttaaagcaagaatgaatctaagggtttcaatcttgtgcaggcactgtcttggcagataaccaaagtgct

SEQ ID NO: 187840 - DNA, 2086 bp, Cannabis indica
ttgaaagagtgagaaagtcaaagtgaaaggcaaggctaaaatgaaggactcgtgaaggcgacggcagctggttgtgaatgaatgggttattgtaatcatgtgcgatttgtctaattggggtgggtgactctccatccctagaatctacacgatctttttctccttttcttttaaaccattctacttggtcttttcattcaatctgttatttatttatttatttatttatttggaaggttttatgattgtgttgttgtttcttgtgtcatgtggctagttttggtgggacgtgagtcttttggacccctttttggatgggctactgaatgactactcactttcaattcaggggtcccatgtgaaattaatcactatatttggatcattttactgaacctgtaaatagtgctaccttgttggctttcttgtatcatgtttttttcttgaccagtaaaatgccaaaaatgagttttagaaaaagtatcatttgactattgagactccaaagtaaggctgaatgtgaagtatgaatataacctttaaatgtcatctgactttgcactaaatgataaatggtggccaattagctccactgttactaaatagcatttgctctctaaaattaactcacaacttaacattatttttagctgatctgacacgttttgaaagtctgctagtgatggcacgagtctctgctcgtttcaggatgaacacgaaaaaagatgagagtcttcacatgtcggtaattgcatacttacttactacatgacataaataagcaagttatgggaccatattggaggaatgatgcactaaatatgagacaactcaaattgaattgaaattgggtttttcttgacttgacagcttacacatgtttgtaaaagaaaacaaaagtttgtttatgaacaattgggaaatttttggatgaattattattttattacttattgatacagctttgacatatataaatgtgtatgctgaagttacatttttgttaatggataaaagtaataaagaatggaaggggtttccagcactgcccaccaaagttccaaaccaaaatttcgtgcaaccacatacttctcagtccatgagtttataccttttctcttggactccggcaactcccatttgtatctctattatagtgtgaagtggtatctgagatagaacaagtacaataagtaaaagaactcataataacacaaaatcttcacaaaaaaatccgatttgcaaatcctgcggttcccaatttcttaggtattaaatcaaatatgttgatttttttattttaaagttataaattacctcgatatggggaatttctttaagaggcctatcagcaaagtaagcgtataatgccctcaatactgcctgtaataatattaataaagaaatatagttgttatactttgtggtaaaatattagaaactgaaaaagcaagttcggagtatatggtgaccaacctggtgagatattaccacgacaggtgctcgttgacgttcaagttcaataattacaggctccagcctgcagttacagtcggactttaattcaagaattcattggcatcaaaataatttaaatgaaactaaatttcaggattgcaacaatgtcaacctttggataacatccagataagactccccacgaggatacctgtacctcagtttatccttcttccgcgccctgtaagaaaaaaaaatgatagtaaaaagaacacagtattgaaagagcccacaaaaatggttttaagaagcgggtcatgatttaagagagaaagtgagagatgcaacatactcatactcctctggcatgttcttctttatttcctcgtatgtcattccatcacaaactccagcatttatctcatccaaggcgcgccattgtatctataattatttttagaaatggtgaaaccaactaatctttaatccttggttataataaaacaacagatgtaatgtttgtttgattttaatagaatgaacagacaaaatgacatttacagggcatccacttagagacctttttagtcttaccttggggaatccaggaatgtgactcgctgtcaga

SEQ ID NO: 187841 - DNA, 3178 bp, Cannabis indica
gaagcatattattgtaaaaatgaactattattttatctttatattactcatttgtatctccatgttataagagatgggaaaatggtatatctaaccttttatcactattcaccacgttaatcaaaagacgaaaaaaatgccattgacaaaagaaaaaaaaaaaactatattaattattcatctccaaattaatgattgaagatcactatttagttggtaaaacgataatggattaaagggaaaaaaatcaaaatgaataattagctaggctcctcatgaatcataatgtagttcaattcaatcatggcaatcgatatataggggttctataaagagattgtttgggtagagagttttttaatttatttttttactataatcgtgtatatgttatagttatataatatcgtatgtaaattttttataaaaatctcattaatttatataatgccaaaaatgaaatttacatattttgttgtacgagtaacaatttttttttatacacgtcgtaagtaactgttcaatcttatttttgctacgataaattatttgaatttttctaaaaatttataaataattctataaaattacaacataaataattatgaaagaaaattagattaaaaaatataatgaatgccgagagggtctaccatataacacccctcctttagagatatactgcataaatttccaattatatatacattatatttattagtataaatcatatatgtatatatataggaaatgattttatcccgtaatgtacttttaaagaatgtattccgtagtatattagatgggtctcaggacatattaaatgagtatcagggtacgtttctattttttaaccctaattacccctagatcaatcgcaaccgtcagatcaaataaccctctcatctgatggctgtcgtaccgtgaaagtatatatatatatatgcaggtaaattgtcacgtacgatgggtagcaatggatgaacaagccactagctagagtccaatatgagcactgtggatgatatcatagtgtgcatgcaatgaggaggcaagaagtgacaccctccactattcaaatggagggacccctttagactcttgcaaattaatgaaactaattaacaaccaaatgcattgccaaataggaataatgcaatacgcataaaatcaaaagattttgaactattattgcatgatggaatattttattatagtgtggataatgacacttgcgttacaccaaacatgaaagataaaactcgactgttatgctagccataagggtaacaagagatagtcgacttaggtccccctagtcataatatctataatacatgctctcttatacgtacatcatgttttaataaatggtcgattaaaatgagctaattaattaacctttcgccaagaagactcgtgtgcagaaaaaattattgttaggtatcgaaccacttttgagaaagctaagctagctaaagatataaagcacttgcaaaaatactgaccagtatccaaataatcatcataccttaaaatgaaaaatgacatcaattatgtaaaagagatttgattattcgaatttggggtaccatgcatgattacataaatactctttttctaattaaaagaaattatcttcttcatttacctcaaattgttaattaatttggccccatttttgccttccaaagtagcagcagacaaactaaatatgctccacgaaacaattaaaataaaccaaatgtttaactttttcaaattaattgattcaaataaaaactcaaaaaattaagagtcattccttacgccaaattgcaaatcgcatacattcattaaagaaattatgcataatagaaaaggtgtattacaaatattgcaacacaagatataataaaatgatgatgagattttcatgtcccccaaccccccaaaaataaaaataataataataataataatatagtagctattttttactgggttgtccagccaattcaatcaaagtcgaatctccaaccctaccaatagcctcacaactactatcctcatttctcatcacattactattcaacccactatatccatccctccctttgtaacgccgagccacaaaaacaaagacgaagaaattaactaagttaatagcagtcaaaacccaataaaaatagtcaagcttactcatattaagattatttctaagccaacccttgtcttcaccaccagtggctcggttaataatcttaacaagggccgtactaagccaactccccaacccaatctcactcaagaaaattgcactgctaatactcctcgtaccatcagttgcttcgtcgtagaaaaactcaagttgtcctacgtaggtgaaaacctcggcagttcccattaagaagaactgaggaaacaaccaaaagacactaaaaacattattggtttcggttcggcgcttgtgttcaatgattgctgctgaggccaaggcgatgactgagaatgataggccgactcccattcgctgtagagatgttatgccacgacgatgaccggttcggttccgaagaactgggattatgaatttctcgtacataggaaccagaattagggcattgatggcactgaagactgggactgagcctgctggaatcttgaagtttggaccaagattgcggtccatgattgtagcctggctgataaagaaagttgagaattgtgcgaatgagattgagagtgctatggttgctaaccatatgggaagtattctcacaaagcatttcatctcttctacttgtgttactgtcaccatcttccatcggttctttattattacgtcactattatcttcatctcttacaactatggctgccttgtccagaaaccttttatgtacatatgttacaataattagttatatatattgatcattcacgcgaagaaaatatttaataaacaagcttagattattgcaaaactaagcttagattatttaacagatctagatcaataatattatgagcttcattaaaactagaaagaataataaaaatatattgcaaaaccagacccaagaaaatatctaacgtacgtagcaacatatgattattcttataatttctttaatatattatagtggtatggtatatattcatatctcaaatataatgatattagaaagggtaaaaaa

SEQ ID NO: 187842 - DNA, 4994 bp, Cannabis indica
ttaaatttacaatatagtttggctccttcctaactttcattctgactctgccctgattaagctcaagttatttgtgttgaaactataattttaattggtgtgatctttattgttattcttgctgattttttatctctactctctgcattttgtgtctgttatttttgtaacttctacgtgtaaatgaaactggtgtaagagaagtccattctctaacagctaataactaaattgaataattataaatcttattttttatgaagataataaaagcggtaagttcagcaaataaatcgttctcagaatttgttaacagtgataatggtgcagaagattagtgtatatttacagctataattacaccaagttcactggttaatgatttgatagataataatggtaagtcaaatactttctccaacgttcaaaaatctttttcaattttatttataaatgcatttttcaaacaaaaaaaaaaaaaacgttcaaaaatctttaaattaagggactttgattatagtaaaaatgttcattttttctttaactttaataaccaacggccacctacacaattttgtgacttgtattcaaactattagcaactccaaaactggaatatagaaaagggacaaaaaaaaaaaaaaaaaaccccaacttcaaaatttgtgatttttagtaatgaagtaaatattgaatgttttttaataaataaataaatattcgatcttaatcaaaatttatctttgaagaaaataaaactcaaactcaaacccaagatttattattttttttttttagtacaaagatcttaataaataaatatgaccttttatttttaagaaaatattttaatgattcaaagtcaaattataaacttaaatgttaataaaataccaatttaaaagttttaaatgcatacacatgatttattggttttattcgtttgcttttaatatttaaaatttatagactaattaacaaaacgatgctcataaatactaaattttgaggtgaaaaaaaatacacttgtgacatttctataaaaaattaattttttagaacaacatattgttaaattgatgtcatgtcaatgttttactacaagaaaagagacttaatgtgacaacaaagatgtcgtctctatagatacgtaatgcaacgatatgttgcaatatacttaccctacccataaaaacttttctaaaaaattttattttcactttcatttattatttacgaaggccctataatttggtgtggatagggttgcaccaaaaaaaattattttttaaaatttgagttacctcttgcgatgacattttgtcgccatctatattataactcaaaattatttcaaaactttaatcacctacatcgatgaaaaatcatgacaataggtaataacattcaaatttattcaaaatttgaaccatctatcgtgacttgtaatagggcttcaataatcaaatttaagtgacaactttggattattcaaaggcaataagttgttgcagtattggaaccctacggcgatgattcgctctatcatcacaataacgacttacaatgtgcatacaaaactacatcgatgcctctattacaaatgtgtcgtcattaaagtcctactatgatatatcaggataaaaaaaaaacattggatactcaatgcattttagaggttaaaaatgatggataatgcattttgatggttttatctatcaaaagttgatttgaaaatcaatgtagaaaaaaatttgatactaaactgttgcgcgttattgaatttagctaccacaacgaggttctatagagaaaatcgctacggcaaatgacctacaactaactggattgcatagaactcaaaacaaaaataactaaaaataaaaataaaaatataaactcacctcaaacagtaaaaagtagttactcttcaaaatatttatcaaatttcatgaaaatgttaactacgtgccttttttttttcagaccaacacaggaaaatcaaaacaacattatttctagtatctagtaagtttttatgggaatatcgcatatcattgttattatttttcactcaaaattaagttttcatgagactatcgtaacatcatcacaaactatcgatatagcatcaaaaactaatgattttgttgatccatgtatacatcaatttaatcttgtttgggcgtcaaaatcaagttttcatggagcatcgcaattcgcagccgtgtcgttcttaattacttcaaaaatgtttttgaagcagagaaccattacttgttcacacgaaaggtgagcaaaatgaataaattatttacagatatggtcaaaatctttaaatgccaagttttagaatgaattttgaatcattaaaaaatgtaatagatccgtgtgttaatggctggcgagtggtgactggttagaggctggtatggcttgcttttatttttggttacgggtaaagaggagagataaggggctgtttggatgacccaaacagtttggtcaaattttgaaaaagggcatatctttttttctgaatagggcatactaaatgtaaatgcaaggtcaaattttccattgaaaccgagaatcaaattcacatttaattataattattttttcaaagtttccatgataatactgagtctgaaactatccatatatataaagggcatcattcattgcctaataaaaacttaataggaaaacaatccatggcatcattgactgcaagaaatccataggattcagcacatatattgaaaatgaagttccaatagtgtaaaatttattctaccaaacaatacaaatggaatgttgcaaacgggcatacttaagcaaataaattaatatttaatctagagaaaaaaaaaacagatacaagaaaagaaaatatatagaattttgtttttcccatttacttgaatgcaatgccaagcattttatacactaaaagcaaactgcacttgcttattctttttctttttcttttctccttttttttttttgggtaataatcttcacaatcttaatgacatggttgtgtaggtataatgagacatcacattgaaaattaaaactaacccctataattcttcacctgctctgcgcctcaatagcataattacatgccctatgaacgccttacggctccacaggagtttgcagttgattgatccgtcgtaccaatcgttatgtttttcctttctttctggtgtcttcttctgttcaaaattttggatttcccacctttctttggcggagctttatgatgattaaataacatcagtaaatgaatatgaatactgtgaactaaaaaacttctcaggctatctttggaaacccaataatactagattgcttgtctcttgaagaaaggcttctggcagataaggagcctctcatcactgttactctccatctctataactcttgcatcccactttagccctgttgtcagcgctctcgctgcttcaataagaggagctctgtcacggaatatcacccaaccctgcaacatcccgtttggttagccaatacatataaaaaggcatccaacaaaagtaggtcaagattagaaaagaaaatctttagatataaacatataaccattttgtttaacaaaggtgaaatagtatgcttgcacatggtagctacatgtgtttggtaatcaccagtcgccatggtgtgaggcagtttgccgtactctttgagacaatgaaagaccgacgacgatcaatcaagtcattgtcatcgtcattgaaagttttatttcctagctagttttactattagtgtacaccgcactcatttcaagcattagggtcaaactaaagactggactataagtaaacacaccaaaggacaaaaggaatggatacatttacgcctaaaacagtgccttaatataattacagcaatttgttgataaattttgatttttctacatcatcacaagcacttcaaactaaatttcaacatgaaagagtaatggaaaaactgaattgatggaatgaaaagataatcaataggttttaatacctctggacgaagtaagcgatcaatttcagcaaatagatcaagcgtggtacacctgtgctgctgtttagtttcaagagatagaagaccttctgcatgcaccatatcataagttcttgggtacgttggaaaagcttcacacctgaaaaagagaaaatgatcatgattcatgatgttaaggattattgaggagcttagaaatgtcatttacactagtcaggcaaggtaaatactgaaaccagttaatgacattgcatagtagaactattaagtatcctctagtacatgccactttattcctgcaagggtttagccaaacatttttccgataacttcaaggttacaagctattttggttccaaattttaaatgccataagctctttacttggttgcaccttaaagtacctaggaccaaatcaaccaagtattgtatatgaagataatgagagaagagggatgggagcaagtagcataccaatcatgtaaaacaccaacataaccacggtcaagtatcaaagggagatagttaggcccgctcgttggaataacattcatgacccatacagactttccagcttccagtagtgcagaattaaaaccaccatattgagcattcatgtcaagcacattcctaaccatgttataaggtggtgacggatcttcatcacctggcctctttggatgatccgagaatattaaaggtgacagcagtgaccaataattacgaactgacattttccaattttcagcatcttcagccaattcttctgggtgtaaacctgaaatacaatataaactattaatatatacagcttgaacaactttttgttctgttgttttttttaaaaattttgattgcaataaatcagtacatacagttatataaaatcctgcatcaacaatttaaagcaactgtcattttttttcttttttttgcagaagcgctccaca

SEQ ID NO: 187843 - DNA, 4636 bp, Cannabis indica
agtggtgcatctgagcttgactgtactttacagttattctgttgagtgtaatcatgtgtatttgaattgtaatttgtacatacttagaattattggatcattgagaagttaaatttttccaatgactccttacagctatccttaattcatgactaaaaatcacacacacacacacatatcgttgagcttaatttgttaaatttttctcttagttttattttttaacatcatggttatactatttaactcaatagtttattgatttgtaggatatgtcttgatgataaccatacttcggtagttgtagcttgtgctaaagtcattctgcgcatattgacatgtgatgcaaatgagaactacttcagtttttcagtaggttttttattttcatatatttttatgcattatccatcctaatttagtctacaaaaatgtacttatttcaagtaacttttttggtttcagaaattgactactctcaaggacatctgtactgcccctgtgtttcgaagtaaaccccagattgatgttggtttccttcgtggtggattttggaagtataatgctaagccttctaatattgttactctagatgaggaaattattgacgatgaaactgaagggaaacatacaattcaggatgatattgtgtttgctggacaggattttgcagcaggtttggttaggatgggagtccttccaaggctacgctatcttcttgaggtctccagcattccattgaattgaatatttagtttacgttctattaataaattaacatattatgcaagttgccagtcattacttggaaattttctggaactgaagtatcctgcttgttgcgaatgcaataatatatttcaatgtctgcacttattgtatctagttttattgtttgctaaatgtattaattttattgtttcagtcaactccgacagcagttttggaagagtgtgttatttctatacttattgctattgcaaggcattccccaacaagtgcaaacacaattatgaaatgtgaaagacttattgaagcagttgtacacagatttactgcaaaagaaaacatggaaatatatcattctaagacaaaatctgtgactcttttaaaggtaaatattttcttatgcattattttggtgaacattttggatttgtaggtattgtacattttacagccacttattcaagtacaataaggatagggaatgctgacatgatcattattgtttctgtttctgtaaggtgttggctcaatctgatagaagaatttgttttgaatttataaagaatgggtttttccagaccatgacatggcatttgtatcaatatatgccgtcgcttgaccaatgggtgaaaactgggcaggagaactgtaaacttctttcagctttgatggttgagcaattacgtttttggaagatttgcattcagcatggctattgtgtatcatacttctcggatatttttccttccttgtgcttgtggttgaatccacctacagttgaaaagcttatagatttagaccttcttagtgaatttgcttctgtggcagcaaatgcgtaccttgttctaaaggctttggctactaggcttccaaattttgtttcacaaatgaatcaaagcaataagatccatgaacatgctgatgatgacatggagatctggcgttggagtcatgttggtccaatgattgatttagcagtgaagtggatagttttgatgggtaatctacaccatggtagtcataatttacacaattcatctgtgacttctttgctgtgggtgtattcagctgtaatgagcatgcttgcagaagtgctcagaaaaattgtcccagatgatatcgccaatcagacaggaagtggttggcttgtcccatggcttccagagtttgttcctagagttggacttgaaatcattaaaaataaaattttgagtttttcggatgctgttgatacaaaatttgggtcaggtcttgctggagagatctcttttgttgaaagactatgccatttaagacaacaaaatgaatatgaaacatcattagcttctgtaagctgccttaatggaatcttcaagactatcactaccattgataaattgatccagttagtcgataaaggggaacaacattcccaagagtacagtctttctagagaggaggacgtactcaaagatgggttgttaaatcgatcttttgttgaattcagaagcgtgcaaaatatttttatgaagttagttacttcagagtggcaatttgtgcagtccgttgagacatttggcagaggtgggcctgctcctggggtgggagttggctggggtgcctctggaggaggatattggtctggaattgttttattggcacaagcagatgcaggatttatcattgatctgcttgcaagtttccagattatgcctataaatgatatgctcaatgctgaagaaatatcttatgctgtgcaaattgttaattcttctttagcagcatcattaattgctgggccaagtgatagaactgttgtggacaaggcttttaaaattttggttcatgtctctgttctgaagtgtcttgatcgctgtattcggcattttgttcatctcaatagtagaagtaagctgtttggctgggaacataaagaagaagattacctactctttagtaaaatattatcttcacattttggcaatagatggctgtcactaaagaagagcaaaaaaattaaaagcttgagttgctcaacaaataagaacttagttaaaaacagtggttctttgagcaccatatatgaggactcggacacatcaaataacattgaagattgtacatccttagttgtagagtgggctcaccagaggcttccactacccactaattggtttctaagtccaatgtcaactctttgtgaaagcaggcattgtggccagcaaaaatcttccaatttagaaaatcttatacaggacgcgggcgatttgcttgaagttgctaaagctggactttttctcctcttaggtatggaagtcatgtcaagtttccttccaagtgatgctccttctcctgttcagagtgtaccgctagtttggaaattacattgtttgtctgtgatcttgcttgttgggatgggtgtgatcgaggagaaaaagagtagagattgttatgaagctttgcaagatatctatggttccatacttgataaggagaggcttaaagatgctgaaatgattcgggagaaggatgtaaacctgttgtcagagtctagaaatactgactttttggactttttaaggttccattcagagattcatgatagttactcaacattcatcgaaactcttgtggatcaattttctgctatatcttatggtgatctaatttatggtcgacaagttgcaatttatctgcacagatgtgttgaaactcgtgttcggcttgctacttggaatacactgactaatgctcgagtccttgagcttcttccacccttggagtcttgctttggagaggcagaaggctaccttcatccagaagaggtaggcaaactagtttacatgtctatactatttaaattgctggatgatcttttcctgcttttgtttccagttgccttttaagctattcttgtattgctttcccagcaaatatcttatatcttgctggaactttgagcatttattaaggaaagttatggcaaaagtgtataatgttttttgacaagtaagaagtagaactcaaggttcaatgtttttatggattggatgtatttgttgaataatcttgagaagcttctgcatggattgaatctcatgttcttgcatgaatgagaatttgaaaattattaaggaattctttaatttgttaaggttttatacattaatccaattattagaacacaaattagtactgacatgatgcattgatgcagaaattgatggaaaaataatgtatttcttaatctgcaggataatgatgaaattttagcagcttatgtgaaatcctggacttctggcgccctcgacaaggctgcaagtcgaggaacagttgcatacacactggttcttcaccatctttcatttttcatctttcatttctgtgctggtgataagttattgctgcggaacaagcttgtgaggtctcttctacgggacttctctctgaagcaacaccacgaggtttgcgattttcgtttttatacaattcttttaaattccgttttgaaattacccacagttgctgaaactagagcattattacctgccaccattccgttttttttttttattgctgaaatggtgtccactctcagctgtcaaaactgttcttatcttcaatgggatgataatttagaatacttcttgtcgttgcctcatgatttttaccagcagtgttcttggtcttttggaattttatcatcgattttgcttgtacgaaaaaataccttttattttcatgatgttcctggaatgttgtaaaagggtatctgacttcttgctctattctataattgcaggtaattatgttgaatcttatccgatataccgaaccagaagtgcggcagaattctaatgttaaagttagtttaccattagacatggagaaaaggtttgaggtcttaactgaagcttgcgaaagaaat

SEQ ID NO: 187844 - DNA, 2999 bp, Cannabis indica
aataccagttatatacatacatatatatatatatatatatacaacaacaaaaaacacatattatgttgcattataggtttcacatcaaagaacgtgacataaagctatatgaatggtcattatttacatttaaattgcttttacattcatatttcttttttcatatatgtacaattagatatatataaaaggtagggcaatttaggtcatttaattttttttgttttaccataatataattcattacaatttgatctattacaataactttattgtttgattggttttgaaaatattttaatgtttttacaattaatttaatcatcatattactattacatacattacaattagatacttatataattatgggatattcacggtataaacacgtatattgttcactttcttattgcacttaaatttttatgtaatttttttggtggcaagaatttatatattgctcattatatttcacttaaatatctatataattttttttggcaacagaaatatctatgtagttcatcttttagcaacaaatatcactatatataatcattttgttaaattcaattttcttaccttttaagtgctcaaataaataatatagaggtttgattattggattgaaagtctcaataaagtaaaaccacattgttgatgaaactttttggcaatcaactcagctttatacctattaagagaaagttgctgtaaatatctccaaaaaatttattttgatgcagataagtcttcaacatcgaaaaataacagtaatagtgtgtatatatggtgatgtgaatgccacattataatgctagtttgtcaaaactacatcctatctttgtggtaattaatgaaatattaattacttgattgttaattattatgtttccttatttagtaagatattatcttttgtctgagattctagggagtcaatccctaatcttatgtgattaggtagaaaatatgaaactatattggactccgtgtacacgttgaaggcttcttctagctatgccagggccggcctaagtattttgggggccttgtgcaaaattgtaaaattggacttttttttttaaaaaaaaatcgtgtacattaaaactacaattctattactagttttttttttttttaagtatttgttcataaattttcaattataaattttttatttatgtatatataataggaaaaaaagaaaaaaaaagaggccttttcttaaaaaaaatataattgggccttaaaaaaatgggagccttgtgcaatggcccaagctgcccaatgcttgggctggctctgagctatgctagctattgtgtgccttccggatgttgaccatgctggagtagaacctcgcctggatgagttgttagttatttactgggaaggacaaccagtttatggatttggcccaacaatgccaatcatgggcttgttattgggtctgaagtatttgagctatatttattatttggattccacacgtctcctgtcaaaaatactgataacatttacccccaagcttctagaatgctgtgagttgcaggagcttgcttcaagctgcatatggatagacaggtggaggctaaaggtgaaacctttatagtttccagatacttatgtgaatggaagaaaattttccgtttttcgaatttaagcggtatgtgacatcgctttattaattggttcatggagcaaatgttttctgaggaagttcttggaacaaaatcattaaaccggcagctatttactttggtgcaagtctcgaggggaatataatcatgcatattttctcaattctagatatagcatttaatgcttgactgatggcattctggatcattagatttgttttatttttccttaagattagatctgaatccttgatctgggtatcacgtggatcgcttctttaaagcaaaaatatcttgaaaaaccaccatttaccacttttaccaaaatttaaaacttctttcaagtttatagagaagatatctaatatgaattaagcaattctggtgcacgatatcgactattgcattcatagtgattatttgcacatctttgaggtaaccctttgcgttggatcttaactttgaaataaattctttaatcgatcaagcttatgctattcaagaaagacttgattgtctcgagtgtccgtctatagaagaattcagtttgacaccatcatttggcgtcaacatctattcctcgaggccatatttctttgcatgtccaaaatcttcacccagttcttcaacatgtgatttttctctttttaacttcttgagtcttgattaatatttgaagtataatatctcattctgaaattacatgtgctttatttgtcatttgatgagtagaaattatgcatgtgactggattctgatagagttaggatattctggatattgtattaaacaagttttgcgtctagtgaaaactagatttttcattttccttctttggaaaaagttaacttcgcagtagaaatgttggcaaaatttttattcctttgtcctaaacccttatggttcaggacgatgcttttatcttcctttcgtttggctctcattgttcccaatcttaaccgtctagaatgattattccttaagagttttgattccagatgtaagatttgagggggacctctccaagcagtttatagggaagtatcattttaactccctgctatcttctttagtatgggtaattaactgcttgatattttctttcttatcctatgtgggaataatgtgtaatgttatatgtgatatgggtatacaaacaaggtatgagttgatttgatgttcagatattattatgtttatgactgtgttatctagttgggggggggggggaggggtttagtgtcctacattgctcttcttactgggcgttgctcacgagtactttgtgtgcatgtaaagttaggcaaagctaaacagtgaggatggcgagctcgagacatggattacatgtta

SEQ ID NO: 187845 - DNA, 1618 bp, Cannabis indica
tattaaaattgcaaaataactttcaacagtgtaaatttacgactataatgatttaccgtggtcaaatcaagattaaaacggtttgttgtatagcatctaattttttatactcgtgcaaaggctattttaaattctgattcggacactgaaaattattcggaatttatccaaaacttgctaagtgtttgttgactacaataattactctcataaacatttttttttttttgaatgaaagatgatatttattcaaataagcatatggaggatcatgcgaacaatttaacaagaaacaagaccctttagtcatacaaacagtcttatttgcagaccgtttaacaaaaatccttactgtaaagttaattttttatgagcaccataataaaaatcccaatatatttgtatatatatatatatgtttgattgtggtatggtgggggtgcagttagtagttggtggagtgtgcacagatatatgtgtgctagactttgtttgctcaacaatatcagcaagaaaccgtggttttcttggccctcttcttcaggatgtgatcgtttattctactgcttgtgctacctttcatattcctcctcatgtcactacaaacactaaacaggttttacctcatccacaggtaataataataaagctaaatagtgttataaatacctaaagttttaattttataaaatgattttatactaattgcaaatacaaaattttgagtttatgctgtaattctccctaataataatgtcttgttttggagatggtacaattatctattttatgacaattgaaccctcaaatttatatgcaacatatatgaaattacattggtgtaggtccactagtgagttacaatgattatttttatatttattaattttggtcattgaatgattttgggttgcaggagtttatgcatcatgtaggattgtacatggccaaagaaagaggagccaagatagctaatgaattgtccttcgttgcagctggaaaggcaatatgaacaatgaacaagtagtttattacgatatgtagtagtatttgcatggctatataaataacacccaaacatgatgagagtgagtggaaactacaacaatggggttggttagtttgaaacattgagtgataatactatctagtttgtaatattataataaaccaatatatttatttagaaataaaatcagtgtttgttaaaaaaatacctaatatagtaaatcagccaatatatccagtttacatatgatgtatcaactcattaaaattttgcaaatttcacatgtaaaagaagaaaaggtcgactattgctgtaattacacaatataataccacaatttcatgattgttttttcattattagagaactaaagatcaacaaatttaacaaatagaaagatacaaaggccacatacaatattttaagaacccatattatagaaaggctatttatttacagagataagactatgcagttctcctcaggtaattcacaaattccgttcttaccaatcggaacaatggaagtgctaagaagttacaacctatgaaaataggctatgcaagtaaaattttaatttcaagccataatattcaaaaggaaaagaaa

SEQ ID NO: 187846 - DNA, 2576 bp, Cannabis indica
agagagagagagaactgtgttatatatattataatcacacaaataatgattcaacctagctagctagcaggctaagaccattattttgtgacacaagctgagttgcagacagaaataagttatactttagagaatttgagtggctgtatatgaaagcttttcaataaagttgcttccttcaatttgatgaatagtaggtttcaaagaaaataaaattgatgaatagtaaaagctgttgggatatacatatatataatatataagcaaactataacaaagtgagcaataataataatcaaagataagatatatagtccacaaagcactctagatcactagtcacagtagctgatacgtttctagccaatgagaactacaggatgttggtaatgatgcgatgtcaccacaaggaaacaattagctattatacagttcacatcacaattaggccgctgccctaccataatgtaaccaattatatccattaatcttactattactgtctcatcaatgctcatatatattttttcatagacagcctatataagtgatatacacgatccacttgctagtcattcgtgtacataaatattataataaaggtttaattgttaataatcaatattgattataatgatgattatgagttaattaagatatcaatatatatctagttttaattactatatttacataaatggagatcatatctgtgacaactgttataactaattagtgccatattatgtgtccaaactagctaataataattattaccttattatatatatatactaatactaatatgaatgtgagcatcacctatttcgcattccaggaggcacaatatctccaagcaatccctgatcagcggaaacctgttgtgaagtagtacttgatggctctttcaatattatatgcccagagtctccagctacactggttactacttgatttgactgatgatcaatcatattattggtagttacatcaggattattattgtaattataagtattattatcactactttctgtgttcaaggatggagtagaatcaattgctggataatagaatttgggcggtggtaagtggcttccgggaaaggaagcaagttcatgatgagccaggattccacctctaggaaatcctactgtgtgatgacaatgttggccttcgtatgttgtgattacagttgtgggatcttcagaagatcgctccacccttttcttcacagtgcatttgctattcgtgcaccgatagtagcttctgcaatagcaaattcaaaaatgtggtcagagtatttcattattattcgtcttactttttttttttaatacataaagtaaatatatatgtttaaagagggatatatatgaataatgggaattttgtgtaccacctctacataaaaatattgccacttctatattcgcgcatatataggcttaaaatttctagccatacgttttatttctttttctgtataatgtcagcgggtgctcttacgaattaaataccctaaaaagaaaatgtaaatataattaattagtttccactatatcttacccatatatatgtgggtatatattatgtggcagggattttagccgcttaaagatttatacgattctataacagtgtattatatatatttaggtggatataagtgtattatgggatgagatcattaacatataaagtagtgtgaatataaagaatcataataattaacatgagtaacgcttatcaaataaataatgatatcttttgtgaataagctgaaataagaattaatgtaaggatattttatataaagatataaaaaacaacttttcttacatatgtatacattgctcaataaatatgacattaaagctaataatttcacttgatcatcacatgcgtgttaataataaagatatatataaggtagacggcgaggtcataaacggaagtgatgacagaaaaagaagaaaaaagaaggaaaaaagtgtatataggcatgcaaaataatgatatttcctgttgttttgtttttttagtgaagtttgtttctcaaacacggaaacgataaaccagcatccaatacatggtgtaagatcttggctaaatttggctagaaaatgataaagtcatgttacatatatttgtctcaaatttttaatgatatttcaatgcattaaatttaaaattctcttaaaaattcatcaaaagttttgaattttttttaaaaatatataaataaaatataaaaagttatcatacatcctcaaaaaagtaaaccaaacatgtgagaatatctattgtgttataactttagtctgtggtatggtataatttttaggttatgtcaaatttgatacaacttttaattggtggcaaatttgacccatatactaaaattggagttcaatttttaaagctaagctaaaaatgcatatacacatacctttatggtaccacttcattgagtgctataatcctactttttatatcactatttcaacacaaccacatcagtaacattatatatttgtgaaatgtagttattatattatatactataattttgg

SEQ ID NO: 187847 - DNA, 3331 bp, Cannabis indica
gtttaaagtcaacaactaaggccttttggcagtgtatcactataaaaaaaattacttttagtcacaacaaaacttgtgagtcaaagtaaaatagttgtgactaattataaatcatcaatcctatgttgtgactaattattaatcacaaaaattacattttattgtgacttaatatattttaagttacaatacttgttgtgactaaaactaaattagtgacaatttgtgtctaaatactatattttagtcacaagtaactttttgttgtgactaaatattgtgactaaaagtcacatttaatcaacaaaaaaaaaattatattgtgactaaaaaatagtcactaaaggtagccgttttttatagtgtatagatgagtcatagtgtcatgtatagattattcatgaataggtggttttatgtttaatgaatactttctgttaagatagattgttgtcatctttgaatgtttgaaactgaaaatggcttcttggtttggtgactttggtctcagtcgttttgtatagtcggtcttgttaaactatgatatcacttcttgatttttctttttaacaaaattttgcttctgtttttgattaaaaaaaataagtatttttaccatgttacatggtttgacttctgaactttcttatagattcaatgttgtgtgtatgaaattatgacaactttcccaatatcggtctgaagaaggttttttgatcatatcttctaatgtgttgaatgagtctgtgtatttaccactgattttctacctcaaaatgaaacaaataaaaatattataagcactttgaattaaataaacaataaaatttatgaaaattcttccctctttttattctcatttgagtttttcttaatagtttccaacaaaagatctgtcaaaagaaaatgttgacttgaaacattacaataattttttgtgacctctaatgtttgttaattgcttcattaactaatgtttagttaagcaaatttagttttgtttagtgtagttacctaagtggttggttgtcaacttaattcaatcgaagcgtgttaattataagtgtaaaggtattaatatcatacattaagaaataagatatgctcagagaaagatttgaggatttgagcaacaacaaaacgactatgttttggtctcaaagaaaaaatccacattcatgtaaatcaaaaccctccaaaaaaaaaaactgaaatcttcaaataaaattaatttttttgaggttgaccccaaattaaaattacaagaatcctcgttgaactcaccttagaatcatattacaacctcagaatcatgttacaacaatagaagattcaacagtagtgaattcactacagttgaaactcgactatgttattgattgattgtgcattgtcgatagagtgagaatgataattggacaaagtcattaaaaaaatatgatcaaaattaatgttgatagttgttgcttttgataatgaatgaagacatagtttcatgtgttaactagaaattatttaaaatgaaatagaaaattgccaaaacattagaaatcaaattaattttgaattggatctaactaagtaataatattactcaaccgaaaataaggttgctcattacttagctagagaattttgtttttaagctatactatgagttgttacttatatagtagttaaattaaattattgtagtggcatagctgcagggtcggccctgggcatagacggggtaggcctatgcctagggcccgctcattttagaggtccaaataaaaaattatcttttaaaaatttacatatttttttaatgatttttaaaattactatttatctttataataagggcctcaaaaaaattgcctatagcccatttcaactcagggtcagttgagaatgaggtggagagaattttaatagcttttggttttagaaaagggattattccttttcattatctggggttgcctacttgtgctaagaaattctcaattaaagattgtgaaggcatgattgaaaagttggttttgggcatttgagggtggagtttcaaaactctctcatttgctagcaggttgactctaatcaaatatgtccttgtttccttacatacttattgggctcaaactattgtccatcctaagagagtgttcaagaggatcaataacatttgtagggcgtttctctaaaagggtacttcagattttgatggtccgtggaggattgcttggaagttggaagtacatttgtagaccaaagaagattggagggttggggttaagagatatttacaattggaatcttgttgctctacataaaaggcactaactagtgggattttaaggccctctcaaatgcgagctggtattgaaagaaaatagttaaaattaaagacaagatgatctgattagtaaaccttactctataaatttgatgtacaagaaaatgatagcagtagattacataagtttggggttagtgtacaaccaaattgcttgatttgtggccatggaagagaggagatcagtcacctcttcttttcttgctattatagtgcaaatgacagtgatgtttttttactgagatggtcgagtcatggcaaaggtttatcaaatttcgaaagaggagtttacataactggtttggcagctttgtctacctgatatggaagaattggcaatgaagcactttgggaaggaaaggttctaaggtttgattgtacaatgaagcaaatcaatactgatgttttgtaatataattaggaatttttccatgcataaaattcctacttctgataaagattggatgacagccttacttgtatagatgatgtcttgaggttttggcctccctgttgggagtgcgagttgtattttggaggttgtaaatgattctttgatgcaaaaataatctttgcttaccaaaataaaaaaaaaaatcaagtgtataataaaatattcttttatcagaaaaaatttgagtaaacataattacatatgcaattcacacaaatatatgcactaaacccaagcaaacatgcttgtttgctccggcgttagctgtggtgtctccctcttggtcctcctctagaagattgaatcaaaatcaactgtgatgttaaggttggtagtgagtctatgtgtgtggcggcgattggctaaggatcacacggggacaatttgtaggtagcaactaacatgctcaacttcacagatctactgattggcgacgtatcagttagtattggaatcggttgttttaatgaagcactattttgttttggttgagagtgattgggagaaggttatcaaagctttaaaaggaatctatt

SEQ ID NO: 187848 - DNA, 2534 bp, Cannabis indica
caataattaaataaaagaattaggctttgtttcttcagggattttgaagtttttgacttcaaaattcttgatatccttcataatatctcaaatctcactgatttatcatactcatacaaaagtaggtttttcttagaagcctaggaaatgacatgttaaaaaggctatgataggaagaatggcggtagaaaagtgatagtagatatatgacctccggtacttaatcttgtgcattgcttttaattatcattatatcgtggggtgtgaatttaagtgtctagaaagagtgttgggtcatctttgattacgactagtgcattagccgctttcgacgaatttgcctcatatgacagtgtctatgaatttgtatgttttacactcaataaggggttatactatacttaattagtactactgtcttttataagcgtaccctgtgtttcatggaagaaaacaaaattagtacactgtacttcaaataatcttatttggtcttggtacttatatgaaattggacatattttggtaaactaaactcaaatttggttaatttgatcaaactaatcatatgtaattaaataactaaatttgaatttaaaactcatattattaaacatgttttattatttaaattcgagttccgactaacaaatatatatatatatgcttttaaaaatacaaaataccatataagcattataaatagcgcaagaatacaaaatctgtattttgataaaagacaagatacctgatatcgatcattcactatataaaagcacacattagaacgattagcttctctggtttggtggttttctagttatggtaaattgtccatttatacttgaatacaattaatacaaactcttggaagtcatttagaaagggactaaaccacaacgttttattaaattaaaaaatgcctcattagtctacagattcaattttgttatgatgtctaagcagccactaaaagaaaaagttaagaactgaccttcgacataaaccacaaagctgaccgagctgctattcattctcgctcagcatcttcaatttcttcatcctcgggtactccacgaagataaagaacattgttacatctgtagtaaaaagtaaaaaggaaatgtaattataaagtttataagtaaaacatgagtatttatgacagatcaaatagttgtagttgaaaatttagaagaaataaaaatgagagaaagttaccggatcaaaatttcaccaagatttccagtgaattgtccatcaatatactcttcagcattggccaactgtacgtaagtttaaatcatcttgtaaactattgaaaaatgcacaaacgtatttgtgaactaacaaggtaaacagtacaaaattgtattttaattacataaggattgcaatagttaaacgaaaaataaatttgtcatctataattaacaatgacatataaggtagaaaaatatacaaaaattagtgcagactaacatacaacgatatcatttaggacttgaaaaagaaaaaccaacatagttcatgaagaatacaacatacaaatatcaagtgagacacaaacatatattttaaaacacaaacggattaaaaaattaaacctgcaaattcatgtacgaatccacagagaccagaaaacctgaaaatagcacaaatgaaacatgagtataacgccaaccttattaaatggggagaaaagaaaatggatagagccaaaagcaacaacctttgtactccattccccattttagcttcacaaaaactgtctttccggtcaaattgttcaagaaaggttttgggttaactggtatgctctgcaaaaaagtcaaacacatattgaggtgctgcccaaggcaggggaagaaacactataatatatctcataacccctattacagtgccatttaatcagaaaaatgattcactaagaaacaactaattaaggaataaaaatacgcaaagtaatcattttaaaaataaaccatttacattaactgggaagtgtcgtaacaactttataaaacagacattgttctcgatctgtaatgaagcaaaactaaactgaaaatctaggttcgtacagacactcaaatcaattttaagctgaaaatgtcagtttatggcgaaatccttgagtgagaagaataagtgagaacgaatgaaatcatgtgatgaaaacataaggttcgaattcgcttaccatgtttaccaagctacaagactgatgatgattgagtgagcgagctggggtttcgactctcgaagctctaggagtctcgtgcagaaaaccctaagatatatgtatgactgaaagactagggttttgacttttgtgtagatgtctttattgagaaattagaaaagaccctaagtttgtgctatattatgattagtcaccgagcttttatattatattttatttttaccccatttgccctttggaccctcctcccccattgccactattttttctcaactttttttacaatactcttggtattaaaaacaagtcttttcttttgttcctt

SEQ ID NO: 187849 - DNA, 899 bp, Cannabis indica
ttagtaattttcaaaaatactacttatttttcaaatacaaggttcaataatttttttttcttaaagtccacccaatcttagggcctgccttaaatacacataaagtttaaataaatctatattgtgaactaagatgatatgttcaatgtgtaacttattttaggtttaatcaaaacatggagtttgtaaaatgtaactaatttatgtgttgttatgatttttaaacaatataatttttaacaagttttatagttaaaaaaaaaaactacaaagaatttatcaaattatacacaaaaacaaccttgaccatcaagatagaattttctaagtataggaagacataagacatatgtcaaattgtttcttttacctctttacatttttttttcacacaaccctaactttaagcctttcggttcaaatttcaaccctacttgttttttgttttttgaaggtcatgccaaaaaaattaaaacaatataccaaatatagtaagaagaaaaaaaaaacaagaaatttctatcatcaacagaaatcaaacatcttttatcttaaacatatgtacttgtatatataaactaaaccttagtaatgggaaggacaattccaaataccgaaattcatataatcaatccaatcttatccatttcaatccttgcagttggaatggccgccgcaatagctataatcagtggtctatgtggtgttaaatatcgtaaaaaaatcatcatcaccatcaccatcgttatctttgtctccttcatcgtcaactaaacaagaaaacaatgaagacataatattggattcaccatcaccgccacattctttctttttttcctttctctcatcaagatgtagagctacacgaaaataaagcacaagatactagttataataat

SEQ ID NO: 187850 - DNA, 3068 bp, Cannabis indica
gagcataacaagagcaagaatcccatcattgagccttagttaactctataaatctagcacatgttctcatgttggcgcacctatcagagagtattcccgacatcttcagctatcttggtgaagatacagaagacttttccaatagggtaaggtttacaagagatccattaatgagtacctcgatacttatgatggagccatagatgaggcgtcagaggttggtgacgctaaacctggaaccaagggtgctgagtgcgaataagttggagggaaccagtctttagaggtcgcagaagtttcttctcgagaaggtgaccatttgtaaaaggacaactttgaagaaaaatccagaagctaaaccttgagtctgacgtccctcctcagcaataattgtgccttgcctttatttttaatttactatcctttccaagacattctttactttttgcagaagtatttttttcaagtctggtccgcggggctatttgtaatagtgtagaagacaatttttttgcggagacattttatgatgcccgatccacggggcactaagatagacttagacctttcaattttattcatttccttttgcatgttgagtttttagcgctttttgagtttcttgaatatttaattacttatttggaatgctactcgcaagatgttggtcagggatggttttcccgcaaaagggtgagcttccgcattccaagcgttccttgaccgttcctcttcataaaattgggctttgggaaaggtggcttgaggatgttatagatttcaggtgctatccctagttcagggattgggctgaaaccgtgataacactttaagcaaattttcttggcctagactttattaacaagagtcttttgccgctaaggccataaataaactgaggagtaggctgcacacactatggattttaggtagtatcatttgattaagatagggataaaaatgaataggagttcaaacgagacttccccattcgtaccttgtaaaaaatctaacagactatactttaggaaacccatttaaatttttgagaaggaatttagcaagtttttcctcttgggaaatttggctgaaaatgcatgtcatttcaaggtttacactaatgtctaatcttgagaaggaattcaggcaattttggctgaaaacacatctcatttctaggttatatgcaagttacactaaaaggttgcattcataaacaaagtaaataaacatagcacattgtacgttttttaggggcattcacagctaggcatagtacccccaagtaagatgggaagtttagacatctccaacttcttggtcacttgttcaaaacataacttgtggcttaaaaataaaaagcgtaaatttaagtgtaaacttcttctattttcatttcattatacctgaaggtatacataaagaagagaattgtacaaaaatttacacaaaacttaagagatacatcaaaggcttagtcacctcagcctattggtagtaccgacgcaagtggtctgcattctaggtgtgaggcctcgatccatccatcctcttatgttaaaaatttccttgagccactttctgcagtatctcatatggggccttcccaatttgggctaagtacccccactcctggttctcgcgaagctagaaatactcttctcaagatgaggtctccaacattaaatgtacaattcttgacttttgatttaaagtgtcgggcgatcttgccttggtacattttgagttgaacctgtgattgttcctggagttccttgattaagtccaacgattcttagagcagggaatggttctgggaaaggtcgtaggtatctcgtcaatgagaggggatcgtggcctctactggaattactacttcacacctataagccatcacatatggcatgtgtcctgttgaagttctctccatggtcctatagcccaaagaactcgcagaatatcttctgaccaatgagatttgcatgcttgtgtttcttcttcaacattgttttttagcattttgtttacgacttccacttgtccattggcttatggccgagctacaactgggaaacatttcatgattccatgctacacaaaagtcgtgaagtgttcgctgtcaaactatttttcatttttggagacaatcttgtatggaagtctataatgacacacgatgttcttaataacaaagtccaaggcctttttgaggtgacagtgttcattagctctgcctcaacccacttagtgaagtaatcaaccgccactatcatgtacttgactccttctcttcctgtggggaaggatcctactaaatcgataccccaaactacaaaaggccatgggctactcatgagtgtgattttagttggaagtacatgtggaaactttgcatatctctggcattgctcacacttccaaacatattctatgcaattcttcttattgtgggccaaaaatacccttgcaaaggattttctttgataagctaggtccagatgtgtggtctccataaaagcaaccatgaatctcgtggattacggtgctgatttttattccagcaatgcactataagtacgacattgaaattcgtcgccagtaaagcttcctatccatgatcacataacgaggagcttgatattgaaccttcctagaggtatccttatctatgggaagctctctcgaactcagaaagttgtaaatggttgccatataagaatgagaatttcgaccatggcatttatcccttggacttcaatgcttggttgttctaggtgacaaattgggtctactctgtgttggacgatctcgctgtttgttgcaagtttggcacatatccgtgaatgatttttggtctcttaaaacctaatggatattgtaatctttgaacccttgtagtagctcctaggacatcatgacgtaagtagccatttttcaccttttgtttggtactcaccagatatttgattcaccactagttaagaatcactatgtatttcaatgtgttgggctcctactttcttagcagtcttaaaccgaccaatatagcttcatgtttagcctcgttg

SEQ ID NO: 187851 - DNA, 4503 bp, Cannabis indica
gttaactctaatttaaagaaacgacggcagagaaacttaaaaaactactttaaactgccacctgtgggaggtaaagcccctccattttttaccagtaacttctgaacatttttcttttcattcttcggcggtttcagttgttatgagatgtaaatgtttcatgaaattctaattcattcgactgaaattcgattactatctgtttttatctcttttttttacatgataaattgtcagaatgcttgataaagaatccaccatttgctgtgtatactgatctaactcattgtttttttttttttggtttgtgatgttttagacacttgttaatttcgcatcgggaggttgcattatcgctattcctctactttactttgtcacattcttgacactcttatattgtgggaagatggtgcggagaaggttgactgaagatcaaaatagacagtagttaattccttgtagcctgccaattttgtgaaatctcccattttcgatttccattgtgtagttatcttagtgtgtgctaactgagaaggatagctgaaatacaacatggcaaattcaagaagccatagaaaatgttttctttatgctttaggttcactatcttaaatgttgaaactaatctgctaccagattagtcatatattggacccttagttcacctcatattattctttcctttttttcccctttcaaatctatgccaaacaaccttgcatcgaatccatatgatgggtgactaagtctttgtatgtattggcaaggtaggtgattttcactttttccttttctaatatatatgagaattagcttgttttgatagttgcattacttttctataacaataccaaggttgtacgagaagaaaaagttatttacttgttaaattagctcagggtatgataagttccatgcatctcgatatgtacaagagcatgaatatcacacggactgatgggcagtatttgcttaacagatattgaggaatcatctttcttgctctgtatatttgatttgtaacttgtcataagaaaaaaaaaaaaactatagcattgccatattacaaaatttgattttaatatttgtgtacttaatgtaaaggtagaaaatgatggattgatagctagccaaatgacagttcccctaaacataatcatgaacccatgtaagaataattccacattcagcaaagtgacagtgattaattaaaattcatcaaattgtaaaactttcagtatctgcagtattaatttcaaatttgcaattacactgtattgatttacagtacatcaaaaataattaaatgtataagaacgatattttgttttgtttttttttttttaaaaaaaaagaaaaatgctaaattacattaaggtataaaaacaaaatcatatgcttatgactaatctttacgatccccatattactaacgatacaagaaaaaccaaaagggaaaaaaaagtgtgatccatataatacaaacacaaaataatgttgaaaaccggaattaccaagtatttttgggcaagaactttttgtatgtactgagcttgttgtctctcttacttgagaaaaaatttccagacatctctctcagtcatctccttcactaagtgggctccaaaaatgccttcttcatctaccagacttctcaaatgtcttgctccactgttgaaaccgacatagttcttctttgtggccaggtatgcaactccatagggaggcctcaaacactgatccaaaacaaatgataattagaatgtcgttcaacctcggttcagtataataacaattagagcagaaaaaataaaaaaagcaagaggagaatcatcatcagcaagcagccatatcggtgttatttataattttttttgtaatgtattgtcatccaaaagacataagagcaatttcggtacgggttgaataaaggccgcagagaaaattattcatgatgaaggctcacctttttaatgaccacataaagcttcttcaaagcagttgaagagtacgggatatctgtcatcaaaataatatcatatccaccttccccttgatctctctcattagccctttcccatgcacggcttcctgagagcttccttgatcgtctagaggaagattcttgtccaatgatgcttccatcttggctactgcatccatccatgaaatcctcctcagaaaagctcagactcattccagttggtgcttcaaacccctcactccttacaacagacagaacagtagggagttcttcccagtcacctgcataaaagtgcaccgaaggagctagagtttgtctcgatggagtaagggggctctctggttgtcggctttgcttgtctcgagcttgctcaaggttggcaagaacatttggtattgtagtgcatcttatagtttctgcactgaggtcttgaaaatgaactgttgaagctccctgtaaaagtgatcaatcagaaagaaatcatgtaccttctaaaacagaaaaatatattttactcttcagcaaatctcaaggctcgaacaacatttatcctccattccaacaaatttggctagattctttatgatgatctaacattaaaataaataccgaacaaaacactagaacataagcatatatttctggaaccaacatactaattgaagaaaaagttttgagaaagcttctctgtatgaacacagaatcaaatacatgtgatgtaaataacacatgcagatgattacaaattgtcttttacttttcatcattcataaattgctcatactcttcccttaaattcatcatttccatttttcctattcaaaataattagtattaatttcttagcttgatcatgaaaaaacatgactaacttttaaaaagttcaattttttacataggtctttgataaacagaatgttgttcaacattatttagtatttacaaagatgtcaaaaaccggtaaactcagagtcgaaagcaatttgaggcaacaaaatgaaaattcactagctactgtacgtgatatcatcaaccaactttgtctagaaattccagcaatcaatacagctatagccagaatccagtacatataatcatataattatacttgaaagtaactgattagtgataattaaaaattataagcaaaaaagggagtagaaattatacaataatgataggggtattttattgatatcaaagaaagaattacaaattttccaagcttttcgagacacttggatatctccctgactaaattttactctaaacagtacaaattaattcctatcccttgcaattaataagcccctctatttacactgactcacccctaattgtttccttaacaaaccctctaggactattaagagttggacagctcaacttctataatcctaatcaattttaatattagggcgtacgaaaaaaaaaacatataagccctttctggtgcttcttttaacaactttgatggagaccaagcttacattaaaaaatgttttaaaagttcaactgatctaatacagaaagtaagcaggggagtggctgaaagaattggctaaagaaagggcattaaaaggagctagtaaacaaagtagcctccaaaaccggaaaaattgtcaaaaacacaaacaaacataatacataccttcaggcaagtaaaaattcctggcagtccatagctgcaacctagctgcagaaatgatcaagcaaataaattaatatataaattacgaaaaaatatatagctataaagatttgaaacctagaatactcacagtcgtattcacccgcttacccttctagctaaaatcaagtataagaagttttgacaaatagaacatcttactataagacattaatatagaaagattttttttttctggatgaacagctacgggaaatatagtaacagctcatgaatcagaaatatttcagcataaaaaagaataagagaaaaaagaaagaaagacagtttccaaagttacactgctgaaagagaagaaagcttagtttgaaaatgtggcacactttagccttcatctattgtcatagtttcatcttggaataagaccatgacttagtgaagctaaaatgcaagtgcaacattcctagcacagatcaaacaactttttcatgttgtttcttctagagaaaaccatcatcttccagcaaatgtatttctctttaagctcaggaaaaaagtctggttatttctctttaagcccaggaaggaggtcggatagtaccaaatgaaatgaagcatttactacgacaaaatttcctctaacagaaattaatccatgcttagctcaacacataattggactgatcaatcaatttcaaatactaaaatgaatctataataaaggctcaagtaagtcatcaaacaactctccttaaactgcattaattaaagtctaagctgttcatttgaggtatggacattcacaagagaaaaaaaatcacagaatagttaataggaaggtaaaacaaaaaatgagttgtatatt

SEQ ID NO: 187852 - DNA, 4517 bp, Cannabis indica
tgctactgctgcaactccggttcttcaaccagttcagcaatggaatccgtttcagaattccctgaattcttccctcactattcgattggatcgaactaatttccttgcatggaaatcccaagtaatacccacagttattggccacgggcttgatgatatactccttactggtattgctcatgttcaatttcttgttaatggagtccctaacctcgaattcacgatctggaaacgcaaagaccaactgcttctcagctggcttcgctcatctatgacagagacagttcttggttctctggctcagtacaattcctcatatgaagcttggcgcgcgcttgaacaatggttcgcaagtcagtcgaaggcaagattgcttcagatcaaatcccagatttcaaccatgaggaaaagtaatctttccataaccgactattgtgataaagtcaaaattcttgctgattccttggctacagctggtcatcctcttgatgacagtgatcttgtaatgcatatcctaaatggattagggcctgagtatgatccagttgtagtccatgttactagtcttgtggataatctctctctagaattcattcaatctttgcttctaacccatgaaagcaggcttgaacgtcattactccatcaatgactccaatcctaatctttctgcaaatctgagtatccacaaccctagaaacaacaccagaaatggattccgtccaaactacaatcagaatcgtggctattcctctatgaatcgtccctaagatcgtgcttatcccagaacccatccatctatcccaagattgctatgtcaggtatgccacaaagcagggcacacggctgccgtttgccactacagattcgacaaggcatttgtcacttcgaagatcaatgatttaaaggtctttcttgctgaaatcgatgaccaagaagaacatcaagcatactccagctcagccttgcctgaattcgttgaagattatgactggtatgctgatacgggtgcaaccaatcacattgctcagggcatggaacaccttgaatctgaaatcccctactcgggttctgacaccctaggtgttggcaatggtaaaagacttgttataagtcacattggtaactcttatcttccctcatctcagtcctctatacgtttaaacaatattcttaaagttcctaaaattacaaaaaaaacctcattagtgtttctcaattaactgctgacaatcatgtttttttagaatttcactcaaaatgttgttttgttaaggacaaaatcacagggagagtgctcctcaaggggaggcttaagaatggcctctatttgctgtcacacagctcattcccatcaaaagttcagctccaatgtcaacttgtcaccaagcaatcaaagtctgagtctccttgttctgcttctcctgaaaccagtcaagaacctgtccttaattctactcaagaatctgtacctaagtctagttcatgttttgctacatgtaatacgagtactgttaatacagtgactccccatgtacgattcttgcaataataaaaatgatttttgcctaatactaataagtctttatcttatcttgcgcaaaaatctgatgtcaatttttggcattcgaaacttggtcatcccacactagagactcttgcaaaaatcatgtctgatttacatgttcctgtcaaccttaaacatttaaggttctgtgatgcttgtaaaaaaggcaaaagccatagacagcaccatcccttatccgagtctagagcctctcaaccattagagttggttcacacagatttgtggggaccatctcatgttgaatctaaagagggacatcgatactacattcactttatagatgatctcagccgttatacttggttctttccattatccacaaagtctcaagcctatagtacatttcttcaattcaaaacatttgtggaaaaacaatttgatctccctatcaaaactgtccaatcggactggggaggtgaatataggtccttagcatcctttcttatgcatcatggagtccatttccaacacccttgtcctcatgaccatgctcaaaatggaagagctgaacgaaagcatcgtcatattactgaaactggtcttacattacttgctcatgctggtttgtctctcccttattggtggttagcatttcagcatgctgtttatctaataaacataatgcctactcgtgttcttggtgatatgtccccatatgaagccttatttcacaaagttcccgactataacatgctgaagccctttggttgcacctgtttcccgcatctacgaccttataacagcaataagttggccttacgatctgacaaatgcatgattgttggctactccatgaatcacaaaggctatatgtgtgaaaataaagatggcaaagtgttgttatagcaagaaatgtagttttaataaagaagaatttccagctctcacaacttgtgattccaacaaggtacattcttcttcacaacattttttccctctacttcatttcttacatctcctattataactaatcacactatgccctctcaatctgctgcaaatatgccatctcctgtcactacacctgctgctgctgctgtgagaaatgctgcaccagtcgttccctcagttgctgtaccaaatccatccgttaccagtgttgatgtccagcacataaatcctgaacctatagcagccatacctgatgttcactcccatgatactaatacctgtgccaacaatcccatacagcagccatccactacccctcacactacaaatttccataatatgcagacaaggtccaaattgggcatcctcaaaccaaaagcataccattccactctacatcctttacccgaatcaaccctaccaaaaattcccacaacagtcaaacaggctcttaacaaccccatatggctggcatctatgcaaaaagaggacactgcactaaaaaaaacaacacttggagacttgtcccttattcaccttacatgaatcttgtgggaaataagtgggtacatcgtatcaaactcaatgcggatggttcaattgataaattcaaatcaaggttagtggcaaagggatactctcaaactcctggcattgactacacagagacatttagcccggttgtcaagcccacaacagttcgaacattactcaccttggctgtctccaacaattgggacatcactcaactagatgtctccaatgctttcctaaatgggaccttacaagaatcagtctttatgactcagcctcctggatttgtggatccaaattttcctaatcatgtatgcaaattgcataaggcaatctactgtctcaacaagcttcaagagcttggaacgaaaagctgaaatccactctctgcagcaatggttttacatgttccaggtctgataactccttctatttttttggtttgggtaacaataaaatatcctattagtatatgtcgatgacatcctaattacaggccccaacaagtctttgatctcacggctggttcaaaatctcaacaaagaatttgacatcaaagacttaggaccactacacttctttctcagggttgaagtgcagagaacatcagctggcattcatctctcacagtcgaaatacattgctgaaattctcaacttaagatggatggagctaaacctagtccaagtcccaccagttcagctatcaagttatccttgtctattggtgatcctttttcagacccaacactctaccgaagtacattgggggcattgcaatatcttaccctcacaagacccgacatagcattcattgtaaataaactaagtcagtttaattcatgcccctactacaacccattgtgatgcctgcaaaagacttttcaagtatttaaagggaacgattcatgagggtctattcattcaaccagctgctcgactagatcttcaagattatctgatgccgattgggcaacagtattgatgatagaaggtcaaccggtggttatgcagtgttccttggtggcaacttaatatcatggtccgcaaagaagcaacaagttgttgctcgatcaagcacggaaagtgaatttcgtgccttaaccaatgctgctgccgaagtgaactggatgtcatttactcaatgaaatccacatcgatctgccagcttgcccaataatttgggttgacaaccaaggtgctgcatctcttgcagccaatccagtctttcatgcgcgatccaagcacatcgaaatcgatcaacacttcatccgtgatcagctactggccaaaactcttgaagttcgttatgtgccatctcttgatcaaactgctgatattctcatcaagtgtctatctacagatcggtttcattacctcaaagccaagctcaaagtgtgttcatcaccatttcgcttgaggggggatgataaacaagtgtcagagttagttgtttgacaattagccattctgttgtaacagtttaatgtttgttactttgctgtt

SEQ ID NO: 187853 - DNA, 3635 bp, Cannabis indica
gatatgcttctcctgaaactcattctattcttcaatcaagtggtctccagcactggttcaagaattggcagcaactaagaaagaataaattgactgcaagcacttttgcttctgccattgggttttggcgtaagcgaagagtccaactgtggttagagaagattggggccattgagccgttctctggtaacctggcaacatgttggagtaatatcaaagaagaggaagcccttgaaagatacaaactgatcactggaaatacggtattgtttccagagtttcaggtttattcagcgaaaacaaacccgggagatgattggttggcagcttcaccagatggggttgttgatgggcttgtttatggtttgtcttcacgaggagttcttgagattaagtgtccctttttcaatggtgatatgagcaaagcttcccctggtcacgaattccgctttactgcattccgcaggctcaggggttgatggagattgtggatagggattggatggatttctatgtttggactcctaaaggaagcagcttgttccggctatatagggatgctgaatactgggatgcccttaaattggcactctctgatttctggtggcagcatgttcatccagcaagggaatgtatctctaaatcccctgttgtcttggatccactcactgacttaagatcactcaaaccacttccaaggcatgaattgtgcagttatatagtttatgacagcaaacgcatagtcgatgaatccagactgttgatgcgagaaatcaatggcatactccaaagctcatgatgcattatcatacctcttagtagatcacaaattaatcaatgtattaattaatcataaatttcaaaggaactcatcagcattagaatggcctatgcattaacctttcttgatgtggatgctgctgattccgctactgatgagagaagaacaaagctgaatgtgaagtgtgcttgctttgtacattgatggtaccccatttggtccacccacaatacaaggtttcttcaattcttaacatctttttcacatttatatggtaaagcatcttttatgccaaacttacttcatggtcatgcatattggtgttcttgctggtatggtagtgcaggttcgagacgtttcaagcgggaaagatgagggattaattggtggggctacggttcctctctataatatcttaaggcaactcgaaacaggaaaacgaaaggtcaggctttggctatcaaaagttgcagatggttcattcagtacaaactaaagcgcttgaagatgcttatggacaagtatgagagatggtaaatctaacatgtcggctgcctagattatcttgcattcaacactagatataatcaaggaaaacgaaaacactagaaatgggctttcttatttataccaggtgatttagttagttgatgttcatatgtgtttgaatctcttgtttgtttgcatataatactaaaaacagtactcattgagttcttaaggatcttaggaatcattgtcaattttatttatttggtttgtaaggaaaatttctaaatatcatcacttatagaaataactaatgaaattgtcattgtcattgtaaaggtgggcatattctttatttcttttaatatgatcattgaaccattgctgtattcatgatatgattctcagttgaaaattgtgactggtaagactaaagagacttagttagagggtggggaaacatgagatttatatgtgtgataaatataaatttaggaatctaataatagtttggactaagatatcattgcctattttccaaatcaaaatgcttaaggaggtctcttactctgccaattatgaggatgagcctccttatcctccaaaatatttagaagaacataatgtcaacgattttctccgatgaatttgttgcgtagagtcccaccaaaatttagccataaaaaacttaaattgttgacactaggtaatttaaaacaagatatttcataagaaagaatggcttgaataataacttttaacataatttccttactagctctaggaagacatttttcatgtcaagagtttattaataaagtgtccactttattcaaaataaaatgaagagataacttttagaattacgaaaacatagagttaaacttaaatatttgctaataaaaagtttagtttcaagaactaatgtatctaaaaagaggctagaggaaggaggggtattgaaagaaaacagttaaaatgacttagagaaattgataagctaacttaaagccctaatataaactctaaagcatcttttattgtaatacaaaaatcaaagtcaacattagctagagaaaagaaaactatcatatgagagataataagagcattgtgagaaattatgagactatatattagagttagtctcatgttggaaataaattgttatatataagatgaataggctattcttcccattgccaattgattttgagatagaaccccattcactttatcctaaattctaacatggtatcagagtcacttgtgatccattgtgagcccaaagtgctaccgatttaaaaagctgtttgtgatccgttgtgagccaaagtgctatcggtccaaaaagatactttcactatctttcctttaacctctatttgggacctttcgaccaatgtgtgccaatttccagtgttagggtctttgacctatttcaaaatccacgaattttccgatgtgtacacccacaaatttcctgatatttggccttgtgggattctttcaaatgccacgttcggtcttgtggtctcttaaagattgttcgttatacccacactttcgaggcccaaacgtgaggagagtgtattagagttagtcctacattatttatgtgtagaaataaattgtcatatataagatgaatgagctactccttctattgtcaattgattttgagatttttgagatcggaaccccattcaccttactcccaaattctaacactaataaaaaattactgtctaacacctccagtagaaacaatttgcctaataaactagttatttatacaaaaactagaaatagatgctaaacatttcacagctaaacaagcaaaatttgggatgaaattcaggtaaagtgtaacacctttataacctagtgagggttagtttagtgattaacatacttagacggtatggttgtaatatttatatataatattatgacataattggacataattgctttaaagtgaattatgtgtgaataagacccgtttttgttaaatggataattttgtaatttgaccatttgagggtatattcgtgaattttggatttcattgaggttggtcgtacttttagtagtcagtctttatttactataattgcatccttaattttggatgatttgaattaatgaagtagccattattactcaaaaaaaaaaacccccttttaaataatttttattttatataaaatttatatctttaattgtattaaattttttaaatttttttcttccaattcatattcttaaaaaaaatacctatcaaataaaaataaattatattttaaatattacgacaaaaaaataaaataacaaaatatattcatgatacagaaaaaaaaat

SEQ ID NO: 187854 - DNA, 1523 bp, Cannabis indica
aagatcttggtaaaataatttcccacagaattgtgccttgcttagtgtggggtccagaccgcgtgcagagctccttcccagggttcgtggcatgcccgagataaggcacgaaggcctcgacatctccaagaaggcctttagtttgaaggtttttcaacctctttaaagtaagggtggatggaggcaatatccaccgagtcgctttcttgtccttgattttcatgggatgggcctcctcaaattcctcctcaacatagtcctcatttaaattgaggacctcgccggatgctaagacgagttccctgacctcattataccctttatatagcatggttttagaggcctttttcttcttccccttctccttcattggaggaaccagctgcatgggctttgtcaagttcgcagtctctcccacttccacgacacccttccgcatttcagaatcctcttcctatatgggatcctcatgcaagagtggctctttggcataccctacagcagccatggcaacgagtcgcttaaggtggagatcctcagtagaaacctttctcagggtttgctttatgttcggaggagtagacttaacaatatacttggctatgttgactatgatctttgctagcacggagtgtcttctcaatagccctagatggccctctggaagacattcaagaatgtcttcacataccctgtatgtccttgtggccgagctcctaaatgaatctcttgtagccctctttgtcgatctggctggggtagtgatggtgttgtacggaaggttccggagacactggtgaatcattagatacttcccacttgtcgaagcttgacgtggatgaatctccacttgatgatgacaaatctgcgtggagtcttggctaatcttcgaggagcagttggagtaaatcattgtctattcggtgttcaccttttcagaatttttttggattcatctacaaaagaagaaaagggaggtaaggatcgaataaataagaaggctttttttacaaaaaaacatttatgatattctaaccaaaagggatttgaggattaaaaaggaaagattccatccaaatcatagaattaatgcatttaaaatcttgatattttgtctaagtaatgtatgtactatatcaacttgatctaatagtaataactctttactttgattaaaaaaataattaggtcatgtcatattaattaggtctaatctataaacttaaataatctgtagctgtctctcttttttagtgtattgtcagtctctctttttgagtgaatcttttgtcctgctctgtttttgggtgcaattctttttgtcctgctttgtttttgggtacgttgtttttagtgttggtttgttttgttcgtttccctcatggcatccagtagtactgatatggggaatattgaggaacgatggaaagatatacaactagaagaagaggaagcagacaagaccttctatgaggaacctgatgcagaatatgatttggtcattgataccagatggtgcctgg

SEQ ID NO: 187855 - DNA, 3703 bp, Cannabis indica
aaaaaaaaaattaaaaaaataggaatattaataagtaatagtatacttaccaccagtaagcaggcttggttaggaaaacattggaaacgacaacgtttttgcaaccaatgaatccaaccaacctgggcctacactcgtcaccggagcaagctccagtccgattccaactcaccatcacattcttcttctcatcaaacctctccacaaacccccagctctgtccgtcgatcgctccgccgccggtgattcccacatcggtggcgttctctgccagcacaacgtaccactccgattgctccctagggtaatcctccatcctcatgcctcccagtatcgtcgcgcccactcccacctccaataccacgccggatttgagtcggactgtggctgtcagataagttcccggaggaaacaccacgcggcatctttcaatgccggaacacgcgtcgatggcggattggatcgcggtggtgtcgtatcgaatgccgtcgccagtggcgccgaagtcggtgacggatattgtttgtggtgatttgtggcgagtggattgggtcgagactagtaggaagaggagaatgattataatttctggataaggattggtcatcgtttgaaggtgaatcttcttcttcttcttctttgttttcgtactgtttccaaaaaaatagagagaagacgataaattttgataaatttataaattccttttttaatttattttactattattaaaataaaactaaaatttgtttcaattcttttgattagtctaaaacttatctgaaatttgagttaagctattattatattaagattattaactgtttcagctgagttaacaacttatgttgtaatgccaaatttaaaatataagctataattcacaaattataacattaaaaaaaggtggttaatttaaacagaagtaaaaattggagtgttgaaacattcaatcattgattgattacatacatttcttatatgtagttacttgaattttggaataagaaattgagttggctaaatcttgtagagaggaaaaaaaaaacaaatgataatttcccaaaagattgaatttttctatagtgaaaggatttgagattgataatttgatgataacagtaaataaacaatgcttcattcaatgatctcaacacaacaggagtttggagaaaataaaaacttcaataatagttggttcaatgattttacaatagtaatcaatcaatcatctcacaaaataagtatctagattgaatgatcctaaagatagttagtaagtatatatacttatatagtagtagtagtaataataataataatataagaattggcatataccaaatttcttttccctctaagtgaaggaacttagctgactctaacaaatagagctagctcatggcaaacatgaaatttttgaggcatactctcatttctacctcatgctaaatgctaatgctatatctgatatatacactattagctgctaatggaagaactctctactatgccctttcacagctccatcttcaattggctcgagtgcagcgacgctgtcaacaaacaagaagatagaaatttgtgttaatttcattgctttcttatagaaatggaaaactgcacatctatatactttaaagcaaaagtatgaactggtttgtaaattggaagaggtgtgcaccatgccaaattgccatgcttactagtagtttaggatgttgatttagagagtaaattaacctgaattcgctgaagagtcataagtcaaaagcgagttctctggcgtgacgaaagtatgactatcttcctgtctcccccaaagtggttgctgaagaccaatggcatccaagtgccattgctgttgatattgttgtctgtttccattgagagggaactcaggccacatcagaggcgaacccatattgggcaaactaccttccattacagatccattctgcaagttttagagaacaactttaagcaattgagagaacaaaactttgacattgtgacagcccattcatatcccaacagggaaacataactatgccacaagtatgtatggaagaatcaaattgacaaaggagttgggacttagggtaatgagcaaagatacccttttatagtgttgccaaatatattttgctttgaatcaatcctttgttttccctaaataagaaagccaaacattctagtttgtacacaagtgaaagatctcatctaaggaacttacaactacagaggtcctaatggagttgtactaccttctcatattaagagtgacatgctatcatatgcactgtgatcgcagataagactatatttgagaaatattagaatccaaaagttttgattttatttgagaaatataaaattgtaatggtaatcttccttgactgttagatgtacaagtatatgtgataagcgtttcattttgacaacatgcataaccacaaaagatctacagttccaattttactgcatgtatgagaatgatgaagtaaagcacaatatgaaaacttacagcagtagctagtatattgtcaaggttgaaatcaattctcgggttaaccgccgcgagtctcattgataagaactgaaatgggaaatataaaaaatcaaagattaagaacaaggaaacaaaagataaatagaatataactattgagcgtgtgaatagagacccgctgaaattggaggattttcgaatggaatgacagccttttactcaaacgagatgcattatctagttgttaatattcaaggatgataaatttcaatttctaataatatatatttctttgaagtgtgagtgaaagaccatcgatcaaaacactctgagaataagaattaagcaagttttacctccacttgacgttgtagggactgtacatggttgatgatttcatccagaactaatgctgttcccgaaatctgcaaaacgaaaatcaacttaaacattaaaacccgcaaagtaatgaatttaaacaagtttttgcataaatatggacatacaacactcaaaacacctaactagagagttgcttgcttaactcttcaatccaccagatggatcattaagtagttagtacgagcttctcctccctatgataaaaatatgtcaggtcctcagctcttaaacaaaggaatgaacattttgctattttggcttattttagtttcaggttaacaacaacatagtaaaggaataatcagtacttggaaaaataatcttccaataaaatttcatttgtaagatttatttagaacactaggtgaatcaaaagtccttcagctttagttacttagaatcttgaatgtgaagaacttcatcctcctaattccaaccccattttactacactgaatacttagatacgtgatatttgtgaattgaatatattgatgactggtgttaatacaattattggaaattttaatggatatgatcatggtggggcacaaacatagccagaagtgaatgtacggaaggactagatccagactccagttcaaacaatgaaaccataggagtaaattggtgcccccccaagtgttgacctttaacacccaaagaaaatcccagaaagtacattatattgaaccgtacggtcccagcttgctgtcatcaaccagcacagctcaatagaccaacagaatgcaaattactgtgtaaagacagtcaaattgcaaataagtgc

SEQ ID NO: 187856 - DNA, 2454 bp, Cannabis indica
cattttgttgatgatcatagcaggttcacctggatctatcctctcaaacataaatatgaagttgtttctgccttcattcagttcaaagctttagtcgaaaaccaatttgaaaagaaaataaaagccttaagaactgactggggaggagagttccaagctttctctcaaattgtcattgaaaatggaattagttttaaccactcttgtcctcatacctcagctcaaaatggaagagcagagagaaagcataggcatattgtagaaatggggttaaccttacttgctcaagcatatatgccactaaagtattggtgggatgctttccaaacagctgtctatcttataaatagactgccaacacccatacttaatgacaaatcccctttcgaaatcatttactcaaaacagccagattacaagttccttaaggtgtttggaacagcctgctacccttgtcttagaccataccgaactcataaattccaatttcactctaccaagtgtgtaaatcttggctatagtgatgctcacaaaggttacaaatgtctaagtacaatgggaagattatacatatctcgaaatgtcatatttaatgagagtgattttccctttaaaactggttttttaaatacacaccagcaggaaaaatctgtgcaggttttagttccatcatggtcagcttcatttaatcccattcgaaccacttctgcaacatctcagcctcatcaaactggtacatacactgagttaaactcccttgcaggtgcatccaactttttgtctccacttcatactgaaagtcaggtaaatgatcactcctcaacctcttccatgaatatcgaatcacccattatacagcctgttgttgacagtaatgcagatcaagaatttgcacaagcctcctcaccaccagaaactgttcgaaatgctcccttagcaccaacacacactatgattacaagagccaaagcgggaatctttaaaccaaagacttatgttggacaatcaacctggaatgttgaaaatgatgaaccggctacagttgaggaagccttgcaacatccaggttggaacaacgctatgggtagtgaaatggttgccttgaagaaaaataagacatggattttggttccaaagcttccttggatgaatattgttggaaacaaatgggtatatcgtgtcaagagaaacaaagatgggtctgtcgaagggctcaaggccagattggttgcaaaaggttttcatcaaagactgggaattgattttaaagaaacattcagtccagtagtaaaggcatcaacgattcgaattgttctgtctatagccgtggcaaagtcgtgggaaatcagacaactggacattaacaacgcgtttctaaatggcaagttggaggaggatgtatatatggaacaaccacaagggtttattgatcaagaaaaaccagattttgtatgtaagctgtccaagtcgctgtatggcctgaaacaggttcctagagcctggtttgacagcctaaaggaaacactgctcaagtggagatttctgaattcaagagccgatccatccttattctttttcaaagaatctcaagttatcattctagtccttatatatgtcgatgacattattataacgggcaataacagtgctaaactcaatgagtttgttgttaaattgaatcacagctttgccttgaaagatctttgacctctaactttctttcgaggaattgaggtgcatcgtgacaacacaggaatttacttgaatcaggcaaaatacatcaaagaacttctcatcaaaaccaacatgcagcatctgaagtcgtgttcaactcccatgacagtgggaaaaacactttcaaaaaatgatggagaacctctaaataatcccacagcatatcgaagcttaataggaggattgcaatatttgacacacacacggcccgacttatcttttggcatcaataaattaagtcaattcctccaaacaccaaccacaacacactggaatgcagcaaaacgtgtgctgagatatctgaagggaactatgtatcacggccttcatatcaagtactcagaaaaattgagtttgacaggcttctcgaatgcggattgggcatgctgccctgatgatcacagaagcatagcaggctactgtgtgtacttgggagacagcctcgtgtcctggtcttcaaagaaacaagtcgtggtatctcgctccagcacagaatcagagtatcgagccttggctcatgttgcagccgaaatttcgtggattcaagggctgctgaatgaaattggttatcccatgccacacacacccgtaacatggtgtgacaatatgagtgcaagtgcacttgcaaccaatccagtatatcatgccaggacaaatcacatcgagctagacgttcattttgtcgtgacaaggtctcaacaaaagtctgacatcagatac

SEQ ID NO: 187857 - DNA, 5082 bp, Cannabis indica
cacaattagaacaagtccaatcatctagtcagtaaacagagctcaaggtcaataccttaacaagtccagattttaagtcgagcaaagccactgctttgccataaggatcttcagcagagaactcaaccgcagttatgaagtctttttcatttccatgtttttcacaatgtttaggttcgtagtctagctttctaccaggataaaatttcacctgaaacatgaaggtagatttgtcagcattgatctacttaatttgaacaagcaattttgttttctttggtttcttgttgttggatgaccgtgcttcctattccaaaaagacttatcacaaaatcatctctaaatacaacatttataagatatttcaacataaactatacaatcaagcatgattgtttttgtgctggtttatgccagtctcaggtaaacaaacatcttttttttttttcaccaagaaaacagaagttttgattggagaagtcattatacaagtgaaatggatgattgcttaccattttatcacccacaagctcaaaaatgtagcaatctccactggacttcttacaagggaatagagaccactgacaattcatcatagaccatccagtcccaataaattctgcaagagtatgaatttcaccagacttcatcattccaattacctccttccgagcatagctgttttctctcaccttcttttcagtattcctaagatgtaatgcaagaaaataatatagataagtgggagcttcgcgatggatcataaacacagatataatacaacaaaaagaaacatacatcattgctaacaaaccttggccacactgaagcagagatttcaaacccaattgaatgtagtgcacaaatttctaaaactcaggattatgaatttttaaaaataatttaagagattactatcagcttttgggctaataatgcctcaataactcccttctgctttacatggtcttcgtctttcaaaagaaatagctaaaatcttagaatatctcgtgctactataaatgcattttctttgaaactagaggaaaattatgcaatcataacagtacaagattttagtttggcttaactctgtgaatatgagtagctaaccagttgagaaatatagtgaatattagaaaacccattctaattgcatatggtaataagctgctgatgtaaaagtcattgagcatttgatgtaaaatatgttacaagttttaaccgtgcataggtccaacaataagatcttttaataacaaggagctaaacaacttaggaaactaccatttctcatcacctgcaagtatacggtttcatatttaaattgtgaccaaacagaaaattgaatgctgctattacctcattatggaaatgagtagaccattatgtatagggaaacttcaaaatgtatccactgatatgaatttgaacacattctataccttatttggaggttcatgagtttagtgccggtttcatcaatgacatggattctgcccgtggcatctttagtcttcccaggaatggggaaacaagatttttttaataactgtcgagaatggaccatttcaagcacacgttgtgcagctgctggagcagtaaatgagacagcaactcgtaggcgaattggttttgagctcacatttccagaacttggtaccaagtctaaccatttttccacagataggtcagaagctgagacacagaggtcttgaagagatagtgaagtagtacccaatgtctttaatgactttgttatcggtaagttcgaaggagaacgagacatgagctcaaatataagctccccattaggttcacactgaaaagatgcaacctgcttcactttggactctgacaaaatagtcagttttcgtttggcatcaaacaaaatatcaggttgtgttttactaaacgtgacaaagagacttcctttgtgcccctctggtaagttattaacttccacaaactccaaaaccacctaaaaggagaaaggacaataaagaaaactgttaggacactgaaagctttctgtcctagaataggctcagatacattacctcttttgagttagtaactcataagaggctagaaacaaatcaaaagctatgggaaatgcattaattcaaccagtagagatcaaaccccatgaatagggttgaggtgtaccaacaaattactatctattagtactccagggcctagatatcagagatactaaaagtaaaacttctgtatatcatttcttcaaatgtataaatgagatctaagccttatgcagaatattctacttgggaatgaacggacaagtaaatgtatatgcataagctaagcttaagttctaaattaggataactgagtcaccctactgtattgtcttcaaaagtacgataagtcagatgtaataatagttgatgaaacttacctccacaaagttcaccttgggtagctgaattattttcttatattcatttgttttaactttctctttgttgatcatatttggtgggaaaggagtgtttgtaacaggagttggagtactgcctctatacattgcccctgctctccaataacgtgtaccaaatgtttcttcccactgtttggtagtgctagaaaacccaacatcaagcttcattcctttagttctgtccgagtctgtgtcatcatgctccaatacctttccaagtagtttattcaggtctttaaagtaagacacaggatgcaattgatgggaatgccagataaggtcaatatcataagttggaacgcaaaagcgcttcaaagatttctccttgtttctccttatcaaatgcaaaaaccctttatatctagccagagctccttcaagaaacaggtcattgttcatatggggtctagacacctgtccgtaaaacaacataaaaaaattaacaggattcaaatagtaattcatgcacaaccaagtgctaacttacataaattcctcagaagaccaagaaaccgcattcaaaagagtttcaattaagagtaatagcttcaagatgataataattatgtaacagacagtcttcattacctggtaaaagaaaggagtctgccttttagcagctgaaaccaaatcatatttggtgcatatctcgagtgcataaactttatcagaggtatcctcagaaaatgccaagtttaagtctatgatatagggttcttcaggataaagactgtcccaaatttcttcagtttccctcgtacagaatttatcaacagaggatacaacattacagttgtcaaggatccttccataaagttcctcacagtcagacttatactgaacctgaacaaccaaaccaaaccaaaccaaaagcttgaaaattgacaatttcaattcaattagacaaagttcattaaaattgaaaacccagaaaacctactggattgagcctgtgacagtgccaaatccattcacaatcaagaggtacaaccaaaggtcccttagaaaccggcacctcagaatgcttcgcaagcaaaggaagccaacaagcattgtacctgtatttatcattctattaagcaagacttcaaaacgtaaatacagttcaatcctactctaccagatgggaaagctcaataaaaaggaccacccacataatcattctcaaaaacctattaacccataaatcaaaataaaatggattcagtacttataaacatatatgtcagacacaatttggtttgaacgaaaggaaacaatcttctttccctaattttgatatcaaacactcgatcaaaagggtctattttactaatactaagcttacctttcaaagattatggtgctaaacccaattttggatttctttagctaaacaaaataacatcacacaagagaaactagattctccaatcgaggtcacacgttgtaaaatttaaccaccgaaaatctcaactacataatacgttaactaaaaattgacaattgaaaaaaagaaaaagaaaactaacctatatatagctctgttcagaacagggccatcatagagagagcgattccgatcaacagcggcgagaaattgaagctggcgtttggccacagcaacaagatcaacgcttattcctatattttgtgcttcaatccactcaagctcttgttccatcgccataattacctgttattgattctaagaaagtgattatagcaccacaaaacacaaagcttcaattctaagaaataattgaagctttgatgattgacaagtcaatagaattgaggtttgaaggtgaagtttctgtgctctatcttcactgagctttgcattttcttacatatttcctcattttcgatcacatatttatagtaaaagtctatagagcatctcctagtaaaaatttagaaaataattaatgagctggatatattaaatggtaaaatattgggattgttatattatttttaaaaatttgagcaagttattgttgctaaaaattagtatatatataataaataataataatatgtgagattataattataatatatttgaagagtgatatattattagagtgtttttaaacaataaaaatataaaaagtaatgtgaaggagaaataaatataaaaaataaataacatcaattttattgtacataaatttttaaaataacattatttaatattgaagataattagacttgatatgtattacttgaatcactagaataccgttaccataattttgagtgtagatatatttcctattgtacccttgcattatttttatccaattttaaccattattttatcattagtaatgagagtcaatggagatattttgtaaggttaagaaatagtccactaattttttcccctttattttctacacaaagtggttactgttcctttttgaattttacttcttcaatctaacaagtatcattttatgatcttcactcttttcttttttttttttttaggagatcttcaatcttttagttgctttgtttgttattatcaggtcttttaattataaatttaataaagtatttgatttaaaaaaaagtcaataacgatgttgaatttatataatataagtaacttgtacacttgttta

SEQ ID NO: 187858 - DNA, 2115 bp, Cannabis indica
atatatttgtgttaatgagttataattaattatagagtcagtagaaatttaaacaattaactagtattagtatgttcactgttaaattttcaaacactagcaaccttttctttcttgcaatgcaatactatttcaaacttgtattttgtaaaaattataaattaaatccttagttttataaaaattacaaattaaatcttatattttctaaaataatacaaaataataccttaaacttaattttcgatattttcgatatttttttaatataaccaacttgaagatttttaacacaaacagatacaaaaaaaaatgtaatcaactttgccattaaactctaaattaggttattattaactattttgataaaaaaaaaaatagttcaaaatactatgttgtactattttgaaaaatacaaaatttaatttatcatttaacaaaaagattcaatcagtaatttttataaaatacaaaatccaaaatagtatctaccctcaataaaccatgatcaggctaaggtgtttaccattatggttaagcttaaacaaagcaaaagatttgcaacctaatcaattacattgtaaaaataatgaaattttcataatcaaattacttcaatatgacacccaatcattcatctatggttgcaaaagaaattgtcaaatttatacaattcaagatcaaattaaagcatcatattttgtttcagagaaataaaatagaaagagatcattagatttaacaagccaaccatttttttttaaaatattaggaaggcaatgatgtattacaatacacataataaataaactttggaataaagaagaaaaaagactaagagattcattaaggggaaaaaatgaagccattaccacacttatcaaaatagtaagatcagaaagtgatcatactatccttatattcacagcaatggtggttttgtggtttttttttttaaatataataataacatttgctaagtagtgcaaatgaaatatcttttttctctaacaataagcaaaagcaattccaaactttgcgtctgacctggatgttagaaactgatggatatcgccccgaaaacctagcttggctcgaaaaatatttgcattcgacatttgccttacgaaacgagtaaatcgaacccaattttgatattcgaacatgttcttgtccatcctcacgaagttgaatgagaaggagggtttctccagaccgtcggagtaaaactttgacatcttcaccacctgttggaacgatccatcatccaaatttgatgcagcgttttctccctcgagtggtacatcacacatcctagccgccaatagcaactgcttgagatatccctctgggctgctcacagggtttatctgtttctcgtctttgtcttgcatttcgaagcatgagcagcacaaagtgaaaccatacttgccgaacatacgaacaataggtaggtatccatccctagttaaagtattgtagtagccagcagtcaattctgatggatgagactgtgtgctgtaatgccagtggattccagccacttttgctgatgtattaacttctgtgccccgaaaaacagtctcagcttctttacaaatcctctctccatgcagaagcaacattccagagtaccattcaagaaaaaattgtccataaggtgtattccaagatccggtatcacttttgaaaaactctgtttgttcaggattctgcatcaaattgccagtgccgatagggcccccatctccccactcacgcatcccaatctcccttgcacaagcattgagagacgcaagcatatactagcaacaatatttgaaaaaaattaaaattaaaaccaaaatcagcattggtgctaagtatctttatcagactataagtttctacttaccttatcgtagcattgaaactctccaagttcgcgagaacgccaagcccatgttagcttttggctagggcatgaaggataccttagctcaccagcaggacccatcccaacctgaattccctacaaaccaaaagcacctaatttaaagatcaaggcatagtcatcaatggttaagccctcagtctaaaaaattaagatgacattgtcttactgtaataatagca

SEQ ID NO: 187859 - DNA, 4140 bp, Cannabis indica
gagagagagagagtggtggagagagaaagtgagtgtctaattttagtaaaaaatgaataaccctaattttttatctcatagtttacaatatatcataaattagaattcataaacttaaattaatcttctaagtcactaaaaagacaaaggtcaactcaactcaaggcaaaagactattttacccttgcttcaccaagaagcaactttgccacctttggtcaaaactaaaataaccaatattcctgacattctcaattaccccgctatttctaaaatactaaatcataggaaaaactgactctatcggccaaacgccgcgttccactatcaccgggcataaaatccaaaaaacataaaatttcatatataacataataacacatttttaattcaaatatatcaccataattatgtgaattacaattaaaagtctaattccaaattacaccttaattatttactaattctcatattaaagttaagcgatcattacagggtccttcactaaaggaagttactctcgggagccatcatctcccactacctcccaaatctgcgctccttttcttgataattttgacatattttcatcgtttctgtattctttcctctgatcgtgccatgtgccatattcacaaaacttagataacagaatccatttgagaataagtttggatcgtcattgcaggttagtgggtcgaggcgagtcgatcttcaatgcaagtgagtgggttgaactacaacatagtcgtttgataagattttattttttgattgaacttcaacgttcagtgtatggatagttcttaatgattgggttgtagattggtccaatattgaccttcatcgttttgtctttgtaaaatcgatttagcgtttagtgatatggaccaggtggatttggaaataaaaaaccaatacatgtcgatacgattgagcaaactattagtctgatcaattgagcagtcaattggtacaagcagtcgattggtccgaataattaaaattggaggaggctttataaccaacaaagaagacgatttgggaagaagacgaacattgaaagttgacaaagtcaacaaagaagaactatcttggtcacaaattacctattaaagttttgatttgaggcctcaaatcttctttagcatgtacgcattaaacaaatttataaattatctattttttcttgttttttatttttttgtttttaataggtttcgaaactatataaattggtcaattctttgagtatgaattagagttgttattatggactaatataatcataggcttaatatcataaacagaattattaactatgtactcaatatttatcaacaaccataatgggaatagttatttatgatattaatgccacatgagaacacccttataactataattggctcattaaattatactattattattgaaccacttaagcccaattagtgtataacccctaaggattagaagggtgtgacatatatagatatgtcttaagtgaaaaagttggtaatagtgaaaaaaagagataataacttcacattatgattctctctaatattgtttttgtgttaatcctcattatagattcttggaatcaaaatggctcacataaatagattattaatgggaggtatgtgattttattttgttttggatgctctacatgaaatgtttatcttggattaatgattatgaatattgataattagtatgtactatatttcttttattgctcatatctacgataatgaacaattagtatcagagttaatatattttatttagaagctccataatatttgaacttaacccattttgttttcaaatctattttttttttcagatttatatgttgttaatgggtaatatgagattaaatgttttagaatgagttttttcttgatttttaagatggttacagtatggttttattgtgaaataccaaatttttatagaattcattaatggaggaaaatccatttatggttcataatactttgactattatttgtatttttttttgaattaaatgagtattggaaagtgatagaggattaaaaatagaacaaaatccctcaaacaacaccgaattttgtggccagagatggtctatccgaccgggtcagaaatcaggtcgcgccaatccaaattgtagacccgcaaacctgtggggaaatttttgggtgatagggacggcaaaaacaacatgttgttttgcctctatcaggcaaaaacgacatgttgttcccttttttggtttagccccttacaatacgaatgatgatttgtttgttgaccctactgcacgttgtttccaccaaacccatgtcctttttccaaaacgacatgtcgtacgactctttaaaaaaacaggtggtgggggcacgtgcatagccaatttttggtccttttccaccattttgttctatttttattttctatcaaatatttgtatgcacatactaattcatgaattttattaatattttggttattaattttagtattatggcataaattttatgatttgtttaataattagtgcttattttttttacctatcgtaagattgagaatgaaattgtttggtcatgaggaacatttaaatgttaatttatttaaattttgtaacttcctccaaaattttattaagattcttataagtaattaagtatcctatcgataataattgctagctaaggatgcttaatatgtacgaagtaaaaatttattaaaatattatgaaattacaatttatctatcctttcgatagaaaattaatgtatttaattattatatttaatagattgttcttacctgtgtatgagttgttcttacctatgtatgagttctattttattattttatctaagaactatagcatacatgatgatcatttgttattttacgatcattcatttatgagaaaagagcacaaatgacatgatttttattataacatgcatttaatggttattgctcttgtttctcattcaactttaaccattccaagaacctctgcgatgttaacgctaaatggaaccaaccacaagcagtgggttgaatcttgatgtagaccaatcagttacactgcggtcgcgatagtaaacgggctatgtcgtattcacaggaaggcaaattaccactaaaaattagtataaatagaatatagtagaaattgaaatgaaggaaaataataaaatgagaaatgagaaagaggatgatcagataaagatcttaggaaggtagaaatgtagttatgcaaatcttattctaatgctgatattaattcgaacacagttgcaattttacaccattaattacaagagaaaagtatatatgttaaaagcacaaattaattaatttttcataaattgaatctcacatctaacttaacagcatatcatattgtatattataaattgataaaataccattgtttgcagaatgcagtaaacgacatacaatataataaatacaccaaaataattaatagcctaacttacataagaaaggcatgattgaacttatataaaagatactattgaatttagaaaaaaaaaatagaatatgaagaacagtttaattaattagatatggagatgaagcacaaaagaatcaatatcaatagttgaaataagatatacaaaggctacactctaatctcacaaatatttctaaaatagttcactcatttttgtcactagaataagtaaataaaatagtaataagagagaacaaagaagagaaagtgtatttctctattataaaatctcatgccatttacattatatttgactcttatttatagaggcaattgatcctgttgtaattccagcaacaataacaccaagaattcaatcataaaacctgcaataaactcacaactttgacagaaacaatgaacacaaactaattaacaatataatgaatcaaaactagaaatcaaacaaagaacaacacaagaatttatcctggtttcggtcctagagatcaacatgatccctggccatactccagctgagaaccatcaccaattcttcattaatatgtggaataagagagtatcaatacaattacaagaacacgaacaatctcagctctattagtactcgaaacacaccagag

SEQ ID NO: 187860 - DNA, 1543 bp, Cannabis indica
gccttttctataataaataaatttcacaattatttatataacaattaattataagaatggcaataaatgacaagataactttttatgtagttttgaagttaaatcttcatagtatacagaataccatgacaccatttttcaagaataataaatacaatattatctatttttctaaaggttggccctcatgtgttccctggtttctgtccttatttattggattttaggatgacagttattttcttgggatatgatcatttgcaactgctcatgaaacatggacattctcacgtttcatttttcatgcaaataattataaataattgtataactgctgtttatctttatctgaagacgattatgctgattgtgcttcgttgatctcgccattcaagtaatacttttcttaaataccttcacggaaaaatgtctaagtgtacaattatagtgcatctcgcatccttcctttgagtgaagtataggcaagacgattacttcaatgtgttaagagctgagatgaagaatgttgaagaagttgtctttattcttctaacatactcatgagtatgtgaatcaatgagctacatactcattatctacccatttcaaacagtaccattatatactccgtttatcccaaaatagacttattcacctcgttggtcccatcagtttgtagttattactcatgtctcactattgtctttgtgacggcgagtttgagtatttctactgactatatttcccgaggaaagtcatgtaagtgcatttataaatgtgtaatttaacttggtttatattccagctttattacacgtgtcaactttttattgatgctcaaaatatgggtttaataattgctcgctaaaaattgctttttaaagtaaaaagacgttttaaatgccttaagggtacaatcgtatattccccatttagaaattgcatgctttcattttggcgaatcaaaactttgaggcaaatcatttcaccatttaatgttctaaccgttcctttcccattagttcccatccatttgatctactcttttcgtgattgaacgtttattgtcttttgggtataaatttgaagaatcccttctctttcacattactgtccacgaagcttttagaacttaaaaaattctcaaccatatccctttctgaaattgcatgccctcactgtcttttacttttttctttgaatttcattcgattacactcctcgactttagaatcagcaaaatccaatatttctaaactaggagttctcattgccaacttcttcaaaaatcaaagtttgttattgaactagtaagtgacatttccttttgttgactccttttatgttttaaattttgatttccttatatgtgcattattttgcatttgtaatttgtttgagtaagctttattttaatgtttaagtaatctagggcttagaaaatttaaggttatgtgactctcaggttcagggttttatttatactcttttttttttccaagaattagggcattattctttgtgatcatatcccaatttaatc

SEQ ID NO: 187861 - DNA, 2853 bp, Cannabis indica
tctcgcgagtgcagaagtaggagtatactatcattccaacaagtgcaaccatgatgcctaagatgttcctccagttgaacgggtcgtgaagcaaaatataaccaaatgcaagtaccagacatgtcttcagatgtccaagtacctgatatgtaactggagatgtctttccaataacaaggaatgtactaaaatttacagagacagagatcatgcaggagagaacgatgaaaacctgtagacggacagcacatagagaattacaacagtcagagagagcgagagagagagagagattaagttacaaaaaaattctttcaattctcaccagcacttgagttgtatacttgaaagcaaatacgttttgattagtgagaaactgatccaaaaatgggccagatatcaataatgtccctgcttgatatggacatgattgatatagaagttgggttgaagagaccttgaatttcttttggatggtattagtcatctaaaaagaaatagttaagaacttaaaacaagattacacaggagaaaccaaaataagcctctatagcattatttatgaccacaccacataatacattttcatatcattcatgcaaaagaaagaaggattctgatattctaacaagtcatacatctgccactctgtatgaaagaaaaagtaagaagacaccaacaagctttcaggccaaaataagcatttgatacaagttactgtaaacgtgctttgcaggacaaatgctaaaatgcaagagtacatgtcacatacttgtctagcccattttacatctaaatttaggggtatcccgattcaaagaaggcttaagccgtccaataaagttaggcaaagttaaatgctctcattaaattactacagaagtaattaccaaatactaaattcatgcaaatgaaattatagctaaaaattctataactaactggtaaaaatttttctcaagtgctagaagtgaagcatgtctaaaacatttttataatcaaacatggaaatatgcaaagtgatcattttgattttaaagccaatattggaaggatacaatttgagcaacacatgttgtgacaattgcaagaagagacaagatggagcctagagcattgagttgaacgtcattgactgttgcaatcccaaccccaaggaggagaataagaagagatagctggatactcctactgcaatgacaataaagtgcatcagtacagatttatgatgcaagagacacagcaaggttcaattgaagaaaatgaactttgtctaaggtggttgattaaaaggggctccaataatgatttgcatatataaaattcacagaggaaacacttttgactgatgtttagtgcatgcatacacattagcctataaacaaattaatttttctataactacatgcaagctcatgcaatgtgctagtatcagtaaatggcacccaatgaaaaagtagtattttgctatacatcaaatgtgatgacccttcaagtctgaagttagaatcaagaatcatgactatttacggtataaagagaccccaaatatgttaaaagcacgaaaagggatctgaaatctaaatggctgcatgtacagtgcataaggagttaactttacccttatgtacagtgcataaggagttaactttacccttgtacaatcctggtaatcatatgaaaggaattaaatcagcaagaagagaaacagtcctaattccagacttcagtatccaagtcaagagggtaagcatttgttaagagaacctgaatttttttgcaaggaatagggtctccaagaatacagtacaagggatgattgccaacttagtcatctgaaatgcagaaacaaaggagcatttcaaaattaattctaatatcgatttacaaaacaaagaataatgaatatgcaaatatacctgatagaaaccaacagagttgaaacccaaactaagatttaaaagcccaatagatatgccattaagaatgccaaagcccataacagccttttgctcaaaagctttatgttcaaaaaatttcattttacgagcggcatgaagggaacagaaggtgactagaaggtgccagcttgtcaaagttgtagctgcaggggacagatttattccatcaaattaagtgaagaaaatcatccccaacacaattcaacaatctaaacataatttatgagtatttatatcataacaaatatacttgtaaggaaacaccatgatcattgataaatgttaatgatcaacttaagtgataaagattcacgtctttgcagtattatatcactactgcaatagtcaagattgcttaggcattattaagccatcgttactatcgagctcaccattgtaggtagaaactgataaagaaaagtaaagtaattgtatcctcagaaacagggggtgtttcagaaaaattaaagtcaaagtaaaactactattatgacctaggttcacctcctacaagagaccaaaatagctcagtttcaacctcgtatttcctgagtcagttatctcagaactaaagaacgtctacatgaatatcagagatagattggttaagctttagaattttcactattacactacatccatggttctataatgatcacacagaatactgactgaagaaaggacaaaaaaccacaagattgatgatagtcaaacatttgtaaaagtaaagttcaaattacaagactctattcttgcttgagggctgcatgattgtttcttttacatttataagatttttcaactctgaattcacttatgcaaatcaaaaacgaatttagaatttcagaggaccggagaatgtatatttgacattactaacctatataagcat

SEQ ID NO: 187862 - DNA, 2614 bp, Cannabis indica
tagatctattgtaaggatattctctgcgccatcctttttcgttggctcgatcaattagatttttcagcaaagcaagttctctaacaagccactgcaagtcacaattaacattcaaagaccaatatcccaaacagagcaacagatataaagcattaagcaaataggcagcctaatatggataatacagcagatttcttttctcataatataatactcagtaacaaaatacatacatgcttcgtcatgtcctcatgcaatatctgggccttctgttggagctcctcctataaagtttaagaacatttacaatgtaagggcacgaaaatcatcgtgccaaactctctctccttgcaaatttatttttgttgaatgataaaagctttttgggaatttcacttttacaagcaatgttttaatgaatcattctttaatacattaaggtggtgtttggttagaatgaatgaaaacatagaggaatagaaatgagaatgggaataaaaatggaatcaaatttaaaatacacaaaaaaacttaaaaactcttttggggagaagataggattctagcttctctcaaaaacttctcccaaaaggacttttaagaagtcatttttgaaagtagaataatttacataattcctaacttactcagaaaagatgttattttaataacttgcaaacactttaaaaggactttttataagaaaagatctttatataatagttattcaaatagaaaaaataagttaaagcttttacttagcttatacttctagttataagcaaaagtaaaagcttatccaaatagagcagaaatttaatatgcaaacgaaatagaggaaaaataccaccgtaggtcttttgagcattccaccttttattctttgacgcaaatcctcacattcttcctttaaggcattgcaacaagattagtacgcaaaagaaatttaaaaaggtgaaactcaggactaaaaaacattttactgcatgcgattctagatatcacaaaccgacattgttaccaaagttccaacgaaaatatagaagcctactaatcactacttatcagcactttcacgtagcagaaaatcccaaatacatctagacttacaacaggaatgtcaaagaatatgcaaatttaaagacttggcaccatggaaacatatataaaaaatacagtaaaaggcaaaatcaacagccggaaactccagcaaaacatacaatatgaccaatttttcaaaggccgaatccaatgattacacatgttgctgacaagataaatcacaagctatattaaggtataagcccataaatatatataaaaatatagaaagaagccataactcaaatcaacccaattcaaagtatatccaaataaatatattagattaccttagagaaatcatcatcagaaatcaaagatagagggacgtcttttataaaaccagaaacttgaaaaagagttttattggattcagagaacctcacacctagtcaaaatacaaaatgaagatattcaattcataacatagatattgcagatgtaaaattcagagtgaatataactaagcatatgaggaagaaagtgagaaaacctataacttggaggagacagtgagagtgtttctgaaggtagtcattagggtcagatttggtccttacaaaacttcccacaattttcgtttcgaaagttgaaggctcacccttcttctccttctccttctcctcctccataatattctcaattaaacttcttttcaaataaacaagctttatattctcaggaatgacagcagcaaagcaacttttaaggttagacttagaagcagacgtttcaacaatcaatcttttaggacgatgggatttttctcgtttttcttctttaactctctcttcttcattagcataagaaagataatcaattgcatcgtcgtcatcagaataaagttgatcattagcttcagccaaatgggattctaacaatttatatatcatggtccggttaatggattttttaccgaaaagcgatcgaagcttctcatcacaaataacctttttcttattcttcttcttcttcctcccattttgactaaaatcaagcattaaacttgtagttgaggagggtagaatactctccacatactcattgacaattttattaacattgatctgagagattggatgagtagtgtcaactccaattgaatgcaagaattcaattaaggctgttgaaccccaccctgaaaactctatcctctttcttttccttaatactggactcggttgtccaaacgcaacactcgaatattcctccatccacacaatgggctctatcattttctctccaccatttccctccatggtttatcaaaatcgcattctgcacattctctctctcagcttcattagtcataaaataataataactcgtttttcactcttttttcattaccccccaaacagagacaaatatgaaacatatatatatatatcacatgtatctatacataccgaggagtgagagagatagatagtcacgcttcagaaaccctaaattaacctacaaagagagaatggaacataaaatcatttccatctacaatttactagtaatg

SEQ ID NO: 187863 - DNA, 5026 bp, Cannabis indica
gaaaaaaaaattaaattaaattttttttcttaaataccgaaacagatagggaatccaccaacctttataggagtctactacaaaaatatctaaaaaattatatatatttaaataatgtcacgccgtaacgggtagtggaatgtgcacttccttaactttgagttatttatttatttttattttctgaattatttttctttttttttttatcaagaaataattttttattaatcaaagagaattaaatacacctaattgggaaacacccccaacaaagctacttccaattcctttacatttttaaggatcaatctatcaagacttgataacttcttttcaactttgagattctctttaatgactctctatatacaaattggagctaaccaattatgcttaaatagacacaaattttaatttagccaaatgtcatatatagcacttgctaagacatcataaaaaaaaaccaaaaataaaccttttagcctcttaacaccaaccaattgcgcactcttcaaaagaacttggccaaatatgactttcaagccaactcttgatattttatagcactctttaagagtaaggacaatcaaataacaagtgatcacgagtctctaaattctactaacacaccgaacaagtttcaatggcaataagaacataatgtttcttgacaaaattatctcttgtaatacaattagtgtgtaaaatgtgccacataataaatttatagtttaatgctgagagcttacaccatgtcgcttttatactctgaattaaattttaataagtacattttatatttgattaaaaattaaaatataattcaacaaaatagatatatccatctccattgtgaaataaattgttcaacattatttttatattatatattattttaaaatttataaaatattttaaattatctagaaattagaaagcaccaaaagaattatacttaaaaaaaatctaaaattaatggaaatattgagtttggcattcttgtcacttatcatattcaaaatgatgtaaacaatttttatttacttatttattttaatattacattatgtcggctttcatgtcgttttcttttcttttttttttcatttttttaaaataaagaatctttgctagactttttttttttctactttctaatgatagatttttattgcgttcaaactctactagcttttgttattacatgtcgtaatgttattagatttaatatgaatcacacaattctttgtataattaatcaacattataactctattaacaaattatcaattaaaaataaaaaaataataattaaattaatcaggatttttacttttgatatgtactaaattatgtcctttaacttttttggtcattaaaaattttctttgaattattgagattattagttttaaggacttttgtctcattttagccatgtaatatttttcaattaattagtaatttgcaaaacaaagtaattaatttttaccgtcaactaattaaaaaattacatcaatcattataataaaaagaattatatttgtccatccaaacttaatgatttagagtttgaatcttacatatgtcttgtttaagacactatacgaattttgtattgacgaaaaatacatttttaccatcattgagtgttatgttgctaaaagaaattattggatttattacaaactcaaaattttaagtacaacagtatagaaataatcattccatgtctctcagaagcaagtactaaatctaaatcatcacgataatcaccctagcgccaattttagccaaatcattaatgcacgtacaaactcacgtcataattgattttaaccatctccgaagatagtttagatagggatagaaattatacccacaggtttaagtacccgcacctaatggggcgggggtcaaattttgggggcaggggtaggggtgggagtcgaatttcaggggcaggagtgggtatgagtttaaatgttcatactcgagtcgggattgaagcgggagtaggggaatagatacccgccccgatataatatatttatatatttaagttttaaaatcataactatattaaatttaaaataactttatagtttaggttttttttttaattacattaatgatacatttcacttttcatgaaaatgcctacagtgatacatattaataatcacacttaattaagtgctttaaaaaaataacacttaatcgtattttcgattaccaattttatatttactaactccttccacttatattttttgctttattgagtttttgtgattttttttttgaaaaaattatctttgagatattattttttttaaaaaaaatatatatatatatgtaatggatactcaatgagaattcttcttctatcgagtaatccctgcgttgtcctcgctttaatttaaactagtattcgaacaggtatgtgagtgaacttaaaaaatgggtatgagagtatgagagcaatctccactcccgctccgtttatatttctaagtttagaccatttaacggttgacttgtctctaatatttttctcaaaatgatcacttctccctaatattattgtgcataaactcacacttgaccattattatcctttcatttaaaatcttatcatgaaaggagattattataattattgttattatttaattacaaaaaaatggttaatagacaataatgcatgcctagataattgtgaataacacgttatgaaatcatgaaatagacatttaaattatataatttaacgtgactcataaatatatgttatagttttttctttacaaaaataaaataaaaatattatagttttattgctttggaaaaggaaatacaaataaatttatgagataaatttagataggttcattgttcaaaaaaataaaataaatatagattggaaaagaagacaagatcacgtgggaaaattaattataaatattttattttaacttaccaattatttatttttattggaatataatttacggcataacccttttaatatttgcagttaatatatttcattttcacttatttaatcttataaattgttatatatacgattttaacacataattttaattcttttaatatttacaattattacacatataatattttaataaaaaaatatagtaaaaaaatcttatatatcttacaattttattacagtcatacttttttagttattatgtatttgtttaattaaaggaaatttgtatatttttaattataaaatagggtacattatttaatacgtaatttaataatatgtttctatatatttttgagttggtactagtatttaattttcaaaagagtacgactgcaataaaattataaaataaagtatttttaccgttatttttttttattataatcatatttgtaattgtaacaattgtaaataataaaaaattaaattggcccacaaatataccttctttatttatgaactaccattctacatgtaatacatgtttttttttttgggtggggcatacatgtatgtacccatggcctatttgatgttaagatttttttttaaagaaaataaataatctattttgggatgacaaaacaattatataaataaaaataataatgaaaatgaaacatatagaaatgaatttttagctaaacactcacaaacataggagacattgatagacaaccatacactaaaagttcaaatgaattattgccttttttttaatttaatatttgcttagatgataatgaatccaaataaatgaagaaaaaagaatcatataatatttgctaaaaataatattgaacttttttaaaaaaatatatatgaaaacatatgccctagccttttattatcttccaatattgactatgtattttcttaatattttcttttcttgttctattcacttttataaaagcataatagtgttttccaaaatgatatcctaatacccttcttcttttttgtggctacatttcaaatagagaaaaaaaatatatagaagatttttaaataattatgccaatgctaactttcgtaaagaacaaaaaataagaagatacttataagatattacaaataaaaggtatttttttgtttaggataaatattatttttagactatgtattttgtaaaagttatcgattaaattttctgttttattaaataacaaaatgagttatgtatttttgaaaatgataaaaataggaccctgagcttaattttcaacatttttttaatataaacaacttgaagataaaacttaatacgaacagatgtagaaaatgtaatcaattttgtcataatacttttaaatcatgttattattaaattttattttgataaaaaatcagttcaggatctaatttgtaccattttaaaaaatatagagtctatttcgtcaacagatggtgtaatcagtaatttttaccaaatacaaagtttaaaatagtatttactttttttttattgtttttatttttagtagcatttgattaattagacttgaattatggttgattattagtgttaaaagattaattaattatgcaattaattctctcgagtctcaatcttttaaagattcaatctttctatacgagcactactctcgcctgagcatgcatttgattgtgacaccgaccatgtttttcaagcaagtgtagggctcaagcattacaacattcaagcactattctcaactactcttgcttgagcatttgcttgtgacgccgaacaatacgtttttcaaagtattttacaacattcgaggatgccgaacaatacgtttttcaaagtgttttacaacatttgagtacgtactattcttaactatacttgcatatttttcaagtaagtatatcgctcaagcatttgttgtaatgcttgagcatgtttcgtagattcattattgttgtaatgcttgtctcgaaatggtatatattcctcgttatattgccatactaaaattgtatgcaataaattatatatatatatat

SEQ ID NO: 187864 - DNA, 5158 bp, Cannabis indica
atatatgtataatacaatctttataagacctcctaaattaaggagccccaaatgtgcaatatattgtttaatgaatatttacatataaatgaagaaagctgaaaacgctacaaattattctatggaatgattttaaacgacgtgtcatttatggagagggaacaaacaaacgacagttggaaagtaagtaaattatgttcaaaatcttcaatttctaaacgacagcaaaagttgagctgagtttatgattacactgaagattaatcctagctatgactgaaaattgttattgatgatctgattgtgatcaaggattactcctgagactgacattttccttagataacattctgctataattggcattaatgattcaatgttatgaggcattggagtttcatcagaatgcccagaaatgcagagttcaccaaaatcatcttgttcccagaaaacttcaaccataatcccattaggattttcttcactttcagttcctggaatcccaacaaatctagctcccactggtatctttgtattacataaaaaggggcatcattagcattgacttcaaattctatatatatatatatataaaaagaatgtacaaaccagtaatcaaaagttggtttctacctcaactgaagtttcagatgttgttaaattaagagtaacgaatcttccttctgtcattgcgctttcgagctctgcctgccttgtgatgttcatgaatacttcttcaagtggtgtgagaccaatttgaatgtctgttatgccaaattcgctttctctatcttggagctcagtcagaaagttctgttcaatgttggagcataataacttaataagtacttatagttggactttttgattgaatactaaaagagaaactagtaaatgaggtcaataagcttactggcagaagcttctctttctcataagaaatagaatatgtcaaaagggatttcttctcttttttcgggccaacatccaaatgctgtaaaataagtagactccccaagttaggaaccaagtacatctttaattctacaaagaaaaaacttggaactaatcattttcaactacatgtttaaagaactgcttcacagcctcatgatcacgagtagaatgagcaacatcttcggtaggagtttgtctgttgaagttgatattaaaaacaaaaccagttccaaatcgtgacttcaatctgactgaggtaccaatgcaacgaagcctgccattcgccattattccaatccggtcacttaagatctcagcttcttccattgaatgtgtagttaagactattgcacgccctttctttgccttctttataatatcccagacatgtcttcttgcaattggatccataccagttgtctggttgagttgatcatagtgtgaattacatgacagattaagtaaatgagcataaaaagacaaaaaattaagggtctaacttgcttacaggctcatctaagatgaccaattttggatcaccaataagggctactgcaacactcagacgacgtttcattcctccactataactgccaactctcactgttgctgcctttgtgagtctcacctcagctaatgacttttcaatgacctgaattcagaagaagaatttaccttaaatccaaaatctatgcactcattttgctcaaaacatgtgttgacaaaaacatgttcaacttgaacaagaacatgaactttacatttacatactgaatcgattgaagatagaggtagacccttaattctcgcgaagaggtgaaggtgctctagaccagataacgcatcccattgaatatcaaactattataacaaatgcaaataaggttataccatctcatcatctgaaattaatgttacaaactgcactacttttcatgattttgaaatgtaaccacaatgaaaatgtaattattcaaaactcttccacaagtagtataaagaagagagagaagatatcacctgagggcaaactcccatcagtttttggacttttgacatgccaatagagcttcgtatggaatggccatataccaatgctttagtaaggaaatttcacagttaaaatcagaattaaaggtagaacaaggtaataagattggagacaagttttgagtagcattcatccagtaaaatatgatagttgacaacatgatgagaaattgtaccatctccacttgtcacaggtgtgattccagtcaaacaattgaatgttgtggtttttcctgctcggttcattccaagtagacagaataactgatccttggcaaagtttagccatagaccctgaaatttatatcaacaaattaatcagaacttactacattattgtactaaagaatcctctaaacactactgtctgatttttctgcattatatatcttctttttgataactaatagttcctatgactagttgagagagactgctatagacaaacaatcaacccagctgagattatcataaaattctttccaaatgtgaccttagatgacaatcataacaaaaagtaggattctttctatgtttttcttttttaaaattttcagaagtttcttttatcaaaccatgatacaaaatgtcttgtcaccaaagtgttaaaactactaaaagcaatgtatgcaactgattactgatgtgtgtctccatacattgagagcatggtacggtggagttttcttgcatttgaagcaaccagttttcgtagtcccaggatatgtttttacgagaccacgtatctgaaccacaatatttgcattgtcaatacccttaataatttgttcttttataatcttttcttcttcaaggacatcttcatcatctgaaggaatatgattttcctctgggattgaagttaggcaactacaaatggcactctctatgaagagaaggagaaaaggaaattagatcttaggtatgaatctataagaaaaataattatgataataataaaagttagggaactgattcccaatcttcttttaccttggactttgcttccatctattcctttccagtatccaggttttagaaagtagaatactgattttctcataccagattcctttgggaaaatgttatcaaaatagattgccaatgcaaaccaaagaaagaaagtagccagcagccagttatatatattattctgaataagagttcaagtaatttctattagtaaattatgaagagcttatgaaatgattcattgccttaacatgttcacatacaattgttatcacacagtactcatcattgggagtgcacattgctcgaccactccagctgataccaacatcttcaggcgaggaagttgcatcgctgagcagccataaggctttagccagaagattaggtggaaagaatgaccaaatgatctgacacaatttagagaatttggacatgtatggaaatccaaatactccaacaaactgcaatgaaaagaaaaaaaggaacacattgtgaatattgcactaataagttcctttgtcttgtaaagtaaaattgggaaaatttgcctgaatggaagagccagtgatgtaaaccgagaaaccggtagctgtacatgatgctgacttgttcaggaaggttgataacatgaaggcaaagccaagcttcaagtagagaatagagaaaatgatttaggtgttgaaatttaaatgagaatgatgcaaagagaagtctttttaccatattgagttgaaacaagaagaagacaaaaaataaaacaatgaagctgttgttcaagaagaagtcaagctgaaaaagtgtgccaaagagcactatgagaagtgaagagagaaatgtgagaattccctcccaaactagccatgaaaaccagtatgcagagtcatagaggcccatcaaagtcattgcctgcaaaatttgaagtaaaagaaaaagaaaaggaatgttacgtgttaagctccttttaaatgatctcatcattataagcttgaaaccttttatggaaaatttgataaaatacctgccgaagttttagttctttctcggtcaccaaagaagtcatttgaaatacaaaaccgaacataacgattgcaaggaaaaatggaggtcctactgagctcattgaaaatggagatcctgctgtattcattcctaagagaatattttgaggaggatgtgcaaattccttgaagccaaaagcccaactaaagttttgaactgaacattttagagaaatacttaaaattgattgtaaaacatcaacttgtgtgtagtaatcatattaacaaaaaaaaaatctttcaagtacacagaatgtattacctccaatgagagaccttgaaatctcacgctctgccgcaatttgaagtgggattagaaatttgaaagtgggatcctcaaactttcctctcttaggtaaaagagttgaattagtctgaattccatagctaatcacagaagagtttctctccatgaaatgcaaagctccataacagtacattggatttctataaagccattcatctacttcagcttctgttttgaatgacttcacctacaaatttaaacataaatagaagtattggaaattggaatagtactaaaacaatagagtacagttgttccttctcttaatgtcatcaaacaacctttattgagggaataggcctccctggattgttagccatgatggcagccacaatgctgcgaattctttcgctttcatttccgctccagatgaagtcatagcaaggaagcttgacatagaagttatcttcacagagcggtattggaggagagatcagaggcgtggggtcagccatgtttttgaaaaaggtggagtttgatatgcgaatattgatagagatttggatacagaacatgaggaagatgaagaagaaggaagcaaatagctgaataaaagtagctctcttgtttcgccatgaaagcaaaacattctttttgaaaagagctttaaattgttggagcaacaatggtaaaccactctccaatttcatggcttcagaacagaaacaaattggatgggagacttagaaattacatgtaacacatgcttctactcagtgttgagacttagcaaatgtttaaaagttagttggtgtccatgaaccgttgaagtcgttgggaaatgcttccctgcattaaggactatggtttg

SEQ ID NO: 187865 - DNA, 1106 bp, Cannabis indica
tttatgttttaatttttatacacttatttattttttttatttttttgtggcgaaattcttttaaatttgcttttctttgtaaatttaaagtttcagttagatattacctttaaataacaacataattattactgtattgatttcgaggttttactgttatatatgcacaggtatatacattggtcatccaattaatatttaacagtaatatttaactagcgtgttaaatttaaaaaaaaaaaaaataaatataagaagattttggaaaaaaaaatatatatatatattaagtgtataaaaatgaaaaaatacaaatttttatcacaaattattctatttattttgttttggttgaaacaactaaagagctattaaagaaagcgaaaaacctaataaattagttcacctaacctagaataaataaataaaacctagaaagaaatttgttaaaaaataaaaaaactaaaagtagttagaaattcaatttaaaacatgtatgtaatgtagcattggatcccttcccaaccaacatctttgaactatttatctgatttcaatatttctatctcaaccattagatttacttttttaaaattctgaatctgatcatgtctgattgtcttccactatttaaatcccatcattctcttctaccccaccattctctttaatattgcatctaaaataattataaagaaaaaaaaaatccattctattctatttttctctgctaaatatacaccataccactctactcaaaacatattatctatccaatttgtgtcggaagagaagagatgacttcaagaggtacttcatatacatttgaagaagatgtacacctctgcaagaaatatctccacattttgaaaaacccaatcataggtagaagtcattccaaagacaacatctggtccagacttgaaattgattataacaattccaaaccagagttcatcacccaagttcgacctaaaagatccttgcaatgtcgaatgcaacttattcttactgctgttgccaaactcagagaatgcattcaacaagttgaaaatctaaatctaaaggatgcttcagaactagatattgtgagtctaatttacatc

SEQ ID NO: 187866 - DNA, 3602 bp, Cannabis indica
taattgtgtcaccgggtttcttctctctcttcttcagcaacttaaactgctttccaagacctttaacagctggttcaaccccagaactttttgaatcatcatctgtttgattttcctgcttttgtagatgttgaacccaacaagaacccaattcccatctaataggcctttcagaaatttcaggctcttcctgtgatcttttcaagctctctttgattacagttctgactagactcatggaagtttctgaattatccaaatcagattggctacttcccaaaggttcagcagtgggtttttgaagcagagctctcaggctgtaaaatacattgaaactcatgaatttgaactagttttccgattttgtaatagcttttctgtgagacattaaaagaacaattggctacaaaagttgcatatagttctaacctgttgatattaagagcatttgctcctccatctggttggtcatcaacttcaatttcttgagcctcaaaccttcttttattcacattgccaacggctttaactgttgcactgtatccacaatgtctgacattgacaatgcccaaggaagaagtatcctgtaaaaacagtcccaacaatcataagtgttgatccacatcattatagaaataaaacttcaaagcttcacacaacttttttgaacatataagctatataccaaatcaatcataagaaatgaatacaagtgctttgcttacatgaactacaacactctcatctgctgttagtcccttgagtaaactcttctgagcaaactctttgacagacaaaccagatacttgatcaatcactttcacttgagaatttgagctcacttctgttgagtcacgtttcacagtaatggacaagtcccctacacgattctcatacacaattgaagactcattctgtctcgaatcggattctaacaaactgcttattgcttcagtagctttcaatactgagacatcgacaaatttactatgaagcagaaaggttttgcgatctctaaccactctctcatcctcagtcttgcaaggaagtttagccaatatcgcgaaatcagttgcccatggttgatgatcatactcaccatttcttccctctccacctccattcccaccccaattttcatcttctgttggtaaaggttggaaggttgatgatggagagtcagcaaatgatggaggaacaagccatgtattggctcgaaatccataaggaatattaccaaactgaaatcgaaaacaaaagcatgaataccataactgctcaaaacatgaattagacaagtgaaagaaactcatttttgtgtcaaattgtcaccttgttatgttcaacaaaagctttcatcaaggactcataagactgcaatatgagcattcataccccattagttagtaaagaaaaagaaaacagttttgtatgatatgaatcatatgatgatatgtttgcatcaaagtacacacattgagaaaagcttggctaagttgttggagaagatcaaccaaagaatggctttgtaggaattgctttcccactgcataaaaacctttgactgatgccaccacttgtatctgcttcccattgcatatcttaatctgaaaattccataacaaaagtcagttcttgtaaaagtctaagcaaaacagaaacataataacgggacacatcggagtgaaagcaaaatcaatgtttattttgttattcataaaaaattatataatcaatgtaccgtttcgaaatcgaggagaatctatattatatttatttaagatattttgtaattttttttgagcatgttaaattttttataattttttaaaattttataaaatattttaaataaccacaacatgtacttaactataaaaaaaattaagtcaaaaaaagttctttcaatgaaacaaaataggggtgcatatgcacacttttaaacatgttttttttttacctaaaaatgaattatgatataatcaactcaagtagtttggatttggaaatagatcccaaattggctattgaaaaaactacaatgatattattagcatgcaaaattgtaaaataagtatttttgtagtcaatttttgtttatatagccaaattaaaataacaatctaactatcctaaattataaaattttattaataaccaaattatgtaaacttatctaaatacattatataaccaaattttttatatatgtaaaaaaatctattaaagatcacctgaatctgaaaataatcaccatcgcgcctttcttccatacattcacatcttctcaaatctacacagaaatttatttattaattagttaatttttaagacattttttaattaaacaataaataaagaaaattataactcactcagtacgggaggagagaggtgagagaaagagaagaaatcataaaattcggaaagcttcggcgttgggtgtatggctgccatcccaaacctctctgaaatcgccggaaccgacggctccgccggcggcgatcttggtgggccagagctcttattgctgttgggcctgttgagacttttccttgacttcgaatctgggcttgatggtgacctcttgggcttagtaaaccttgtcgtacaagccacaaggtccaataaacgtcggatatgggccacagcttgggcttcttccgtatagtcctctgttttaatattaaaaaacagtggcataattgtaattcataaagtttagttgaaaaaggctaaaagattctactaatagctcaataatttccaagctcgaaaaatctttgctacttttgtttgccacactcatgggagacaagaattattattattgttgttgttattacttgtactatagttaaattcttttatgtatattccaaaagagttgttttggtaaccctgttttcaaaagaattttagttttgttttaaaatgatttttgtaaattttaaatttttgctcttgaataatttacaatgaaaataaaatttcaatattttattttatatttcatttttttttgttaacaaataagtggttgaatcaaaattatatattaaattttttataatcttaaataattaaataataacattgtatatgattatatgtaataatttattaagatagatgagttaaaatagttcaatttttaaattatagagaaacacttataacattaagcttccaataagtgaggtaaagcttaattgttttacacttttagctcaatgaatagtacttaactaaatgtagagataactattcattgagctattcatgttttaatattattttcttaacttttttatatatgtgtaatattatatgaattatttacataaaatgaataaaatatattgaaaatataatatttaaatgacataaagaaaaaataaataagttgatgtatggtataatgtaaaaatttgaggtaaaatagataaagtaaaatttaagtggtgtattttaaataatagagtagataaattattgtgagtgctcttataggttagagaaaagaaaaaaaatttaaaaagttataaagatacatcgatggaaatatttttatttacactttgaatttttttatttataaa

SEQ ID NO: 187867 - DNA, 2505 bp, Cannabis indica
ataaatatttatatccgtttatctaaaataaaattgcaacaaactcaaaaccgatacgtggccaatagtgtggttgagtactaaattgattaaaatttaaatataaattgatcccataattggtatcctgtatgagtgcctcgtgttctctattttattttattttccacatgaaattagacacaaacaaacaagacaactttaaatgccattcaaaatatattacacgttattgtttcccaaattttctgaactttgtacatcattggaactataccaattttgtcatctaagcctctcccaaatatgcagcttggccaattgtcagcagtagaaaatagaggagtactaatttaagcaccaaaactagtgtcattgattagctgcagaccttcattgacctagtcattgtaaggtctattttcttttcactaccaaaatctgtcaataacggtttgtatctgcattctaagactttaaacagctaaaaattctggccagaaatccattggattctacagtttctggtgactctattggttctttgaacttcgctttctcactcaactcttcaaatgcgacgacaagattctgaagtcttgcaacaaattcaatcaaaagtgatgtgaatgttgctaaagataatgcacttgcattttcataagtttttgattcttcatgtgtagactctccattagcattgacagcgagcccagcatgccatgatgtattcttaaataagttatcagggggagtacctgaaggtgtgtacgtcgtggcacttggtaaagacttcctgccatcatggttgaatccagcagtgcctgtcgaaacatcgttgtcccaaccttttgcttcaggaacaaatttgagatcgagtacagcttcactcaaagacttgtattcgtgatactttgtttcttcatcatccacgttcaaggactcttggggtgcactgatttcatttgttctgctgccgatttcccaactttcagaattgacaagaaggtaggactttttatcaactttcttttgcaactcttcagcagcttcatgaacttctagaagtatgtctaattctcctaatttctccatctttttaactttgtttccaagttcacgtaacacttgagcacctgctgattttacccttctaagttcattgaagaaaattaatcgcctctcaggtggagcctaaatacataacatcaaattctcttagtaaataatcaccattaagacatatatagcaagttatttgaagaaactcctattttaatgtatcagacacaaataacatgacaagtacatacgagcataaattatctactcctgaagtaagcttaagttaaaatgctttctcaagtgggatcagattatagttgtccattcaacacaagcaattctgaaaggctattgtactacattggaaacagtcatagttccttgagtttatatagtacctgtatttctgagagtatgcatccgtgcaatgccatgacagtaaatgcacaatgccgtaatgcgccacttacttttacgtagttcttccatgggtatttaaacattttataacgaccatgaggtggttcccagatagcaaatcccaactacaaacacaccaatgagttaaaaatacaaaccaacggcaacccagaaaaatgttatgaatcatagtaaaaaattccaaaataccagagcatcttcttgacttgtagactctacagctgctctgtacccattatagagtggatcgtccgaagacgcttggtaggtgagaatttttgaagggaccctttcatattcaacgcagtttaggtaattgtccacacaacctaaatgaaacatcatgacatcagagaagaataatgggccaaacacaagtatttggcaaagtgagagtcacaagcatgtgtttaatcaccttccaaagcggttgcaactcctatgaaattcttagctaccaaattatgaagatcctcaccagcccagatgggatatatgactatatttacacccaaaccaactccagcgccaagtgcaatgagaaggaatcttgtcacagctgtttgaatgaattccccagtcctataccccgataccataatgaaacaatatgtcaagatgaagactctgaaaccatattcgtaagccttcaatgttgggtacaatttggcataagttgctaaagatcctagcaaccacagagtgagcaacaagaaaaattctaaatgtaagtaacatgaggacaaaaacaaaaggtacaataacgagtaatatgctacaaacaatcacattttgaatataaatactacctacgataaagatactagcaattattatagcttcttccgattctccagcacatttcgagagctctgccatgcccaaagcaagccctccagcagataatgtacccaaaccacggttaaatcctttgctaagagttgctcctgtagaaaaacattctccccaaatgagcaaaaacagaaaaaaaaaagaaaa

SEQ ID NO: 187868 - DNA, 3903 bp, Cannabis indica
ttttttttaaaaaaatagttttcaagaaaacaaagttacaaaaaacaagaattttgaatttctgttttaaaaaccaattcacttttggccaatactgtttttaaaaatcactaaccaaacataacttgtgttttaaaaacttcaaaaactattttttaaactcatttctaaaaacaattttttaaaacaaaaaaacagaaaacaatatcaaacatgctctttgagaaagaagggttgtgatggtgctgatctcttggtgccgaggagaaagggggggcctatggtggtgttgggggtttggggcaaagaacagcaacggtttggctcaaggagagaacgactcgtcatttcgtggtggccaacgggtttggtgcataggggtgcatgtacaagaaaagaaagagagaaaaaattagaaaattagggattgaaaatatgtgataggtaattgggcaaagaaaaacatatttttgaaatagtaaaaaaattcatgaatttttattttttgaattatgaagtctattaagcatagaaactcaaattttctatgatgtgttattgtgaaggtaatcacagtcaatgagatttttgtgcttgttatgttgttctttgcttcttccaaataaaataaatatatttagaaatcagttgttttcaagcagacatctgtgaaatatgaaagtactagcctacagctaactgatcttaaaataatgactatagtgagatattggccaattttgtgactggaaaacccagaaaggtcaacatccaaaaaaatgtaacacttgcagtattatatactgttgtttctccaaaaggtatatctgaaacaaaatgggattatcttcttcttttgctgtgtattaatggcagcttgctcctctgtaaccgctactaagccccaacctcaatcaaaaaaacataaatacttaaaatattctgaagtgcactatattgatcttggcaaggaatacattgcactcatgactttgaagtagaaaccccaagactcattactttcactaataggcatttgaccaaatgggttttgctccacaaacttctgaacatcttcagctgcagacaatttttccagatagaccctaatatcacctccagcacctgccatgtcacatttttcaaaaagtcatatattatttatcttccactcattaatcagctgttcgtttagtagacctatctaaacatatagttgtagattttgcctctaccaagaaggtcccgctgtcaccgaaaaaatgattataagggacataggcttgacattgaaattcaactagtcactcaaacatgatacatactggtacaacattgaaaaatgatttaaagttgtagggtacttcaaaattttcataaattttacactggcagataacgagttacctaatgaattgtcgctccaattctgaaaattgtatgaatgagggaagactgcagtgtatgcctatcacagtggcagatattataaaattacaagtacatattaggaagaacaaaaacaaagatgtcagcaagaatttgttacaaaatgtgaaaatgaaaggttagctattagtgaaaaggacttacaggattaagcaatgctttgtaaggtgaatcatccaacaacaatgtattagtttcattatattcccccttctcccatggaagatcagggtcatgtttttcccaaattctcctcagttccttaaaaaccaaggtcttgtgtctgttttcaagagttctgaactcagttgcagtgcaacgagatagatcctgaaacagagcagcatgtattgtaacatgcaagataagcagataattataacatatgtgaaacaaaaggcatcgtagaaaaagcatatgcaggcagaaatctagggaaaaattgaagttacttacccaacaaaacagcaacttgtgtttcatatctcccattagataatcgatcacctttgaagcgattttgcttcagcaagttagtaagaaattgaagtcagtaattgtagccgaacgtattttttaataattaatgcatgctaatataccaaactaaaataggacatagaataaaggttgaacagtactcagatcttgaggaccatacaccgacttcaaatcgctcaaaacagaaatttaggaaatcacggcaagatggcctactgaaaactgaaattaagaaatgatggcacaattaaaagtaagattataatcaataaaatacagaaaaaaaaaggacagcaataaatcagtttcctcacttgcccgtcttttaatgtttgtgtctgctttgtactccttcggaggaggagtaactatatcagccagcaatccatttatatctagaactagaagcttcttttttgaacgtgtaaaaggcattcttggaaatgaagtatgaaaaaaccctgcggtggcattttctccatttatagtattaacaatgcctgaagtattaactgcagccttggtgtttatctcacgaaacagacttaacgtcgtaagtatagtactcaaatggtcatccctgctcgggcaatctacctcggacagctcttgaactaaagtagtgttttgaaccacactacttggctttgtcttcctacgtctacgccttcttttctttctctttactaaagtcaattgttcaggattcttagttttgtcaatatccatctcaaaggacctaacgacagaaggctgcagcgttcggttggcctcaatcattacttttacttcaccattggacattggcaaagaagttgtgttcttaaaagacctcacattctccgttgacttttctatggaatccaccataactggattgatatgcataaatgttgacgcacccttgatcatattctcctgcctgttaaggccctgcaattgtggaaaacaaatactataactatgccactagagatatctattatggttaatagtcagtaatgaccataaacaaaatgagaaaaactccattcatatgtttacatttaggagacaaatttcggtgaacctcccacaaaattaataatcaaagtgagtcactaaattttgttccactgtaataattatgattatgaattagtaaacatattcatgtcctgtacctatatagctctcttttagaggaccaaaaaaaaaccgtagattttaatgaaaaaagctaataatacaataaaagcagaaaaacattagacaaaaaggattaagattcaaatttcaacaagtactttgcatgtgtttcattccagtaatctaatagcgaatagtacattggccaatgataataaaaactgtcataatcctgttcaagaatcaagcaatgaaacccagaaacacaaaacacaaatgttccaaacattggactaagctaattgagctaccaacgttatcggttcctatcttaactaaagcacaccattaatatccaaaactcaaatctgcattacttttctcccaagaaaatttagcgaacccgaaatatgaggaaagattggaagaccagaatagaatctcataaaagacaaaatagatgaaataaagagatacaagaaaacatatacacatacatatattgtcaacgtgaattgagatggaatcgaagaagacaatgcagaaagatagttattgaaagagggaaaaatagagatttgaaaaggcttgacctttgagattgggttgtcttgtcgaaacgatggttgggcttctggaagatgatgagagagcgtacgattgaggtcctttatcggaagctcaggcgtcaggctcaggattctcaaacaccagacccttttttggaggctccaaagatttttctcacctgtttggaagtaccttcatttttggactaaacggtgccgttttcgttgattggacattacaatttacaaaacgctt

SEQ ID NO: 187869 - DNA, 3716 bp, Cannabis indica
aaatccaatatcattgattcttgaccatgttatatcatattatcatacacataatatatataatcatcaacataatttcacacaacaataaattttagaaaaacgagaatggtgactataatatgagaattgactaaaaaaaatactatgggagcttatactttttttttttttttgtattatcctgctattggtgtaattaaatattgagtatatataaattaagaaaataactattaggaaatatcgctattcaattatgaaacaccacctataaaaagtgctgggcactactaatgcctaatagcaatactcctataatatatttatgggtgattctacaaatgaatccctagggatgtatgatgcaccatctactttcttcggtattcagaagaattttttaatctaattctctttcatattcatgtacgttataactatttaagatattatacaaaattttgagaaattcggaataacttacaatatggaaaacaatgttcaaactatctatattacacgcgtataaaacaatatagttacgcgtgcaacacattatttgaacgcagttttcaacgtattaaactttttcgaatttcttaaaattttacagaatattttaataaacaattataatttacataaccatgagaaacaaatttgaataaaaatttatttatgatactaaaacatataaaaatgtatcaatgcatcccttaaggtacattgtagaattttcttatatttatatctacgagaattaataacaataatagaaaacgcggaagttatatccacacgcatattgacctacaaacgattagaccaacaaacgattagagctatatatatgactacttattactccggaacctagtttgctataattcaaaagcttcataagtatatatacataaattaagagggttctcatgattatcaatagatgaagatataatggtgtttgatcatattcagtactggggccctcctatctataacaacggtccgtggcatcacgtttatagtattttcagcttgagacacataatgatggtataatctcacccacgataaagggtaaaaaggaaaagagaaattatggcagaccattagtaatggaacccaccaaacaaattaactgtagtagtaatagctaggtgatgaagcgaagagagagtagtgttgtatatttgggttgttattattagttgcatgtaccaacttattatatctagagagatataatagagaattattttggccgaaaagcttgacttttgctggcaaaagcatgttcgatcactacatttctttgagtgcagtgcactctgtcctactctccagttcatctcatgtgttggtggacaacaacattttcacgcccaccacgctacacaattatatatatatataaacatatacaaatattatgtttttttttattatttttaattattttttaaacggaaaataataagggatttataattaatgttattatagataatcatattttaattatccgagaaattatattgaagacagaagtcagacatgaaaacaaatgatgaatttcatacacatacatacacacggctaggtgtgctctattatttgcttatatatataactgtgtcaaaacaaacatgcatttggaagattaatattactggatatatataaccgaaatggggaaaattttaaagaatcttagaaaaacatcttcaagattcaatttttcaaaatgaaaattatttcggaacaagcaagccttattgatcgaacatacttacaagaattcaggcttcagatccaatgatgatcagcttctcgaagtaattactgaccaaacgatctcgatagagatatagagctagttaggttattataagtcagagagagagagagagagagagttggttttaaataaaaaggaaatggatggacgtatatagctagtaggaaaggagcgttggtttgtcgttgttttgttgttgtattgttgtctaagacttaatagaagaatgtttcgtatttatatatatatacaaatcaaggtgagagagagagagagctttacttagtgattgcgcgtggggtggcagattgggttcaaaggtttgtttggacggcgtgacaacaagttttcacgccacccctctctctctctctccactgctattatatctatctacattattttgtgtccaaattaagatttttctacttccatttcaaccaaaaatgcattacataataacattttattttttattattcttgttgttttataaatatatagatgtacataaaatgagtcgttttcttaacataaaaaacaaaaaataaaaaacttattatcagatatataataaagtgtttatataacttattatatatatatatatatataaatttatttgtgtgtgtcttactagctaataataaaaatatgacattataaatttaatttctctcaatagctcttcccacaatccagctcctcttgtctggttggtgcgccgccctttcccatttggatcctataaggttctgacacgtgcatgccacatcagacagactcaagctgtctttgtctaatagctaatcattggtgcacctctcctatatatgttttccttaaaaattaaatgcagatgactcccaccagataatatttacttgttatttatttctttatttaattcatcaccttcttaattaatttatagtgtcgtttagtttataagtagcttccatctctttctatggttacgcaatgtttagtgcgttcagcaatttgcagagtgtctctgatcagagtagtgttatgtaaatatctatatatatatatatatattaataaaacatcatgatttatatacaagtatagtacatattttttaaaaggttattattatttatattctctttttgtgtatatatagactaatatgataaggatattattaagaaaagactcaaaaagatcaagacgtgttggggaaggctaggctttcattcatattaattctagctttggtatagtatatatattattcaatggttagaaagttatgtctattttaatttatgtatacaaccttacgtcttaattataatatatactatgttcgtcattattattcgttctatagttttttttaatttaactatttgtaacccttgcgtgcatttagttttaaattatttcaaaaatataggacccaaacatacataaataagaaagtagtattatgatcgagcttgtaggaacaattttttcgaataatactactacgtacgtactatatatagtgtaaatatatatacgcacatacgtacatagccaatgcatgtactgtttcaatactaaattttacggtattcattcttacaatatactaacaaattctttattaagctctcatccgaatattgtatcaatggacaatgagaatatatatatatatatatatttaatttttatgcaatatgcatattgaattggaaatgggattaggaactcatcatcaaatttgtattcgttttttttttttaaagtaaaacgggattaaattaatctatcatttgatataaaagcataattattgtttaagtatatctaaagtttcgagtttgtaagcttcgtaaatttaatatttttttagcaatataacactataaaaaaaaatcatctttagtgataa

SEQ ID NO: 187870 - DNA, 8774 bp, Cannabis indica
tttttttttttttttccaattccagctgtgaatgtatcaagtatgaaatataactcatttctcaaaaacgtttccaattaggtgattgtttttatcaattaacttcttttgtgtttgacagccaaactcgggggaaactgcctttggggaaagatacaattggagtcactttatttctcatgggagaattctccaaattttagtctggggcagagggctgaaatgatttcaactatcgatatgcactcttgcctcatgaaggtatgctgtcatctgatgcctagacttaacttctttgttatcacaaaaggtgtacaacttattaattttaatggccattccatccctccaacaaacaaaacaagaaaaagaaaacaggatttgtttatggtaattttctttttctttcgtgtatagtatctcttattggtacatttcttcttttttcctacagctgagctcttcaaatgaggaaaaaagcatctccattgaagttccatatgattcagaaactgtggtttgttcaactctcagtttcttatttgactttatatattacaactcgctcttcttgcttacactcttcttacatttgactgttattgattatgttctcttgccctttttttttttggcctctcaaagagtacttctcagcaagttcaagttactgtttcagcagaggaaatgtgtgctaaagaaaaatctccgtacaattcttacatgtctaatgacatcccttcttcgtctttgtctcatattattcggtaaagttttctatcttctcatttatatatattttatgtgcatttacaactttcagatactgatttcatttcttctagaatacattggtagtgctatttcgtttttaaattcacttctatattcttccctctccatattcactagtacattgttatgtaatcactagtaaattaaaccaaataacataagtaggaaactcatccgattttctttttcacattactttgggacatagttattaatttttattaaggtgacacaactgatatggatatttaagaaatgattggacgaataaccagttcaagtgaacttataaaacttaaacctttctttttcttttttttcattaaaagaaaaggcagatggttagagttaaacctattacatttaaatataattcttaaatggaaacaaaatatcaaacctaagatgtttagacggccactgaattaataagatagttttaatatgattggtagtgcaatactaacttactgagtcttcctttctagatttctaaaacaagaaaagatcaacagatcaacaaaagcatataattgtgataagacaatattgtatttatagagttagggataggatttagcaacacaacttttgttggactgggcctcctcatcaaatgtttcagttaactaaaaaaacccacttttgcttcaactagactttagaaatgctaagctcattaattattgatcactaactatatagttaaaatgatgaacaactattcatcaactcatattttaataaaacatttaaaacgttaatgtaagtctaaataaaagtctaataagttctagatagggactcaaatttaatatcttacaaactaaataagaaaatgaagaagactagactttgttcaaccacaactatgcccttacccaagaggggtagttcagatggtcaggcatgtggtgtgctcccacccacaaggtttgaggttcgaattccttctggatacttacataacaattgctcagtttcttggtccccaaatattgtaggggttaggcagtctcaaaaaagaaaatcataaatatgcccttgtccaagggaatcatgctcaagccttgtgctaagcaattatgaattgcaccctctttctcccaccctgattatagtaagagtttcctacagctagtgtaggtttcctttgaatttgtctgtagcctttatataattatagaacttataatactacagctagtttagggttttattgaatctattcagtttcagacctcggtgcattaggtcatattttctatttttaaaaaaatacacgtaaatgcattggtgtttgtttttagcttatgccatttctattttcaagttgttagggtttttatatgacagaaataaagattcagcatgaaaaaaaatgtcactgttttgtacatttctgttatgaaattgataatctgtttccttggtatgaaatattaatgtaatttgatcatgcatgtgtataaatagtgtcaaatcctttatggtttctactaaattaaaaacgtcactagttccatcaggttgagagcaggaaatgtcatcttcaactatagatattacaacaataagttgcaaaggacagaaggtattacatgctttaatattttgggtattgcgtacccttgatttgtctgttactgtacgatactatctcatcaattactatgcttatttatatatttcaccatttcataattgcagaggggttagttttgataatagagctttttataacaaaaatatactcctagtgctaggatttctctgatattttcgtattctctcacaattcgcaatatactgtgtttaaagtgatagtcactcttatatattactgttttatcttttatggtacaaatgccaagcatggacagttattttcatttgtaattgtgttgatttgagggagaggaataggatgagggtgaaggtaagggtgaggaagggagggagggagcaagcgggaagctaagtattttagcatcagtgattatatttttgttccccaagcattatacttttacacgattttcagtcttccttatctttatttatttatttaaatgacttttacttatcatcccttactctcttatttgagcttttatgtgatgttttttcatcaattcttcattctgcagtgacagaagacttttcttgtccattttgcttggtgaagtgtgcaagctttaaggttgaaaatttccttaattcaatgtttagaaattctcattcttttaatctattgtgaactgctgttatataaatttgcagatcagtgagtttccattttattgatgtatagtttttttaatagggcctgagatatcacctgacctcatcacatgacctcttcaattttgagttttgggttggtaatcatcgatattcttgttggcaataccatcgtttagacatggtgaagttgtgtgtttgtctttctaacttttgagctaactgatattttgtaggtcactgaagagtaccaagctgtgaatgtgtctgtgaaagttgataatgggcgatctgaggtctgataatcttcaaaatagatctggttgtttctttaattcactctaaagctatcaactataactgataatacgggtttaaaaaaaaaattaaaaaaactataactgataatgggcaatctgaaatctgataatcttcaatggttgtttctctgaattactctaatataatcaactccaactggcattggttttcatgttgattgtgttcatgaatgtgtttgctgcacgggacacttagccaaagatctctgtattgtacaatgttgattagggggttaaattatctgccaattttagagatgaattacatttatcaaactttgaattatgtagtttatacctacaccgtttgtaaactagaaacgcagactggattgagtcaaatgttctttcaactcagggtccgtaaatgcttgatgatttttgtagtgcttttacagttatgtttgaatcatgagaaatttggagtggttgtgcatgtagttaagaatctgtttctttgcatgaaaaaacaccagaagggtgggaaatatgtggatagaacatcctttttatgattaaattgatatgcattttaattatttcttttgtatattacaactcttagctacaaacctttttacttgttggattagaaaaattctgtctttattggctgctaatacattggcattttgaataaaaaatgatactattacatcttttagtcatatgatcgtatccttacaaattcaagatgttattactcctggaatctttttagtaactattatgggttcgttactcattaaatttcatttttcttttactatctttagattgttgcagatagtgttgaccctaagcttgaagtattctcctattagtaagtcttactattgtttctgttttaatctatgctatttggaatgataatattgttgctttagactaaaataaaagctcatttatatccagttcaaagccacttaaacgcaagagaccgaagaacttaattcctgatgcaaagcatgtgcatccatatgtcttagagccggatttgcgtgcaggagcctatgagcgtctggacaaggcagatggtaattttcctttcgtttcactttggtaattttctgttttttatttatatgtaatcattttggggattctgattactttttcagaatatagatgttatgtagtctgtagactgtaataactcgtacaaacttgaaggaggtaaacgccttgcaagaaatatgcaaatacatactctagattttaagtaggcaaacaagattgagtacttattcaaaaaagagagtggaatagtctaaacgctgacaagaaacaagagtaaaacggataaagctctgcaaacatgaacaagaaacaacataactccttgttttattcttaaaaagaaattgaaaacaatttttgaaagtgagatctccctagttaaaattgaagttggtaaattgtaaaccccctatgtaaatgtaggtaaatattttgctggaaaaaacgacccaacttaagggggttttcttgtaatctgcctatcaaagaattgttgcatattttctctttacttggtcctggggattgacagggatggcatatttgaaaatacttttgtccgaagaaattcaaaattataaatgtaggactaggggatgcatggatgggtagtcagatatatttattgatataaattctgtggtagggcatcacttttgtttctattggtatttggtagggacgtttttgttttcagtatgtggagaaattataattattattttttttttttatatatgaatatgtacattatagctataccacacatcttacatgttttttaaaaaaattagaatagtttgtgatgccaagaatagagttcaaaatagttagttgcatgtaaaaaaataaattaaaaaactagtatgcatcaaatgactgtttgaattttatttttgatactgtaaattattcaaatttttctaaaattgatgggatgcatgttataattataatacacatcgtcatatttttatatttggatacctaaaacaaaaacgtctcttccgatagagacaaaaatggtgtccttactatagtcttgtcctaatatatacatatataaagtaaaacttatgaaaacacctcaaacaaatttcttgtgattctcttgttgaaggaacttggaatgcgtggatcggtttgtttactggtcaaatggaatttgcatgtaacatctataatagattgcgcattgtaggtgattgagctgatacctacaaattttgtcacgctcccggaatccttttcccagggactagtacattgcattgcactatatgtctgcatgcgctggtcctgtaaagaatcctttagtccttttcttgctccaccttttaggtgaatttatatacttttttcttttgttatgttctgtcattagaaaatttcaaaactaaaacttttgtctcaattgctcgctcctgtaaaggttagatggcttgtaacataagtgtggatttcatttatatttctggccttggtgcttcagcgtgtgtacagtgtgttacatctagctcttctgttgcaggagcttcagctgtcttaccgataccacaatctgaccctccttgcgcccagttaacctctggaaatattcttgcacctcctgctatgttgcaatttgcaaggactagaaagttatctgttgaacggacagacccaaggaagtatgtctttccttgccttcctctgtttcatgcttttatttaactttttgcggattagtttaaaatttgtattaaacatttccagtagatattagctcattaaagtaaggtagcgtactctcaagatctcctccactagtctacctagtcaatcagagcaaatcttaggccaggacattgttgtgtttggatccattgcttttgcttgtgtatgttgcttcttttgtgttttgattacatgcaaacatagtgtggtgatcaacaaaggacatgtatataatgacacttatattctagaattccttgcgtttgagattcttgtggtttggctgtaggatctagtatcaaaaggatctaggataagtaactagaggatggggctaagtgtagaaaacataatgagtcgtactgattatctgcaatgttggttcagttaatgatttcgattgttttactggatcatccgctgtttgtattactgtgcagttgatcacaaccactgactttttcatgttctttttttttttctctccctttctatttagttatttatttattgtttaataagatacatttatttggattcgaagtaggcactatagggccatctaattatgtattgtttcaacttggtattgtaattgttgcagagtgataaatttgaattttcttttgacctagatttcattttaatttttagttgtgccctcttgcggaagcgccagttctttcactcgcacagagcccaggtgacaagtgactcatattatctaatgtttcgtcccctttcaaatttacttttttcttttccttcttttatttgaagattgtctctgtgaactaattaagcctgccatttctgaatgatctacttgagtttcccaatttattgccacagttgtagctgattagataaataataaaaaataattgatgtgttggtaagagtttagaagtccattgtttttcactgtattatttctcttttttactaatacaagtagtgctgttttgttttgttttttttaaaaaaaaggttcattgtttttcaatgttagggttgttgtgcttgtgtttgtttttattagtctgtcgtcatttcatggtctagggcctaggcttgtttatgcatctctccttgctaaactcaccttctcgctgcactacaatatactcccaagtttgaactgaaaccaagtgactgtagagtcactaaactcaccttctcccaagagctaataaagctcagtaaagtcactaaattccagtaaattagaccctccctcgaaacaagagtccccatatcagcaaaaacttagcccaactgaatggcaatgttgtacatcacccagaaagcccctaggacacttgagcatcccctgagcatgctaatacaatttcgcatgctaaactcttttccttttgtcttaaataagtgaatgggaactttatcatatttattttcagaatcttcactgtattattttgaaattctttacgaaattgggagtgttgttttcacaagcaatcttattgaaagtttagaatgttggttaattatatttgctacagtaacaatttttatgcttttgcttcatgaaccttttacttgtctaaacaacattactatcattatttttctataatttgtaatccatgttttgatgttatttgctaagatagatttgactcatgcgagcaataataacaggtttagcttttgcatgaactattttagttcatatttctatttttcacgtgcatcaaagatttcatttattacctttgatcaatttacatgcaactaactgtccatctgaaatctgcctctcttatcacctcttgcttgaagccgatgtcgatcgaacaagtcttatcagatagggacagtgaggatgaagttgatgatggtgttgcagatttggaagatcgaagggtatgtataattgtggctgctctccctctcttttaatatgtcaaattttcttcatacaaagctttggtagacttttcatcacaatctaaccactattgtcacttccatcgccactacaatacaagcacagcctacatcatctatctccaccacattgttttttatctgactgctgcaaattcaaaccacaactactgcaacctccatcattattactgcaacaactatcatcactaccctgctatttgattgaatgccatctttttgcatgccagatttagccaggaaagggaccaacttagctttcttagtggtgattctgtagaaccagttctaaagcatgtatatcccttagattcattacaataattttagttgtttttcgtttgcttttttttcctctttttctgttttagtcctattttagtgtggcttgggtctcatttagacaaaatcatttaaattgtcatattggccatttttctagtttgattaaatgttaacagtcatcttttggaaagtgcgagtttgttgagaaagctcatcaactctaatagagaatttttttttaagagtaaaaataatatttagcagaaaaattgaaaaaagaaaaacaaaaagttaaggaagttcatcagactgtcattgatacactatgattttgtagatgcttgatgattttgttgacgtgaccaaagatgagaagcaaatgatgcatatgtggaattcgttcgtacggaagcaacggtactattctatcgactttgc

SEQ ID NO: 187871 - DNA, 943 bp, Cannabis indica
catcccatctccactgtttgtaatgtttttaatcgaagcatattctatttttggattaactatttacttcctgttataatcagcctatgttgctagactatctcgatataactctaaacgtatcatttttggttgtaatgctccaacatttatgttagatatcttgtacgtacactgagtgctaaatttaataaagtagttattttattaaaaaaaaaaaagaagaagaagaagaaagaataatgctcagtttcataggttgtgagattattagtcatgttatatctatctaccaatattaggcgatcaactcttaagattacttgattacttgactcttggtgatgaaaaaaaaagttaacaaaaaaagagaaataagtaataaattccaatatatactcaaataaataaataaatattttctattaattttttttcattcatgaattcctttataaatgacttggaagtttcttattttttttttcttttaaacaaattaatatggaagtttaatattgatcattaataagttcacaaattcaccattttttctagggtttattatttgaggactaccataaaaccagtcttttattgttccttctatttagactttgatgttgctgaaaaagaaaatatctagttgattagtcttactcctaagtttgattttgtttatattaaaaattatatataaatattcctattaattcatccaaagattaattaaagacgacatataccaacatagcattttattatgcttttaattaatttccttgccaaacaaaagatacacacctacttatttcttccgatattttcatgcaagtggggtatatagatatcatataaataagttattagaaatatagttaaatatctatgaacatataaaccctataagaaattcctcaactatatactatagatatatata

SEQ ID NO: 187872 - DNA, 1598 bp, Cannabis indica
ccgccccgcccccgctttaattttattaaagagtttgttaaagggtaaatagtggtataagtacccaaagttttgagtttgtacgtggcataaactcaatgcttttttttagtggcataagtacccaatgtttgtaaaattgtaattttcttccagtttcatttgtacagactctgttattgtcttaaacaggacacatataagacccaaattttagattatttggtctggacgaaaaatatgtagtatcagttacttccaaatctttttttaataaatttaaaacggagcctgtattgacaaaaatagagaaaaattacagttttacaaacattggctacttatgccactaaaaaaattattgggtttatgccacttacaaacccaaaactttcggtacttatgccgctatttaccctttgttaaataagtagttatggttgttagttaagtttgttaaaaagttagttactctttattttctttctttagtaaagtcggtctgttatttttgtgtataaatactgtgtctctagctttgtatcagttcggttgagaaataacaaatttcgattcacttcttttctttctataattctttctgcaactattctcaaataatttaaacgggtattggagcgggtatgggggtgggggagcaatccccgcactcgccctgccccatgtacatacatccttaggtcagaatttagttttgtatgaccagttttctttttctgttttagtttgttcaataaagttaattttgattttaagtcaatataatgataacaattttaataatagagatgaccatagataaaatttagcatttacatcatatagttatgttacaatatttatttaaatttttatatttatcaaatattaattactaatatagtttttcattattttgtagatgttttattagtggggcgaaaaaacataagttagagatacttcatcaactttttaagcaaaagtttttgtgttgttggtaggattaagatgggttcgggatattagaccttgagtcagagctttagtatttgtttttggtgttagttctcaattatatcttaatgagttatgtgttttttgttttttcaaatactaaagttttataatctagtttttttaaggaatttctttttagttttatgtaagtcgtaacttcaacattgcggatggaagagattccacttactatttataatgatcatttcttgtaatggtgacacttaataaattttagtgacgttgacaaaaaaattgataagagttatctttgggtatacaagtaaaactgcctaatttgttcaataagataaattaaataaaactgcctaatttgttctataaaataaattaaataaaactgcctaattggtatgcaacagatttttttatatatttttaatataaaaattaaaaaggctatcttttatggttttgtatggtagagaatcccttcaaataaataaacttttattctatttgtagaaaagttatgatatgtgcactacctaaaaatgcaatgcatgtatgaaatatgaatggttattatattttagtgagagaaacaaaaaaaaaaa

SEQ ID NO: 187873 - DNA, 1619 bp, Cannabis indica
taagtaaataataaataaaaagtaaaaaaaatttaagtattgaaagtataaatagtaaaaaaaatttgtgaaagtataaatataaaattaggaaaaaaattagtatttaatgtaaatttatgtaattttggaaaagcgcccttttgctgaaatatcttttcaaccctcgaaagtctaaattttcatatcgctcacaccaagcacagcaggcatcgaaagtcttccagttgccatggcaatgaatgccttcttgttctctctcaaacccacgctcaaagctttaccttctctctctcctccaactactcgttcccaactgactcctcctcctccagttcagccacgaaaccctacttatggcttccttcagaatccaaaagccatggtgggtctactcggagtcggggcgggcttgacccttacccttatggggcccgcttcagctaccgagttgggttcttttcaactcagtgagccctccaacgccctttctcttcccacttgggccgttcatgtttccagtgttgttgaatggtgagtatttctcgaattatcttcttctttttctctaatgggtttccaacaattcttttgaatttttggtttaaggattacagcaatggctttggtatggcaatatggagaaatttctgggaatgaatcttggaaaggcctttcttggggtatggtgggttattcttctaattcttttaaaaagcttggaaatttcgattagatttggatttttgattatctttgctcacatttatataaagaatgaagttttatctatagctttcccagttaatttcactaatttaaaccactgatatgtttaggtacccctgcttgggggagcattttgtgcgtgtacatggcatttcttttataactctgagtctcttgaggtaagaagattgaatgatcttttccttattcacaactagtttttgtgtgtgctttgatatgcatttacttatctatagtctgcacatgaaaacgccttacatccttagaactatatatattgtgatgatatgataccatgcaaatgattaaaaatggtgacttggctttggtttttggtacctaactatcaatcatgtgtttttatcaaattattgtaaaagttggattgaagatggaatgagtaattattgtccttgaaatgacctttggtgttatgttgctgtaggtactggttgctctccaagcagccttgacagttttaggcaatgccacaatgtgtttagctgcatttcggatatacaaatcatcagaagagcgttccaaggaactatgaagtccatctatatggtttcccaaaacacatgatgaattgcttcattttaaatgaattggtacgtaattaactccattgattttgattgagagaaaagaagaagcttctcaaactggttaactggactgtaatgattttgtgttcttgcaggaaaaatgagacaacatgaagcttcctatttttttttcttaactttgtgaattagctgatggctgcaagtggaatgattcaagtagtctttcagttatatatatatataaatgtatgtatgtatgtatacctgtactttcggagaattccaaattcatttagctgt

SEQ ID NO: 187874 - DNA, 3153 bp, Cannabis indica
ctaatttttattaaaattgatgaactagatactaaatatatgtattttttatagttttaattagtttattatgtatctttctaataatagttacaaataattatataaaaaataattataagtttttttttgactttggaggagagagtgattccaacttggacctcctctatgtgaagagaagtgtggaactactagattatacctatgaccacaaaaaactaattataattattataatttgaatactattattattttaattgataaataaatatttatcatggttattattatcaaattattgggtttttaatgtgtcatatttttgagctaatttattcatatttatatattgtgtttttgagtttctcgtattgtatcatgtcaaagtctatattttttgtgtcggtgcttaaatttatatttttttcatgttgtgcttaaacacatatttttcataccaatttcatgttacgtgtcaaaaaaacctcttaaaaaacgtaggccctatatacagcactagtacaaattagaaatacaaagtttttcttattgattctgttgtttatttttcttttcttatatatatatatatatataaatatatatatatataatgatcatatgggacggtgcaataagaagatgattgattggtgtgacggtatagctaatgaagtcatcaacattggatctgtatatgatatagtggacatgcatctctcatgtaccctaaattttcaactacagctgctacaagtacagtaagaactactgctctaaatgtgggccgaaatttttgacatgacacgaaattagctggtgcaagttcgagaagtatgagtacgtatagatttagacacgatatagtacagaaaaatatggactttgacacgatacaatatgaaaaaatataaatttaaacacgacacagtacgaaaaaatatgcgtccctcatgtaccatacattttcaactaaagctggtacaactatatactagtactatatatcatttgctattgagtattcaggctcgaggctcggttaaggtggactaggcacatgtgaaggcacatctagtttaggtgctcgaaaacaaaaaatattattttaaaaatacatatattttttaataatttttgtaaatattttcttttaaaaatagttcaataattttgtttgctacgtagtaaccaacatatcgcgataccatatatggtgagtaatattagcttcggatatttgggtatttaacttcgattttaagaaaattcagaaccgaaagcgttaagagaaatggtcaaaggaatctgaaggcaaaaacaatcttttatggcttcggttattagcgaatatctgaaaccaaaaggtttgcaatattttttttttctttgttcattttaacttcatttttaatataactgaaaatatatgttgacaattaaataaatgcgacgagacagtgtttgcaatgctatgtctttgttttttattattattgaaaaaatccaaaagtaaagccttatattataatagtgtaatttccaaatgtaaagatccaaaatataggtactttttaaaagatccaattctgataattcttatatgtattttttttatataataagttggaatcttgacattataataaagtttatcacaacaaattaatggtaaaataatgactttgaaaccaataagtcattgaagattaatataatatttaatattagttacattatgtatgataaacatgatattatgttgtaaagattcgagaatagtaaaaagaatatgtgcaaggaaaatgagaggcttttgaatttatttatttatttattttttggtatgtaacaagaattttatttataatgatactaagctgtggctgggccagtcatattttttggtgggggcaaaatttcttatttagagtattaataatgaaaatataattttaattgagaataatacaaattttagtaagataaaaataaaaataaaatatataaatataaataaaaaatattaatattttgaagacaaaatgtgaaatattcaaagtatataaaaatgtaattaataaaaagttgagcgggaaaaatgactccacatgcccctcatttgctccgcgcctgatactaagcaaatggtgaaacccatatgtactttttttattgggttttttaagttttatttacataaaatacgtttttttttatatatatttttatgttgtactcttattattttgttgttgatttttttattatttgtgcattattttttatgttgttttgttgttacttttatgtaattttttttttatatttttataaaatactgtaaaaacataaaaaaaaatattaactttgaacgtaaaaatataaaaaaatttcaaaaattaatgttttatgtaattattccataaatatatattatgaactatatttttttaaatatcataatgagctttcttctagtgatttttaattttattgctttcaaagaataattgtcactggacattagtagtacctataatactttttattaggtggcatttcacgattagttaacgatattttttaaaattattttattaagttatataaaaactgatacttaattacaccgatatcaatataatacaaaaaaaaatattaaacaccaataatatttttatgcagttttgttccaaaaaatcatgtttcatagtttccaaataaagtaataaacagccgagaagactgactttcgaaatttggtaagtttgcttacctcatcaattgcgtcacacccatcattttagtgtatcttatactaaacaaaaaattacaattttcctcatttttcataattatatacaagaaattacttagtatgtatagttatttcagctcacaataatagacaaattatacattgtttgattatgcttacatattttccacgtcggcaaatcctataatatgattatatatatttgaaaattgtgatatgatatattaaaattcatatatataaatgaatattaagtaataagtattgtatttgtgttaataagctatcaatctattactttttgttattcttctaattaagttggtaattgtaactttctttgacttcaatttcttatttttttt

SEQ ID NO: 187875 - DNA, 1918 bp, Cannabis indica
aaaaaaaaaaaaaaacaatgaacagctcaaaaggctcaaattcattcatttgtacagaaaaatggaagaaagaggcattaacttggggagacagaatccaactgttgatgaacccatttactataatcttgtagcagttgttgcaagagcaatggcaccaatctatccaataaagcttgtagcattctgtatatcatcacaatttcacatcattcattcagagttacaaaacatatatagctgatgagatgagaagcatatatacatacatatataccacgggaaaatattgttgtagcatgtcatgtattaggtaggtacatactaaagtcagattggttattacatatcttacaaatttccaggacgctcaacggttgatactggcatcatcgtaaaagggcgtgtgtatatctgcaaataaaactgtttattatgttcctatcaacaataatcttgcatatttctaaataaaaaaataagaagaaaaagtgagttcatgcatgcacaaagccactgctctaaatctataatgtcataatgttgtgcaattgcattaccaaaacaaaaagagagttgaaaacagagcaggtgttttgttgtttttgaacttggatatgtacaaatatttatatttattatctctattccaagtctaacctcaagaatgagattcaacttgatgtcaacctccaaaaatgaatcttcatcactacttgtgtcccatgacatgcgatttctcatgaatgctgcaagtataataataataattattattattatgcaaattataaagatgatgaaaatcataacaagctttaatgaaagaaaaaccaagtagttggaccataaaatggttgaaagacagaccaagtgacttcccttatctaagaatcataagttttcttatctgatacaataataaatgtacctgtaaaatggttgttttgttgctccatgatttttgaaccctcaaactgcaaatattaaaatcagcaaaacttaagaaataataacacacattacatatatcccatttccaattaagggaacaaaattcacctaccttacaagaaagcatttcaacagtacagtcttgatttgttggagttactctcaaatccagcactggggctacttcaaagttgagaagtttaagtctttgcagagtgcacctgcacaagtgattgattgttgagaagttggggcatgaatttcttccaacaatcccaacttcttctaataatggtgaaaatagttctattatattctagcttaaactactttgatatactaagttagattttacaaagaaaaagggttgaattgaagttgaaaggtagcctacctgtaagtgttaggagaaagacattggaaactttttaaggcattggtattgaggagggcttcaattgcacaaggttgacttaaaaattcaccaatagggaatttcttaccctcataatttgggattattggtagctgaaccctttccttccttgaagctgaaagatttgctttttttgtatttaactcatctgactctgattctcttctgtaactctcattgcctacttttattacaccaattttcttcctgaaacaaaccagaacttttaaaattacttgtcacccacaatccacaaacacacacaccctttcaaaaaaaatcaaaaacaaatatcaaaatccaaactccaaacctgggtttaagcactgggaggatatcagaagaggaaaacgacccacacccatgccacttggtgttcgtggtagtggtacttaaaatcattattattatttaattccacaaaacaattgttttgttttgttttgtttcatttcaaggaagaaagcaaaatttaattaatccaatactaaaataggtgtaaaagacaagaaataataataataataa

SEQ ID NO: 187876 - DNA, 2413 bp, Cannabis indica
agagagagagagtttgcctttcagttcaacaccacgctgaaaattttccttctttgaaccatcttttgcaattcccatatcattagtgccaatcccaacaacaaaatcattcgcatcatacaatatctgctaatttcataactcataaatacaaataatcagcagtatattaaacaactaataagagagtagcaaaaggagtacctcactagcagcaaaacctgggtatatttctactcctaattcttcagccttgggctcccatccaacgaactaattgacttaaactacatcaaaatattcaatcataatttagttcaatgacactagcaatactagcatcgcataatttagcattttgattgcatgttattttagctatagaataattgacaagagtccaaaagcttcatgttgtgaacatggcctaacaatttctttgtttcatatttgtaattggggtagaggttctatctatgtcaaactactgtgtaccgatcaaagccaaaggaacaccggcataagaactatggtgcccgacatgagagataaatagatagtcaaaacatctaactgcagattgacatgatactaacggctaagtaacataacttaatacccttaggtaagaaacacctagaagcatatataggtaaaaaatcaaactaaataaaatttggtaacccacgctccaatagatcctccggactcaatggctaagaaaaatatagaggggtaagcaagtatttaattgaacaatttaaaataaatttgacgcatgttgcgaatcttgtgataggaggaatagacaaagcaataggaaaagaaaaacttgaataccttattacataatttcctttattatcaaaaggacagggaaaagaaagtgcgcgattctttgtaagaaaccagaatttgtcagatgaaacagggacagagatcggtgactgcaaacacagtttggtgaagaaaatatcttatcatcccatcagagcagaaaacagatctaattgttaaactagagtgagtgtcacagtggatgaaatatttcatttaaatgtgaaagagtggtccttatccatattactaatctaataatcacaagctgaagtaaacttttgttccttttctaatgtcgagatacattcgggtactcttactttaacaaggatcacttccagaaaggttcacagtataacattaatatattacactacaagactagagaactcggttaaaatataagaaaaccaagaagggctaacaattacctcttcctgtttccactgaggaagaagttcatttaatgcccgaggttcaaaaacattcccagaaatgatatgtgcacctaatgagaatcataaagcagtactgagctacaatcataaaagataactcacctaatatttgcaatgtagtacttcgtaaaaccacaacagatagaatcaataaacaaacaaaagaataaattaaaatagtagatggaacaattatgaaagagttgagcctttatgccataaagcagcaaccttttattctattcttccccctaaacttttcagcactcctagatgaaagagacaactaatattcttgagaatactacaaaaaaaattctactcaagagctcagcgatccgcagtttttgcatgccatacgttaatctttatggaaatttatttcatatgatacgaaattctagaaagaatgcaaaaccggaaatttatcaacattctctaattaatgccattaggattatagcattatggtttaaactttcaatatagtcaaaagtagtaaaatctgtttgataaaaatcaaaatcacctaatcattattcaaattagagaagttgaaatccaacatagtaatatagaaacataccaacttcagctcctttctcgacaacacagacagacaaatccacatctttttcacgacacaattgcttcaaccgtatagccgcagacaaacctgcaggtcctgccccaacaataacgacgtcgtactcaatcgattccctgtcaggttcggtacacacactcctggattgagtcccaaaaatctgatttttgagagttccacttctctcgccatcaaaattcctcaaaataacagagttgaggcaatgcccagatgagaaaatccgcttaaaaccattttggaagactgaaaagcttgaattatgactaaaatgtcgaattccagaacacccacttgaacttgtcgaattggaaaggtcctgaggagacccatgtgaaatgtttgtgttggaagagattgaagtcgagggagttgaattccagagacgagtatgaaatgaatttgatgaacaaagactagtaaaggtgggatttctaaaagagtttgatttggaaagaagtgtatgcatggttaagacccgaaaggcgga

SEQ ID NO: 187877 - DNA, 7057 bp, Cannabis indica
gttatagtttaattaattacctatttttaactaattattattattattattattattattatcacaacagtattaaacacaaaacattatctttattccttcataaaattacaatcaataatcatcacatcatatatatgctttctgtttccttttcttttccattacacaaatccataaaaacttacaccctccccaccacacttttcgttttctacaattatatatatatatatatatatttatatatatgctttttacagtgataagaattatttgacacgcccacccaccgataaattttgaaacaatcattcaaacctttaaatcaatggacacaacgaaaggggagtcagtcttaccattatcaaccacaaaagtctttagacccaacaacaacttccaatgcataggtaccattaaaccctctaaatccaaactcaccttcctcactcacatgaccatgagcacgtgacaaccactctttcttcaactcaaggtacctcttaccagcctcattgatctccccttcagctcccaccaagtgagaattttccctactcataaacaactcccaaaaaccccaaagcatgactccctccacagccgggtgtgcatacgcctctcgaagcatcacttcaagatcatcagctcttatgtactcattcacagaagacacatcaagttcggtgaaccaaattggaagcccaagaatcccaagactgtccaaagcagaactcacaatgggcccaattgggctatcaatgtggccttggataccaatgccacccacaggtgcaccttgctcttgcaggtccaggatatgttggatgtacttctccggagaggatctcgtgtcacaaccatcttccacgtggtaatcgttgacgaataactgagcagaggggtctaattggttggctgtcttgaacatgttggaccttatttctttgcctaaatggtcttggtaaaatgagccgtggagcatttcgttgttcacatcgtagtgtctgaatttactcttgtaccgtgttaagaggctgctgagtctgttctggacagctgttaataaatcattcttgttgagtgagcgtagccattgttgaaccgtggcctcaacttcccagaagatgcaatggcctcgtggctcgattttgttggcctcacaaaaggccaacatgtcatctgcatccttgtagttgaggctaccttgctgtggctctgtccagtaccatttgagctcgttcccgaacaccgcccagttgaagtttttcacgaagaagcttgtgaagtcttcgttgtctatgtttgatcggctgatgcacgatccgaacgggaagctgttctgggtttgcttgactttgacaaatgctccatgcaagtttcctgactcggctccagagaatttgaggatcacatcacgcttgcgaatctgcacaagtagccaatggagataagatatattatagaaaggtcatatctaatcctatctatcaaattccacaagcttattatgtatgacttattttagtagaacgtattattagattgtattgtacaggtaaagtagagtactatataaaagacatataatacaatttccgaacagactcaatatgtgtaaaaatagctaaacataacaaaacacattatgttatgttgtgttgcctatgaatcaaatagctcaatctatcacattgcaaagatagttaaaaaaaaaattctgttttggagaacatgttatttaaaaatagtttactaaatatgtattctgatataacgacttaaacttaatctatttgaagaagttattatgaagtaaaaggttgacactgatagaagtaattaccaaatcagtctgccttctcaaatgcttaaaccttgcttctctgtcaacggcaaaaatctgaagtccagcaagcataaagtcaaccccagaagaagggccttgtacataaaccataatcttggcagcctgcttctcaattctaaacgagccactaatttcgtgccatctgtcgtcgttgatttcgacttgtcccccattgacccaattgttgtcaacgccaagggcaacgttaatattttgtggaccagtagcaccagagccaatccgaacccaagcagacacttggtatgtcaagaatagtttgactttgtcagtgatcatctgagctggtcccatccatgtctgggttctgttcttcacatggattaaacgaccacttaaaggttcatgaactccaagggaatctctagccattggaggaattatatgaggagaaccagattcaacatttaagctgcagttaccaaggctaaaccacccattggtaccattcagtagactgctgttgtcaattatattaactccaaaatttgggtcctgattacaaaaggcaaaaatccaaattggtacttcttatggttatgacatgattgaaaatgttgaagatacaactctgcaaatgtgacacaagaggaaaattgaattattaaaccaacctcaattactggcaaaggtgaaggaggggttctctctgcatgcttcacaactaaactattgagaagaatgtcagttcctgaagggggaccttctaaataaaccaccacttttgatggagaaccatttagtaggaactttcctttcaactgtgtccaatccttgtctgttgcctgcacactgaaataaccaggattttcaatgaggaattcatcatatcatgaatcatgatagtgataatactaatgaataaaggatgagaaatgagaagagtacataaaatactaacttggctattccaatatattgatcacgttgattaggtgtttgaacccataaagtggcccgcaaatctgaacttttgacattgttaccatatatacgagcaacagcagtaacttcataagcaagctttcgctggactcttccactgatgtcctgctgaattccattccaactctgagtccgctcagtagctgaagcgaaaacctttccagatagtgggacgattttcccgtctgccatagaatcatgtagagcaatcttgcagcctcttgcagaccaattgttcaagccatcctcaaatgttgggttaagaatgatattaccatctccagcagtggtacatccactgctttcaccctatcatcaagtgaaagcttaataccccaaatgaaattaacaaattcattacaaagaaacacaactctagtgcagaagaaaaacttgaaacttataatcaattacctctgatttttgtggggttgtacaggtaacaactacagatttgataagcagatcaactccagcagaagggccttccaaatagattataacccttcgaggcattgttgacaatgagaaagagccttccaaggtttcccaagtgtcttttgacacacaagttctgtgttgtgacaatcattcacacaaaatcttcaacctttttctttgaaaaataacaagaaaagacttgacaacctgataaataaataaagtagcatccattacctcccaataaaacaatagctagtctttgaatcttgatattctagcttcaaagttgccatgacatcagcaggtccctgaagagagccagaaactccaacacaagcagaaaccgaatacatggagcctggagaaatttcaccagtgatatcttgctccaacccttgccagcattcagtacgattcacaacgacagcatacttgccagctgatttttcagccacttcttctgaatcaaaagaagcaacaatggcactgcagctgttagcatgccaagaatgcagcccttgagagaagtcgtggttccggattatatttgtagcacggctgctactggcactggtcataatttggtctacaatctgaatgcaacacaccaaatgaaaattaacacaatgctaactagttcttaaacttactctcgatacatcaattgccatgtaccctttaatttttttggtcatagttataatgtttcacttggaatggggttttgcattatctacgattctacattattaggtcactaataattctaaacatatacttcttcagtttcaagcaagggtactaaattgtcagtatgctgtgcagtgtgtacattcttaagcctaataatagaccagggaatatctcattctcaacattttaaacactagatgccaagccaagcaagaaaacaaatataaaattaaaatggaatttgaaaaaggaaacttctattttgggtgaaagaatagtaaaaaaaaaaagcataccttttcctctgaattatcttcgtttttccttagattctccatgggttcttcggatatctaatcccacaaacaaaaattcaaatcagaaacatacttttaactagaaaaaatacaaaatgggaaatgtaaagacaaagagcaagtgaagaatattagtaagtaccgaggaatgtttttgctttgaatgtttgatcttgaagacttgggctgtgaaccatttggagagcttcttcatatatatatacaccactatcagtgccagaaccaaaacctaattcaaaacccacttaagtttgtgagtgaagtctacgaaaactcggtgcctccgtacacccaacaaaccaatcaaagcttacgttacacccaataaaagcccaattgcgatttgtccctcttctctgagactaaccgaaacatatggatcaccttttctttctattttcctatattctaattaataaggaatacccaatattcaaaatctctcttccttgattaattttctgatttcgttccaatttcccacttggggggaaggcaaaactccaaggcttctcctctcttttgcttcgtcttacaggctggtatgcttgaattgaaataaaagctttgtgtgtttattatatattttagttaattctacttctctacttttacgattccttccttaatctttaattgtaagatatattaatttagtataatgtaggaatagtctgagttattgtttttttttcctgttctgtaactaatgatatactcttaggttgaaggtagtttcaattgcccaaggcgaattgtcctggatgagaggctaagctgcaatgaaaattcatctgcagcattaattggtacactgctccatcagattttgcttctttaggctcaacatacgaaggagatgcctacagtaatttgagtgagatcagctatgaatcatgttaaggatacaaatagaacattaattgaagccatccccaaattattgaattgggtggtgaacctcttcaaatatccactacaggtttgttaatcttgatttatttatttagtactggtttatagttttgcttttcttatttgttttattggcactctatcactaatcagttaacttaaatgtcttatctatttctaaagtggaatttgagaaatcatttttcttaagattttgatgcccatctttaggtaccaaagtcatattgattcgtgtcttgtatactatctccagtcagatcagacaaaggtaatgaagagatatttgtatatttgcagggagagatgaggattgcataattgtgaggtttgtaaggtctagtgaaaatccaagaaactgtagtgttcctcacttcttggagactggcataggattaacgttgctcttataagagccaaggtaagtaagttccattctataactgcaaaatacaaagtgttcttcttttgttttacttttatgtacgccagcattttaatcatatacttctgcattcttttacagagaaaaagttgataatggttggatcatgtaagactctatcaaaggttccgctgctgaagcttccaatcgagaaagttgaagagcaatcgagcattgtttgtgctcccaagaagggtagctcaacaggtgttcacagtcacaattaagaacttgagatgatagtataattaggagagcattttgtattcaagtgtagatataaaattttggtgattatttgtgcaaccaaataatgttgagattgtgctattgtataggtgaacagtgaatttataacagtttcagaaatgtaacaaaaatgttgtttctttttctctcatggagttctgctacatgcttggctgctgctgtaataaatcaataatttaaaaaaataaactaaaaacgagtaatttctattgtaaaactaaggctagcaattcgtggtgtgttatgttcgtgttgacatatttatgatacgacataattaagctaactgcgaatgcgatacatttattaaacgtattgaaaaactcaaatatggacacgatatgaatacgacacgataacacaattattacacgatatcaagataaacttgaaatgttttttaaaaaaactatggaaattaattcgtgttatatatcgtgtcaacacgattatgacacgacatgattattaaatttattcacatgactacacagcacaatatggtaaacacgaacattgcacgattgttaaacgtgtcaaagacaaatactcaaacatgaacacaacataattactaaaaatctcactcaatcctatttattttgtgtcgtgacccatattttcagtcttatgtaaaactaaactcggatgaaatgtataaataataatacgtgacgacacttttgtttagtaaggcaacaatattgtacaactgcaatttgcaaaacttaatatttaattaatgctcattttatattagaaagtgaatattcattaatcaacggaaataattgcttacaatgttcaagtctcaaacaaacaagccaatcaggcaacctcaaaaacctaacagccacattacaaaagagctataatctcaataacttttctaatcatatgtttttttaagacaaaaaataaaataaatagaatgtcttttttttcctaataaaaaatagctctttttaattagaatactgaaaactgaagaagctcaaaattccgtgccaacatctcatcgcaatttgagatattaaaagaactggaaagaagaacagtggagcccaactgtgactcccatcccatcctcttcctcac

SEQ ID NO: 187878 - DNA, 2616 bp, Cannabis indica
tgtatcctctctgatgcgctaccaattcgtgctcttctggctaagagaatgcatatcgaagacacctcctatccgtattgtggaacaggtgaggagtatatggagcacctctttcttcattgtaaatgagctttctatttgtggagatccgtccctttgggggtttgttcggttcctggatttggtggttctatgtgggattggattaagttttctgtggggccttaagtcaaagggtgttaatgttggtaagtgttcctctatgcctcgatagtagtggatacgatttggcaggccagcatcaaacgttatcttgacctattactcactgttttgcagattatggctcttgtttgttcccatctcctccagctacaaccgcactcgtgtggtcctccctgaagacaggatcaagattaactgtgatgttaaagaagggagtgagactatgggtgtggtggctttggctagagattatataggcaaagttttgtaggttactactgattttctcgacttcactgatccgcttattggtgaagttagagctcgcttactcgccatgaaagcgacaatttctttgaactactattttgtgatgattgagagcgattccgagataattatcaattccctgaacgggtcctttttctatttggagtattggtaactacttatatcaatgtaataaactcctttttattttttattttttattttttatttttgagttgtaatttttcttttatttctagactgtaattttacggtctatatggtagctatgtggtagctaaatgggcgtttgctcataacttatctggtttggtagaggtatctattataccaacaaatatcatttataatgactgggaaggtgtaatttatttatggctaattaggatttttaccccctaaactttaacatgtaccaaatcatgctctttgaatttttctggctgttgaaaattctccttgaactattaagattgttagatttaaggacttttgtttaatttcattcaattttactatttcagtgattgtttatgtactgaaccatgctcccaaataacgcccctcgaaatttgacatgtactaaatcatgcccgtgaactttcatctatgttagattttttttactaaaattagacaaaagttcttaaatctaataatctcaatagtttaaagaaatatttttaacgaccttaaaaattcagtgaatataatttagggtaaatagcggcataagtacccaaagttttaagtttgcaagcggcataaacccaatatttatttttagtggcataagtacccaatgtttgtaaaactgtaattttcctccagttttgtcaattcagactctgttttgaatttattaaaggaacatttagaagtaaatgatgctatatatttttgtctagacccaatgatctagaatttggaccttatatgtggcctatttaagaaaataacagagtttgtactgacgaaattagagaaaaattacagttttacaaacattgggtacttatgtcgctaaaaataaacattgggattatgtcacttacaaatttgaaattttaggtacttatgccactatttatcctatagtttattacatgtcaaagttcgagagacaaaaattctaattaacttttatttatctatagatgctacttttgaaaaaaaaaaaagcgtgtaattttagcctaagcaagcttaaatcttaagcaaaagccagctctctttaccgagaaaatcaacgaccaataaaagctacgtttcaatttttgccattgaaccaccgatttagtttgtctctgctcttgtactaataaaacattctaatggattgttccaaaaagaataaactttcgccaatggagaatcccgacgccccggcggaggagctacgggatcgccgcccgcccgcccttggagatctccgagttctccccgatgaactcgtctgcgccatcttggagtatctcactcctcccgacctcgctcgtctctcttgtgtcagcaggtttgttttacttccttaccctaattgctgtattcatttcttctgaaaacttagttgtttggaaaatgaattgtggaatcagcgagaaccgaataggaactttgacgttatggaaattgttagtgtaatttttgtttcctatctttttaatttccagtgtgatgtacatattatgcaatgaagaaccactatggatgaagcaatgttttcgaagtctcaacggtccaattcagtacaaaggctcctggaaaagaaccacattgcatttgttgtatgtctctgaaatttagcatatcattacatatttgtgctttttgttatttaaattatatctcttttcgcttgtctccttgttaaattttgtttacaacttatatatttttggatgcagagggcatctagttggagaaactgatgaacttggcggaaaacaattgcgttttgatggtaattaataatttttgtaaagaccattggccgcatcttagtcttttatgttgtgaatttgattatattgttttgtattattcatttattctccttagttcgttttgaagatcagtgaagaatatatatatatatat

SEQ ID NO: 187879 - DNA, 3188 bp, Cannabis indica
ttacctccaaccaaacgccaccctagtgatgatgatgatatttggattgcttaattgattctgtagtgttgagtagtttgtatatatatatatataaaattaataacgattttgatttgtatggattaatttttttaatagtttttagaaaaaataagggttggcaggagatagagtagcagattggggttgatagcaggagagtagtagatcccgagtctcctggattaaggatggctggattaaggatggggacaaatgttctaaattctttttcactatgccgctatacggaatatgcgtaacattgttaagattattttgaataagaacgagatttggattgtagagagttctcaaatttcttgggggacatcttctctaaccttgtccaaggcccctagaatgccttgactctctaattgatgatcaccttacaccgttagagcaagatgagttagaaagaatcccagggcatgaggaaattagacaaacgctcttctttatggggagtttgaaagccccgggcccgaatgggatgtctattctttttttcaagcactattggaaatctgtcggggtagatttttgtgaggcagttgcttttgagacggggatgatccataggggtatcattgctacgaatgtggtcctaatccctaaggttcctaaccacaatagaatgtcccagttcagacctatttctctttgcaatgtggtttataaagtcatctctaaaatcattgtgaataggattagattgatcctcccccggttgatctgccctacccagactgcttttgttctaagtcagaatatccaagacaacaatgtgttagtccaagagattattcattccttcaagctcgagagagggaaagaagatttctttgcgatcaaaattgacctggtcaaagtgtatgataagttatcctgtcaattcattgatcatgttcttcaaagtttcaaggctctgaccaagatttgtgattgggtcctccaatatttctcgacaacttcctttaatatttgcccgaatggaggcacggctggtaaaattactcttgagtgtggcatcggacaaggtgatcccttgtccccttaccattttatatgggctgcagaaatcctttcgcatatcttagagcaagctcttaacaagggaactattaaaggtatcaagttgagtaggttagagcctaggctctcccatctcttctttgtggatgacttgatcttggttggtagagcaaccttagataaggctaaaggtctatggcagtgcctcaagaagttttgtgcttggtctagccagagaattaataagctgaaaaacttccatcttcttcagtggcaatactagtgagggtatgaagtgtcgcatcaaacaagctttggggatagactctgctacgggaaatattaattacttggggcttccattgtttagatcgtgctagaaagatgttgacttcaactttattctgaacaatttagtgacaaaactccatgagtggaagttgaagacgctgtctaaggcgggtcaggctacattaataaaatctattggactcgcattacctgtttatgaaatgtaaacgatgaagctttctaagaagctgtcctccaaaatcgatggtatgactagagatttttggtgaggatgtgagcaagggaatagaggcttgtatttgaaggcttgggactacttgtgtctccccaaatcccagtgtggccccaatctctgaaagtccttggaaatgaaccatgcctttttagctgagtggggttgggccctctttaatgagaatgagtcgctgtgttgctaggttttaagggctaagtacttgagaggtaatcccttcttaaattactcttatagaaactcagattcgtggttctagaagaacgtggtgaaatctagagaagtacttaaaaagggtgcttataagctaatctctgatgggaaggagacaaacatatggactgatccgtgggttatccatggcgctaatttctaccctaagttgattacttctcagcctgtggagctggaaaggattgcaaaccttattttggataatggagagtgggatatcccaaaactttagtctctttttgatcaagagactattaataatattttaaaaggaggtaagccttgtgcgaatggtaggagtagatgggtttggaccaaggaatctaatggattattctctaccaagtttgcctacctagtccaagccttgtatcgcccccctttgtgctctgtatctccagtctgttggagcaaactttggaactctaaagtgttagagcgacataaagtcctttagtggagcattctttctaatgctctttcggtccgtgctcttctcgccaaaagaatccatatcgaagatgactcttgccctatgtatggggagagcagggaaacgatggaacacctgaacctatactataactttgcgttccacctatggcgttcctctccttgagggattatgtcggtcgctgagtccgaggtgagaatgtgggactaagtcaaaattctttggaatgtgaagtctagaggggttgaaatggatagactttttctctatgcctcaattatggcggatacgatttggaaggcccgaaacgaaaaggtacacaacaattctttgagtaactttaaatagtgtattgactctattaatttctgttacgcagagtatgggtctggtttattttctttgccggaagctgctgtttctcataggtggaccccctctggaggataaatcaattgtgatgtgaaagttggttgcggtttcatgtatggtgtggctttggctagggatcacacgggttctattttgtgggtggccactaacaagcttaacttcagatcccctgattggagaagttgaggcttgtcagttggccatggagaaggttgtgcttatgaaacacccttttgtgtttgttaagagtgactcggaggtcaaggcgctgcatggaaccacatccagttggattattgctaactatattcaccattgtaatatgttctctaaggttttttttagttgtaattttttctctattccaagattttgtaactttccagaataatattattggcatggttgacccgtcaatcgatcctgccgaacattattagtaatgaccgcgaggtctaattt

SEQ ID NO: 187880 - DNA, 1747 bp, Cannabis indica
ttttattttatataagaaaaaaaaaccaagaggatttgtttagctaaaaacccaacaaaactccatgtttataaacgactttgatgcaaatttaaaatagtcttactaattaattaaggtttaataatacacataacatgagagtttagtattgagttaaaaaattataaattaatatgagtcttaattattaattaataacttacatcattgacagcaacatggagcaagcttacttgtcctcttgcaacagtccttacctgaattaacaattttaatgatattatcataactaaataattaagaaatatgtgaaaaattaattaaaacaactataataattaaattaaaactaattaattaagaactaagtattactaattacctctcttacaacgagccaaataacattttgagtgcaaggaggaacagtgagcgaaccaacgtatttataataacgacggctcccaaatttgattagggttggatcaaccctcccaacaaatctttcttgatatgttcgattcgaaatcgcatgcatcaaatgaccctccatctaaaaaaaataggttaaataattaaattaataatatttgagcgtatatctaacgttactcttaatatatttattatcaacttactgatgttaaaaatgaatcagcagctccgatctgatacataattccaataactgcgagttgtcccgttagactttggtgaaccaagtgaagctcgagatcatatcttcttccattgatagtgtgttcggagggtgagtgccaatgaatttgttgcaagaaatattgagttctatttagttctacaaatccagctgtgtttgaagtccatttcaactgcacccacacaacaacaacaacaataataataataataataataataataataataataataataataataataataataataaagtcactttgaatcttttgatcatgatgcttaacatttataataaagagttcctttattagaatttaagagacataataatggaaagtttgactacttatgtgttacatataaatacaatataaggttagaaaatgacatatatagcttgcctaatatatccacatcactttcttttactttccttgtcaattatatatatgttattatattttctttttttaaataaaaaattgaataaatttttgtgtcaaaaataaaactcatttaattgcatttgcatgacatatgcaactagtaactattttgaatgtttttgagcgctatataaattatcttatatctatgatatacacttttttgactttaagaaaaatttaatcgtattttttaaattagtatttaaaatttgagcccgagtgaattttaagagcgggcctaagctgtcttagccgccaactctatatatttaaagaccaactaatcaacaaattaggtggactaagacagattagacttgcgcttaaaatttactgagactaaaagggatttttaaattgatagtgactgaccatcatatcatgacctctgtttcgaagggttgcattggaaggtgtgtaacgagtcttaagcctgccaagagaagtgacaagcctaactctttggtccaaaagctcaattggagattgcattgtgccattgttgcacattctccactctggtcgaatcattccccatcttgttggtcctctcacgctccatgattcataagcaaactcccttgtatcctctattcatatcaaatatt

SEQ ID NO: 187881 - DNA, 1549 bp, Cannabis indica
attaacgttttttggtatgctaatgaataattcattaatctctataaagtagaaacatatcgcattattgttttctttctctctggtcaagaatggttagcaaaaaacatcattatgttgatatgctccttatcaaaaacactaataatcatgtaaagtgccacaacaagaagaatttgattactcttaacattcacggtacctatctaaattatctatagcctttttcatttcaaatatatcaaagtattgataagagaaaaaaaaatgttcatagaaaattttaaaaacaaactaaatgctactacctatagccaaaaacagtaatactactacaaaactaatgactaatcttccaatgaacactatttttttttaacaattccaataaacactgtttggggggggaaataaatgttataataattttttttataaagacaaatattataggagattattttatattgtatattttaattaaaattaaatatatttttaaattagtttgatgtatttaaaattgtaactagatcaaacatattaaatataaactttcaagcaaaacgagaacttctctctttttagagaacattggaacacagtgtagggtttggtctcattttttgctctcggtctatttcagccgttggttcacctttagtggtggtaaagattaaaattaagaagaaattgcactaaagaactttcttttgtttttatttacgattttggtctcactttaattgatacggttttataccgtttataatttaaagttttattgccacataatatttttagtttttttgttattcttcatattttatgcgtgtattacatggttacaccgttttagctatatcatagcctatctcagtcagtcacgatcatttcttctctttctttcttttatttctctctcattgatcagtctagtctctatttctctctcattgctttaccagtcacgatctcagacaattcgtttgttgagtttctctttctatatatttcgatatcaatcagtaagatcttctacctattatctttccttttcattttatttttttctctctttctttagtgtgtttttgggttaaactgattttagggtttggtttttattctataagattttaaatgtgttgctatggcggttacgagaagctcaatttctccatcgccttctggtttgaagagaaaatgtggtggtgaagaagaagacaatgtgaggaaaatatctttgggtgatgattccattgatatggatgttgtgaatgagaggagaagtaagaagagtaacgattctatgggtagggatgttgagaatgagaggagtaagaaaatgaacgagaaaagtgttgagaatgtgaaaaagacttcagtgagttctttggcaaagaaaaataatcatgttcctgatatatctcatgatgatcgtaaatccaaaaagttaaagttgaagagtgcgacaaaggttgatgatggagacttagagtctgaggatgaaagtcgtattgcgattccttcaagagctaaggtaatt

SEQ ID NO: 187882 - DNA, 1018 bp, Cannabis indica
aacatctgatccgaatttttgacaacgattgtttcaattataggttttgtctctcattcctggattttggacccctttcttaggggtgtctcttgtattcatgcttgtttatgtgtggagtcgagaatttccaaatgccattatcaacatctatggacttgtgacactcaaggttagtaacgacaagctttactttccatagtataaagctgcggattggttaaggatgacgtataattgtcaaaacaatggtgattgcaggcattttatctaccatgggccatgcttgctttggatgtaatctttggttctggaattatgccagatctgcttggaatcattgctgggcatctgtattactttctgactgtgctacatccactagctggtggaaagaacgtattgaagacaccaatatgggtgtatccttttcctattgaaacaggacaaaaaaaatataatacaatatcatcaacattcttatttccattcccattctcattttctttatcgtaagtaactgcttacaaggtttatcttcagtctaattgcggtgtatttgatttgtacaaaactgattttcattgccagcctacatatttgaaggtggtttgtcactgtaaaatttccttgactgttagcaaacagaaatagactggtggcaagatggagaataggagctcaaccgattgtccgtgcccgaacccaagccgaaccagaaaggagtacaagtggggcttttaggggaaggtcctataggcttagtgattaattttgatgaccaaaaagagattttttggtattttgaaacatttttcagtcatttttgtggatgatgtagctaacaagcaacttggtgactaaggaagtagaaaagctctttaatattttttttagtttttctcaggacattttgtattttgttcaatcatacacttcctataataattgaattgtaaagaatcttctttaagatatacatctcttagtttgtttcaattagttttgtttatggtaa

SEQ ID NO: 187883 - DNA, 2221 bp, Cannabis indica
ccttgcataaggaaaagggtttcgttggccaaattagattttcaacatctatgtatcagatacaagtgagaaaagtcacccaaggcttcataaagcccttatccgaccactgccataaagaaatggcagtgcccatcaattttgatgagcgctgccacaatagagtggcaatggttggctactacacaaggaaaggagtttcattggtgaagtagtatttttaacatccatgtatcaaatgcaagtgagaaacaccacccatggcttcccacaagccatggccgaccactaccactattcggctccaactggtggctatgacctcccgttagggtttcggacatcgatattatgtttttgggtctcgagacctccaaaatatgaatcaccatcaaaaaataagtcaaaacacacccctaggagtccaagaccactcttctcaagtggggtttccatcaatccaaattctttgtttctgtttgaatcgggttctaaccttattctacttcttgtttatgttgatgactttctcattacaggaccaaacaaatctctaatttagaagcttctttatgatatgcactctagtttttcattcaaggatcttggtgatgtccactatttccttcgagtggaaattcatcgcaactcagtgggcccgtacttatgtcaaataaagtatatcacatatttgcttgtcaaattcaatatgaagggtgttaaccaagttctagtcccacaagttcagttcaaaagcttgcattaactgaaggagcacaactggaagatgttcatttgtatcgaattgctcttagggctctccaatatctcacacttactagacttgaagtttctttcatcatcaacaaacttaaccaattcattcatgcacctaccattgctcattaggatgccacaaagaaactcctcagatatttagagacactatatttgaatgtctcctcctcaaaatagctctcacaatggagttatatggctactcatatgcgaattgggccagttgtcccaatgatagaaaatctactggttgatatatcattttcttaggaggaaatttactgttttggtctgccaagaaataatatcttgtggctcgattgagcatagaaagtgaattttgcccttagctaatgctgcctcaaaaatcaagtggatttgctctttattatatgaacttcaagtctcccctcatggcactcctattctttggatggataaccaaagtgttgtagttcttgctgcaaatctagtctttcacgtttgctgcaagcatattaaaattaacatgcactttgttcgggaccaaatccttgcacatcaactttatgttcgatatgtaccatccgtttgatcaagtagttgatgctcttaccaaaactctccttgttgatcagtttcactacttaaagtcaaaactcaaagttgttatacaactcataactaattgtgatatgttagttttcagttgttagttaaaatagctaggcccttctctgctttggttgaataagttattagtgtttttagtttgttaattttatgttacaaaaactcttctttactttgtgtattcagtctacacataaataaaggattttaatctcagtttgtgaggttaagcttttattgccatcattgtttctttttaagattatatgattaagagcgtagaattctacatagatcatgaaaaaataataaattaaaaaactctccttcatactaaaacagatagggtatcaatcaaaacaccttatttgaagagttttaatagatttttcgtacgttatatataccacaaaattattataaaataattatagattgggggtgccgcgtaaaagcacctaaagcactacccatttgactcatctgattcaatctgcattatttcatattttagatccaatctaatccgcataataactcaaatccaatccaatcaaatttgcaaaattgcgaattgaattggttacttttaaatactgaattatttaatatttagtttaaaaaaaaattatcacataactaacaacaaaataaaataaatcattattgatgtatgtcttcaataaaaaattaaaaaaaaataaaaaataaataacaaattcaaagcaagaaaaaaaatatatgtataaaaaatatttaatttaatttaattttaaaatttatttttcttataaataataatgaaacatac

SEQ ID NO: 187884 - DNA, 6398 bp, Cannabis indica
taatccaaataaatatataaataaaaacagaacaaaagaattcactcttgtcttccttttcttctttttggtcatatttatatctaaagtggaaaaagaatagatgagcaaacaaacgttcccttaaaatgtcacgtttgaaacaccaaaagggtcacgtgtgtttcaatagaagaatgtttcacaagcattacttcttaatctctgtttggtttgtctaaattacggcataaaaacaaacaaacaggttgacaggaaaaggctttaatcgccagaaacatactattgccaatttggggaaaaaggatgtgcaaagtgaaaaaacaaacaaacacgaagactcttatttcggtgtcaattcacacccgtcttcaccttccctaggtatatctttctcactctaccttgctccatcgctaaattggtttctgggttttgatttatcatccaattacagtaatgggtttctcttattttctaatttcgtagtctctgctaatcgtatttggtgtttatctttcttgtttttacataattccttaattggagattgttgtaaagttatgatctttatacttgtgaattatatttggacaatatttttcagttttttatgtttgaatttttgtcatttaaaatcttagaatgatgaaagtgcgtttttgtgctaagtttgcagatgggttctaatttattttcattttaagaaactgggcaagtgttttctaatgcaattttgatcgctatacagatgggaacattttgggaaattagggttttgggtttcggattgacgatcctgtagattgtcatctgggttttgctgaagaatacaagatttgatttttgtgaataagggaggctaagatgtctctcaatcaaagttattctcgaattgacactttagggctgaaaggtatgattgtccagaagattgggcttcagagggctgagaaatactttgatcagcttagaagattgttcagttttaagatgagtaaatgtgagttcaacaagttctgtattcggactattgggagggaaaatctccctcttcataaccagctcattcgatcaattgtgaagaacgcatgcttgtctaaaattccaccaacaaaaggtataaggaaagtggggagcacccttaatgttaaaattgcaaatggaagtcagaagaataatcttcaatctctctatggggatgcctttactccttctcctcgcaagggtaggtctccagtcagtcgagaccgtaagtttcgagatcggcctagtcctttgggcccttatggaaaacctcaaagcattacatgtgaggagttgatttccaaggcacaagagcagcagagtgctactgaattgctttctcttggtagcagacctccagttgaagttgtatctgtagaagatggggaagaagttgaacaggatgcaggaagctctggtgtacagagtagaagcccagttacagctccttttggtgtatcaatgaatctgggtggagctcgtaaaactttgtctaacttatcttactggccagagacctgtcaaaacagtggtgagctacctgatacaaaatcgctaagaagtcgtgtgaaacagaagttggagatggaaggactcagtatgtctgtggactgtgccaacctgttgaataatgggctcgatgcatatttgaaaagattgattgagccaagtatacgttttgctgcgtcaaggcgtgaaaatggtcgtatggaacagctaaatagtcggcatatagctggtgctaatggaacagtagtcccaggaagacagcaaagtcaactgtccttattagatttccatgcagcaatggagttaaatcccaaattaattggacaagattgggccttacagcttgagaagattagcttgcgtgcttccgaagagtgaacaaaagttacaaaacttgcatcttggccagaaagtcagcggttgtgcagaccagaagacatgatgattcagtaatttgaatcaattctttaacctcacatgagttttggtctctacatgttagaatgtcacatttattacaataggaaataagtagtgggttctgtgggaaagttttgagtaagttcattaggttgcatctagatatagaattgatatttgttatggagggggccatgtttatacaaccatttgtaactccttgatacatttaatgatcttactttttgaagagtttaacaccattcttgaattatatatatatatatatatatatttatataacttctttttgtatttctgttttcataatggtaaccaagtactaattcttcttgtgtatggtaatagtggttccggcaaagcatttgagaaagcatagaacactgtttatcttgatcaaggatcatatatcccaaaagattcttcacccagcttgtaaaactcaattttattctatatgatttattgtttatgtaacttactcaaggaatcatggaattattgtgtcccttaacaaattaatttatgctctccaagttgatctattagatgttgaatgcttataatgtagcatcctataccaattttaagctactgtgaatctttttctggaatgctgacttgttgactttgctttgcatctgcaattgaatctcattttttggaaattaacataaatgtctctatcactacaatagtttgataagtctcagtagttttaagtcttgatacacagtattcagctagtactaatattccaattgttcatgtacataaaatataccatttttagttttgtcatgttcattcatttgtacttctttctttttgttaaaaaagaaaaatgatcttattttattttatttccagaaatgtagtcacttgcgattacatttgaactattaagtgtcattttgttgcacttcccaatttatttagcagcatatgtttctttcttctaaagcatggctatgtaattaagattagatttagattaataaattaatatgtaaactttttcgttccgtacaataaagaagattattatcatatactatattgaaagaaaatacaaatgttagtttccaacaatactcacataaacaatgcctgtccaaattagcattggaaaaaacttgaaaatacaataaaaagaaactgatcaggaaaatgcttgaaaaattaataaataaataaacaatataaatgcttgtgaaagtactcttttaaaaggcttcaaacaattgaacccaatgctttacataaccctgttgggattagtctagtgtaaacaaaactaagctacaaatgattcattttaatcaattcttcaattgaagaggcatataggtcgctctctgattcacatcatcatccttactggttttgtagaagaagaaagagcaagcttccttcttttgagaatcaagttaaaagtatggacgcgagtggtctgtttggtcaatcagctgtaactgtggttacagttgctttctcgcggcccgccatgtatgtcatataaacagtccatagatacgaaaatgaattgctcactaatggctgtcaaaatgagaaaaaccaagtagtttattagtcaatagagagattgaaactaatgaacaggttttcactataatgcaaaataccctgaccagagatcataagatatatttggatttgagacttgaatttgcactacaagtactccagaaacagatttcattcataaaatttcatgagaactgaaactagaaaaataaattctataaggtttacctgaagatggacaggaatgaatctgaaagtgatgaaatcacacatgggccagtacataactccatttaacaatgtagggattaagtctctttttaaccgtgaaacaatctctgagccagtttcgcctgcactaggcaataatggcagctaacttagaaacataaccgactaacaaactttagattagtctcaatccttattcattaaaaactaatcaacaaaaagatgataattataaaattagaaatttcatttaatagtaatgtaaaagaagatcctgtgatcaggatctcaatcacgttaataaaatttccaactgaactaatattgaatgaaaacatcataaagttttccagggacacaaacaaacataacacaataataaccaaagaaacacttaccttgtaaacgagcattaagggagaagaaaatcacagtcatcgtaggtccatatattccctgtcccatagccattttcttcaatgtagataatagatcacgttttgggtaaagttttgacacaaagttgaaccaaaaatgcagtgaaggtcctaaaactagcagtccatatccagccatacgtaaagtcctcaagaagtcgtaagagtccaaagatttgttagctatagtctgttgaaaataagaaacaaaaactcttataagcataataaagatcaattaacttcaacgaccataagctgatcagcagctagcgaccaaagaaagctccctaatctttggaaggaatgagaaaataaaacccctaaaacattagcatccgtattcatctaggtgctaagacacaggtcccttctaaattatacaccaccaaatctacagaaccccatttactaaagcataaaacgattcaaacccaattattaaatcaaaatgttcaatcaataccataaagaaacgaacccttttgctctacaattaaataaacaactgacatgattagcctaatacaaacacatacaattgtattcatagtacctgagaagacaaatcagcagcgatgtaaataagcgaagaagtaacactttttgttagaatagggcgacatttaaccatgcccagataccaactgataatcccaacctccttggcagcggcagaggaagaagaagaagaagaagaggaagagaaagcggaggaaaatgaagaaggagagagttcaaactccttggctttctttaaaaagtgaggaaaacgaaggaaaggtctagaagattgttgggttgttgcgaaagtgagtgggggtgctcgtatggggtcgggcagaagaaagatatctgtgattgaatacttcttgaagagatggcgtgggattgtggcggcgttcctcattagagctccgctcattttgggcggaggggttttggggtttattagtttaggtgaaaatgaaaagtaggggctttttaatgtgacacacaaagttgcctatttatagttataccaatcaaatttggtatgcttctttttcatattcgcgcgaatgtaagttcatccctactcgctctattgcccattttttttttctttttaaaataataataataattaataaaaagaataaaattaaaataaatgtattttagattttttttaaaatatatgggatatttgtgctaaattacttaacatttataattgttacatatatgatcttaattataaaaagtggcggcaaaagtattttattttatgattttgttgctgttgaccgaggttttcggcaaccaatataataataataatagaaagagctataaggaattaagagagggatttttacgtggttggggcgttaatgagccttattccacgagtctgtatatttatgatagtatttattacagagaatgttcttggtggattttttctcttctagttcttatgaaacccagaattctcgactcccgctttaatgagtttgggggtatttatagtgtttatgtggggtgatccctagaattgaggtacatgtctttctgtatctatcagtaaagccacacattcccaatgaatatatcatacgtaatgcatggtctaatccctaggttctgtaaggtttttatgggtgtagtcatttatccttttttactgatgtgattcctcatagagcagccgtcactagactttattaatcatagcctagaaggtagagaatgggggttgtgccgtcagactttattacatatggcaattccaatacgcctcctcccatgcggcattaaatgcgagatgactgttcagatgagacctgacaccttcccggagatgcctttgttgtagccttgctctccgagagcacatgagactcacatgccttctccgggaggcatgcctagagtaatcctgcgcttaaggagacttacctgatttattcaaatgttaaaccctttccatctacgtgtcaccatctggttagtccacgtattttaagcaaaatcagggcaacagttgcagtcgtacttttttatttattaaatgtcaactcagaaatattattgaaattacgtattaaataagctaaaaaaatatgtcgtcacttgtttttgaggtgacacttaatgagcttaaatgataattaacaatcaaaaaataatacgactgcaataaaataataagataagata

SEQ ID NO: 187885 - DNA, 1760 bp, Cannabis indica
gagagagagagagagaaggaagatgtaaaaggattgatttttgaagaagtataagaaagaaagaaatgaagaagaagagtgaaaaagcagaccaagccacgtcagataattctaatttctttttattttttttacccgaaaaataaaaagtgtatttggacaattcgagaagggccttggagcttgtggctgagaacgaacgggacccttgacacgcggcacttacttcttccatgtctgtctcactaactctttttactgaaatacccttcctatttttattatttttttaatgtctttctttgatatttattcaaaggaaaaaacaaaaaaaacttgatatttatttattgtggaagatattaaatctgaacggataaatattacgacatgtttcaggagagataccgaaacagttgggctttaagaaatgaagaactttattctattcggacagcgtgtgaggtacacgcgctatgcattgagatgtaaaggctttgccatatcagatacagatatcaatatcagatagtttcacatgctccaaaattataaaatcctgtttggcctaagattttaagccaatagaatagaatagcatttatcctcaattaactttattatttatatattattttttaaattaggccccacagaaatttgaataatgaaatgtatcctacctttttgctaaatgacaacatataaaaaataattggtcatttttgataaattgaactattattaaggtaacaaactttttttctattaataaaataaagattcttttcctaatatttgagtgtgatgtttggaagtaattgtgtaattattaaatagtttaattattaaaatgattttatatttttaaatataaatgtgtttggatatgaagtaacaatttaatgtgaatttttaatatttttttaataaaataattaataattatactgaaaaataatattaatagttaataattaaaattaaaaaaaattagtaattatgcaccattcttataagagctaagaatttgagagtataaatgacttttaattacacaaagtatattgtaatatatttatataaatatgtaaaattttataattacctttaattaaataaaaatttaaaaaaatgtggctttatgccacgtgttaaggaagatgagcaagtaaatggtttttacaaattaaacttatccaaattacagaaatacatacgtgtcccaaaatggaaatcctagagctttatggaacgactgcagaaaagggaaagatatagaaccgtaattaatttgatttaaaattaaattaaaattggaaaatttcggaccacaagaaaaacaagggtgggagacaaacaagggtggccaggtatctttatgtgatctataataaagctgtagaagactagagaatagtggaagagagcagtgatgacatgagctggtccacatcatatgtaaactgcgctttaatgacacatcatcatcctctctgcatgtatagtcaaacgcctctaaaccacaaattaaacaaatacaattatcctctattcattttaaaggcaagaaaaataaattgggttaatgtaagattctaagaaaactattttattattctgacggctattgacattattataacactgcaaaacctttaattattattaaaatgagaggagagatggagacattctctctcttttcaaatatccaaatttcaatcccgaatctaaaagagataaaaaaaaacagtttt

SEQ ID NO: 187886 - DNA, 636 bp, Cannabis indica
gatctccttcatgaattcaaaaattaacacgagacactgaaacaggtaaggaagaagagcaacagcaagagaatatgtagaaaattcacttttcaaggtcacaaacatcattgttcagaatcaaaaccagaaaactcatatctaagcactcacagtctttactatcattttcaatcgacgtaatagtgaactcatacaagcaaaatagtacatcagtcaaaacagttagaaatttaatgagtaaagaaataaagcatcactccaattttaatttgctctgcattttccttccattatctcgaaaccaaacatcgaactacaatacaaggaaagagaagcatcgaacactattaatttacaaatatatataataataataatattattattatttacctgaaacgaagacagttgatttaatcaaacctaatattgtacgaaaaataactttcccgctttttctcgggaaccaaacgaagcatgacgcagtagataaaaagaaaagagaagtataaaattgaagaaaacagaagtgaaccttgtttgaggagaaacggttgaaatggagctgagatcggaagctttattgatcttcaatttcatcgagcgatttagtgaatgaacttgatcggatca

SEQ ID NO: 187887 - DNA, 4621 bp, Cannabis indica
atgaacccaattctaatgataaaagaaactgcaaataacttgagagagaacctgtacaaaggaagaaaatatattatgtactaaataacaaaattgacaaagctgtaaccatatttacttttgactcttgttatatttgggtgtacattcagaatacaacctaatttgtattcaaattgaacaaccacgcatgcctattataattactcttgttatagctccttttcatatgtatgcttctcttctctgtaccaactatcaaagcaaacttaatccaaatatcaagttcaagggacaatgaaagtagttgtgctcagttcaactgtcacctcctttagtttggatacccgcaaatgcggcgtatgacctccaatcatttatggctgatcggagtgtatggtctggtatcaacatagaatgctgtaatttttgctttgtacttggtgacacatcgtgtttctcaagccaagacttaattgctctgtactcataagtaaagccatcagcagcaatatagggatcctccatgatttcctgcatcaaccacaaaatggtacataaataatgtaatttatgctaccttttccaagaatatatatttaaattccagtgttaatacatatgtaattttaacctgaaggattggacaataatagtggcttagtgcctgcatgttcttcttctcttctacattagtatttgcaagatcagccaatcttttgagaagaggcaaaacttcagtctcaagatcaggtctgtctctgcatctaacatttgaacacttcagagcaatatgagctaattcctctgtttctattggccaatttgtaactgacttatctagaatatcaaagaaggaaccatgtcgaatagcattctcgacacttgtaacaagtccctttggatgacgaaatgtcaacaattggaggactatgatgccaaaagcatataaatctgattttggtctgattgtgccagttctttgatactccgggtccaagtagaagagtgtaccagcaataactgagtctctgtactcggtgatgctgtcaggcacaacatctgaaatgattttggctagaccaacatccccaattttgcttacatagtttctatctaacaagatatttcccggttttaggtctcgatgaactataggctctggctttgcattgtgtaagaatgcaagaccacaagctatttcaaaagctatttgaaaccttatgaaccatggaagttgtgattttccattacgttggtagatatagtcatctaggcttccattttccatatattggtaaactaggcaaccattctcgggacaggctccaagcaataaaacaatgttcggatggtgtagctgacttagaacttcaacctgcaaaacattggcataaaagaacagagctttcatgtcatgatacccgaaagcaacaactttgataagatacctcacgaaccaaaatgtctctttttttactgtcttttagaagatactgataaagttcattagtcaacacagcgaaggttaaaaggatagcttcacaaaaaataaaaagaagagaaggaaaagagagaggaaagacctgaaagggaaacaaaaataaattgacaaaccccagagaggaaatggtttcactaaacagatacaaagagaccgagggggctgagtcccatcgcatccgcagattaatttcataagtacaatttaaaaagtttaatacacatattagacagatgccatgaaaatctacaacaaattttaaaagcagcaaacaaaacgtgaaatggaataaatttatagatagaaatgttataatgacttgaaaagtaatacctctttcaaaaattcatgtttcttgtcatctttaccattttgaagaaccttaatagctactgggatgtgatcaagactgcacttgtagacttttccatagcctccttctccaatcacattagcctctgagaagaaatctgttgctatttctatttcattcatagtgtatctcatgtacctcttatcattagaaaagagttcatcaacaagctttcttttctctaaagactcttcaaaggctttgacttcagcaatctgtctttcataagcttcttttgcaagcaaaactctttccctctcaacctcctttacagcttccaagtgatttgctttttcttcggctgcaattttcttcaaagtttcttctctttcaagagcagcattcactctgtttgtttctttcaggcatgcagaggaaactaactgaacctgctaatttagacatttgtgaatataaaccttaaacaactcaaggtctctccaaggtcatctttatataattgatatggttttagaaactcattatacacggatactaaattagattggttacggcatttctggctaaccagatcaaagctggggcacaaatgaattatttgtttggagctcaaacactagagtagttgatctctcaccttcttttgggcatggaccaattcttcacaagtttttttatacattgcaatagtattttgcaattcttgacgcacacgggcaacctcagtctgtgagtctaactgcagaattatatacatttattatacctccataagcttcaatagatgttacgcaaaactcattaaaacaaaaagcatgttctgacaagtttttggtgcaaattaccttgtcagtatccaaagaatctgcataattgcatccatttaatgtaagagtttcaaggctattttccaagatttggagatttaagtcttgaaaactagaattggcagaagaaccattttgtcgaaatgcttcagagtttaggtagttaagatccagatttattgatgctccaagactttcatttaatgaagactctgctgagaagaatcgacgcctggataattgttcatctgaaccactgaatccttctctgttgtctcttgaagtataaacccagtgtgcggtgctagtctctgtaaggtaagaagtatagaataaggacaaattaattgactcaactctaaatagaacacttaaaaatataccatatgaagatgatgaattagctgcctttgtaattattttcttcttcgatacaacatgaatttcacatgggttggtagtacaacttaaaaggcttgttggaacccctggtcccttcagtttcctaacaaaattgtgactccagagttagaattatttcattaaaataaataaataaataagaagaagaatgagaagaagaaaatttcactctgtttcattccatctgtactataacttcatattcacatcataaataaaactgcatatatggagatatttacaaaccttttcaaatttgttattaccacagaaatttatatagtcaaaatcaacaaaggcgtgtctactgatccataatgaaaagttgagcttgaaactatagtataaataaaaagaaatgtaaaaagactcatgttaccgaagaatactctgagaattctgaatttttttcgtttcaaatggataatatacgagtgaatagtaaagagaaaaactttctcattccttagttcctttagtacagttcaattcataactcagtcagtgaaatgaaaccttacctagttagaaaatttgaagaagaagaacccagaactaagcattcaatccctgcatcagcaacatattttagaagcgtggatgctggatctttcccctctaaaatcaaagtttccatctgcaaaagatattaactacattatacatatacaaaaccagtacaaatcaggttcaaagagaaataaaagagcaagacacacctgtttcgttctgcacagcttcttaaatggaatgaaaacatcttccgccttagattttatctcctcaacatacatagcaaccatatttgcgtccagttcagacacgggaatccaatccccagctaaaaaacataacataaaaacatcaaatacaaaaccatgggtacaattttttttccttcattaaagtaatttgaagaactaaaaagtgttcaaaattgaagctgaaaaaagagaaaagtagtgcctaattttcttgctggccaaacagagttgagattgaaatataaaattttgcacagatgatatagcagagaaagtaagaagcggaaaatatacatggagtgggaatagaggtgattttgggcatgacatggatcaagacgaagcttgcagattggggcatgagattctccaccgcccagctgactgcgcggtggctgccgttgccaccgtcaacggccactgccactgacttcattgctgtcggagtaccaaagtcaccgtcgtcgttcaaactttgaaaatgaaaatcaaccgaatagtctttcgaaaaaaaaaatcaagcgaatagaagggaagagtagactaacaaacaaagaacgatagtagtatgttactacgttgacgaagaaaaattcgcagctttgtaactaaaataattactctatcaaatattaccaaaatttacagtaactacttaaaattgccattcattttcttttatgtataaatgtggtggagcttttataaaattatactggaatgtatggtaggaaaattcttgaatgaacccccttataatagacacatc

SEQ ID NO: 187888 - DNA, 2274 bp, Cannabis indica
ttctctttttctttgttttagatttgtatatttgtaagatgtgttggatttctagaatcaatccttgttgaacttgcaaagcaaacaaattagacagaccaaagtttagtagacaacttttgggagttaacaccttttgctgttaacaaactttttgtttaatttttaatactttcttcattcataaaaaaaaaagtaatactcttaaacttatatgttacattacatcatcatgcacttgatggtgattggataagagctataccacaacaaagataatatttataaaactatagagagcttctcattctttaatgcacacagtgtgcttattattagatacatatatatacgactatacgtacatatatttatattgcctaaactcttctatgcgatgaggtggagtggcagtaggattctccatgacttgtgtactaggcttgcgtcgtccaaaagcaaaagcagcagaaatagtcttataattctcagaaattttgaggatgagcaagaacataacacgataagcaaacaccattgacaacaataaaacaaaatcaacccacttcgaatagctcatattaacttggtacttatttctcaagatttcatccccactaatcttgtgtgacttaccaagaatttcgtccacgaacatcaaacccttgaactcattcttatataatccttgaaatgcatatctatgaaacgaaatataaaacacagggtacctccagaaaggatctggaaggtcatttgggaggcgaaaaaatccacctgccaacatcataaacccttggattccagcccccgtgatgatccccaagagaaagttagggacgagagctgccactatcatcattaggctctcgaccaacatcatgcaagcatagagaaccaacacaaagtaaatgaagtgttcgaatcctcctcggagtcctggcggaaagtaagctaaagcacctggtatcagagcgataaggacgaggtatggttgtgcagatatggtgttacccattacaaatgatgttacactatagtgtccatttagtctttctcttccaaatacctaaatttcaaagaaatatattacatagagtgaaagaaattagtgatcccattttcatggctttgcatattattttagtttataattactataaaaataatcttacttattattatattattagcataattttttttatcattatattattggcatgtgattgtgtatgttaatttttctaaagtgtgaatgaataattatttatttttatttttggcttctttttaatttggagactttatgcatggttaggactatgcatgtggtataattttaaatataaaataatgaaaaaaaaaaaagaaaaagaagaaaatctaaatttcgaaagtacaatatatatttaattaattatatatgcataccttcatgtcttcaacaaaagaagggaatccaccaatagtcatgaaagttaagaaagaagcaacatacatgataagtgaagctcttgcctgaaacattgattaaaacaaaatagacaagattacaaatattaatttaatatcaaatcttacacattttaatttcacaaataatatttaaaatataatgttaacattaataggagatacctcaacggatccgtcagaatggccgatgttgcaaaagatagtgcccaatccaatagccaagccaatatatataactagacgaaaccagtagtaacccaaatctctgtacatgtttttgaatgatcttcttgttaacacaccacattggcttatgaaaccagcgtggcttctcttcttctccattaagcctacgctcttattctgaattatttatttttattgtcaacgttgacgtaaaatagaaaacattaattcataaattgagatgaattaattaataattacctttttattacatatttgggatacttgttgttgaactagctggcaattttcagatgctttataagactttacaagagtttcaattgcttcttcaactgtaggtcgtcctctaattggtaaaccttgctcaagatcctgcaatttattataaggttttatttatatatccaatgtagtaaatttgggatttaattatttaattactattaaagataatatatatgctatatatacggccataacatacgtatacataactttttgtactttattttaaagagaattaattgactgaaggtatattttatcactaatagaaatatgatatgatgtattatataggtgtaa

SEQ ID NO: 187889 - DNA, 3091 bp, Cannabis indica
gttagatgttgaattaaaagaaaactaacctcgagttgctcttcggtaaaagaatccttttgaatattccatgtgtctgcatgggtgcggcggaattctgcaacggcttttgtaactgtagatttaataggcgaggcctctccaacaaaacgagctagtaatgtaacatgctcgggcaaccaactgcgaaaacaacaaaaacattgcttacatggttagagaagaaaagagataaacatctgaaaaaactatgctttgtattactttaaacaatacaaacctgggcatgtcgtaaggagcagacaacacagaagctgccaatgcaagtacagcaccgtgtatggaagctaccgatgaacttgaactcgagtttctgcattcagaaatcaccagtctttttatgtacacaatactattatatattttaatcatacaagcattctaaacatatgatcagcatataataccgttgtttccttttccgttgaagagcacttgctcccttataagctctatcgcgaaagtctttagctaaatcttcatccccgcccttcatgagacctgctagaaccgctgcagcatgctctcttacctgaagcagagaaaaaacattagatcaagaacatcctatgaacaaaccgaaatttacagcaaagtagaaagattattatcaaaatataagagagcaaggaacttgcctcgacttggttgtctacaagtaacttctcaacagtttgccagatttgttgcttctctatgctcgaaagaatgaaggtgtgcctatattgagttcattaaaagggacgagtcaagataaggcaaatagtacaaaaactgtaaaatttgcatttccacactcaaatcatcacatcttaaatagaatggcaatgtaggattccttccgagtacgatacctgtacataaaagttctcagaaacgtcaatgttgcagatctcgttctccagttggaatcattggccgaagaaagaatcacacttagagcttcctggagttggggttcccagaaaaccctccactttaacaattcgaaagctgccttcgctaaggttgataaatctttatttgatgtctcctacaaaaagcaaccaatacatctcagatatgaagaattgataccgaggcaagtgagaaagatacttgaatcagcctcgagggtcggatgttttgtttgttagccttatcacatagtcatttcaaggctaatgtgcttcaaacaaaagcagaagctcataccaaactgaaaaatcacttcaagttataaacagaatcaaatttgagctgtacgcacctgcaatgatattacaggataaagtagaccgacgattacatccagcaaataagatgatctcccagacttcagagatgagatgatgaaatggaaaagcttcacaaaacagaaaagtacattgttcagtagatgttcgaaaaagctaaaaatattccattaaaggactttagaagattcagtaccgtttccatccatttgacatcatcttgtgaatcaccattaagatgcccattttgaattgtattcttcttggtctccgaattgtctgattgattgctctgctgaatgtttactaccacctcagatgctcgtcttttgagaaactgaatccaacttctctgttgaagttggctgtcaagatctgtattctcgtccccgtcttgtgaatgattgtgacaaactgatgcataaagctgaatatttgagcacaacacagaaagagtaacacctatagcttcccttacctgtttcacacaaaacatatatcaaaacataattaataaatacaatctatcaaccaatatatatataaataatagaacataatcgaaactcgcttacttgggcagatgaatggcacatattagcaagcagctcttccagaagtttaaagtggagccgaatttcagctgttgacatcttttgtggggatatttcgataagtgcagctgaaataaaagcatagcgcttggcaacaacagtagtagttaccgtcgaaggtaaaggtgtagctaaacaatcgagtatttgctgtctcagaagaggaattctagttccatattttcctttaccagtaactgcgtaacgtatacaagctgcccactcaggtattgattcaaccgattgcgatagaacgatattctgcaattggaccaacatccaactgtcccaagcttcaacaaggccattaacatcggaatgcaacacaccagcaaatgcttccgcagcaacacattgcttagacctctcctttgcaagcgcaaactcttccaatgagcttttgagtgccgataaaacaggcatgccacattcttgtactaaccgcttgaaaatccgtgcaaagttcgagtaaaaattatcagtacctaacaaagatatccaactaggagtacgtggccacgatgaagaaaagtcaaaataaaaacgggtgattgatttatcagctaggctctgaaaagaggagtttccgtaacttccccttgaagatgaaatatcggtatcggtagtgatgtgaacatgagaaagactattcaaagtctcattaaaaaatccatcttccataaaaatttgagttaattcaccctctagagatgattttttagtttcttgcaaattcccggaataaatactctgttcttcagatgaaagtttataaggtgactcttttaacagagtattcaaagccgaaatggcaagtattcttgtttgtggaagttgactttttaaattttttaagaaatgacctgaaaagggatgaatgtcaatatccattgtaatgagaataaaaagataagagggaaattaggaggtagacaatatcgaaaccaacccgcagtttcactcagaattttcgaagaggaactcgggtcatttctagatcccattgccaacaggagtaggactctgttagccatcagattgtacctacaaaaaataaaaaaaaatacatttataaccaagtaaatgtttatgagaaaaagtatccaagaaaatcaagatatctacctccaatgcaaaccagtagaatcgaaactcatcgaaacaaatctgagaaaccaaaat

SEQ ID NO: 187890 - DNA, 3204 bp, Cannabis indica
tattttactcgtaagaaaggcttttatgggatctgattcaagactatagaccactctacaatatttgtaagtgtgatgcgatgaaggttgttcaagatatcaaaaagaagacaaagttatggagtgcctaattggcttgaatgaatcttatagaagtgcaaagtcttagattctcatgcaagatctaatgcctactgttaacaaagcgtacacttcgataattcaagaagagagacaaaggtgcattatttccattcttgtcgaagtccctaagatcacacctagtcaatctagatctactacaaatcagtttgctggtaatgtaagttttaatcatcccggagttacttgtaatcattgtggtatggttggacatatcatggctaaatgcaacatgttacatggatacccactaggccataagtattctgcggaataaaaaaatcctaatcaaaactcttccaattaacctagaaaagcttctacaaattattctaatggacacagtgacatgcaggacaaagtggacagtgtgttatgccagatcaagatctcattcagagtcttacatatcagtgccaacaactaatgagtttgttgtctcaaaagaatcaagaatcatcaagcctctcatctaaactatatcaacccatggtgtcacaattttctggtaagagcatccctattttgcataatagatggatcattgacacaggagccacacattatgtgtgtatcctggcttatctttatttaccaatattaaaaaaaaaaaaacatctaattcaagtgtcaatttacctaatgatgctcatatttctattacttgtattaggataattcatctatcctctgaccttattcttaaaaatgttatacatgttcctgcttttaagcacaatttattatttgctactacactaatcatcaaatctattggttgccattttaattttttcctcttaatcattacattattcaggatagtatgaagactcagattgggatgggtgattgattggagatctttactacctgaatttgtctcataattcactttctcctgctattttttatgttattttttattttgaaattgaagacaaaactatgtggcactacagattaggtcacccctcatgtatcaaacaacatccaattaataaaagtgcaattcagaccttaactctagccctcattttcactactctgtttgtcattatgctaaacaaaaaaggttgccttttatttctaatcataatattgttaaaaaatgttttgatcttatacatattgaaatttatgggccttataatactatgatttctgaaggatataagtattttattatcatagtggatgattgttctaggttcacttaggttaatttcattaaacaaaaatctgatgctcaattggtcatttatcaatttcttcaacttgtcaaaacttaatttaacatgtctattaaaggcattcgatcagacaattctgaagagctttagtttcctattttgctcaagaattccttcaccaaatctcaaataaaaaaacccattttatggtaagcctcccaattatattcacctaaaatcttttggttgtttagcaaatgtttctacacttagtttttctcgaactaagttctctccaatgtcagctccctgtgtttttctaggttcccaagagtatgaaagcctataattttttggatctctatactaatcgtgtcttctacagtggggatgcatatttccatgaacatatttttccttttgttcaaaatgcccattttccatacacacattattatttcttttatgctttttctgattctctagaacataactctcttttctctccaatagacaattctcattcttctatttccattacagaaactcctcaatctaatcttgaaatgcctacttcttctcagacaaccaggcccaccagagcacataaaaagcccttttatctcacagattatcattttttcttggctaattattcttctggtattttccttcaggatcattatctagtgattgcacatctactgtctactgttattgattattccacgttgtctccaaaattttgagctctcattctctctatttcaacacatcaagtacctgagcaattttatcaaactcatgggattattgaattggatgcttctatggattgtgaaattgaggctcttgaagaaaataatacccgaattattattagtcttcctttacatcatcaggtaattggatgaaaatgggtttacaagatcaagtttaatgttgatggtagtgtgaaaagatttaaagctagattggttgtaaaagggtacaatcaacaagacgagattgattactttgaaacttttgcactagtgactgaattggtcactggcaaacttattcttgcacttgctgatattaaaggctgggctttgtaccaattagacgttaataatgtatttttgcatggtgatttacatgaagatgtgtatatgactgccaaatgttgtatgcaagttaaacaagttattatatggcttgaaacaagcttcacgataatagtttgagaaattttctacagctttggtacatgaaggattccatcattctgccacttatcactcttcgatcatcaagcactttggtaacagttttatcttattgcttgtttatgtggatgatattattttggtcatcaatcacatatatacaagagatggaagctttgtaagtaagattgaacaccaagtttaagctcaaagatcttaaaaactaaagtacttcttggactttaaatagctaggtcaaaacaaggtattattatttttcaaagagcttatgctcttcaacttcttgaagatttgggttacttagggagtaaacttatgaatactcccatggaggtcaacctaaagctatgccaagacaataaacaaaaggttggctgatcctacattgtacaaaaaaattgttggtaaactgcaatatttgaccataaccagacctaatatatatatatatatatatatatcatttttaatcaataagttaagtcagttcttaactactccaaaaatcaatcacatgatattgctcaaagagttttacagtaagcaaatcttggacatggaattatgttgtcagcaacatgtgaaatcaagctagaggcatatgcagactcagtatt

SEQ ID NO: 187891 - DNA, 1263 bp, Cannabis indica
tgagaaattagaaaaactgcatgcgtgagttagttaatttaaaaaaaaaatggttaaaaaccgcaccaccgcgaacacccctacaagtacaacatatgtatattattgtaaatttttgaaaaaaaaaatcaaataaatgaatatcgtgggagtagttggatgtggatcatatatcatatatatgtatgttggtgagagtgagtgagtgagtggttggtccaaattgagagttgtattgagaaatgaggtaaaaagacacttctttgtttctcttcttatctcttctcttatttcattacagagaaaccgtaaaccaataagtggcagctagcaatggctattatggtttcttcatcctcctgtacctactccttattctccactacttcctataataccattcgtggtgaatttgaatcctcctccaaccaccgccctgccgttattcttccagttaattactattactctttttttagctcatagaattgtgtgttattgcctcatttggtttgacattaattaattgaaaattgagttatttcagggattggggaacaattcgggtgattaccacaagttacaggtgagtctgaaacagcatggaatacccagtgtggtggctaaggtctccaggctcgattggttccgcaatgcagctggtttggtcgaccctaattactggcaaggaactcttcgccctcgacctgttctcgattggtaataattaataaatactcttaattatgatcttcattccaccatttgatttgaaaaaattcaatataaacagagatattgttaccattgatattacaatccctaaggggagacagatgttgaagaaaaaactttctatattattgtcattatacacaaacaactagaaatagaatcaagtgctagtatttttttctcattatacactgcaggtacctgaataggatcgaccaagctatacaagaggctaaggaacagtcacaaggtataattaattatgaaagaatatatatatatatgttgtggtatgtattataatttataactatttcatattaatatgtaaattgtttatggttataaatgtaataggggagagtttatcattgattgggcactcagcaggaggatggcttgctcgtgtgtatatggaaaactatggtgtatcccatatttcattgctcttgacacttggaactcctcacctgtaattaagtaacttccccaatttcttgcttaattaattactttacattttttttt

SEQ ID NO: 187892 - DNA, 3917 bp, Cannabis indica
tttttttttactaattgcaaatcaacttactaaactacactaataacaaatatcttcagtataatttacttacaaacttattacccactttctttctattccttatcttttattttcccctttattcctagcctccctagttcatttcaactgcagacttttcctgaaataaaaaaaaaaatcccacagtaacatctctgcaaagaatgaatggagttggcatatgctcatataattgttcacatttgagaatatgcaccaaagtcagagaatgtagctaaatgatactccgatttttgctagtcctaaagtaacaattttggaaggctgtaggcaccacagtatgaatattcaaggaagagaaatacataccgtaaaactctgaataactaactaaatattatttgatcattgctatcattaagttgttgtaactattgtctccaaatacttctacctaagaaataattttatcattttgcagttaatgaacaaatagcatgagatagtgaaccaggatccaggatagtaaattccatggttcgaatcagcaaaaacagtacctggcgaaccacaacataatcatcaatggatagactcaactccccatctgcttgagcatcaaattggtgtataacctgcaagatgaaggatgattctattatcacgtgagaaatgtaaaaaaacaagtagcttccagttacaacaaaaaactttcttgtaataaaagtcaagtaattgtataatcaggactagttacatgtaattttctaggcctgtataaacaaaaatgatagacccccaatccggtatgcataagctaggcacaagaattagagggaaatatgtatggccctattatttgttggggaattaaatgtgatagtttgaattatcttttgttacctgctttatttggtatgtttaggaaatagataagagaggggagggtttgggataggcttattctaatttgtattgagcttggctcaggaaagaaactaggactcttgaatttcctagaattatcaataataatcactttttcatttattttctgtatttactttactgaggtgtatcaaaagatttctaagatttcaaaagccttactttagcaataaataaaatatcctcttgatttaggtggccatgatcatcaaatccatttgatttatcgtcctgatgtccaagcgattcgtagacatctttctgcacattcactgacggtgatgataaaaattcttgtgggtgattctccaatgtcatctaataacaagcatttaaatataaatgggtcattaagttatcatcaagaaagtcaacatggtttttttagaggtcaaggcacacattaaatcaatctaaattataaccaacacattgtaatcccatataggcaatttgggttaagcatactttgtcctggatatattttacattaattaaaaatgctcacaatctaaaattgaataaatgaagaaagtatagtaaaattaaatacaaataaaagcacaatgcgatagcatattaaatatttattctggcagataaaatgaaaatgtggatagcttggttggacagcttcatttttgcctctgcatagcctcagaagacaaagcacggcatgctataagatgctttcaaaatttgtaatgttaagctattaaataaaatgcagtgtgttctattcaaaaaaaataaaataaaataaaatgcagtgtgttggcctacacagatgacagaatttaattttcaaattttaggatgtctgtttaatttccatttattaattctacagtttattgtttatctgatttactttcctcggtgcaggatcatattttccagaattgtggaattacatagtttgcattttttttttccttattctttaaggtttttttgcatacattttcatgtctctcctaattatttagtgcaaggatacttcatcagtgttgttattcacatctgcatcattttctaatgtaagattcatttttaaagctaaaaatctcatacagctgtaagaatcctaacagttctaaataagtcactcatgcatggtatatctagaaacaattgtaagtggcataatattgattgcattagcattaaaaattcaatgcatcatgattcatgaaaaattaaaaatgtcagcacttcccataggatagattaaaaattatgttcttttctttataattgatgacgaaatcattatggtaagtgcttattatttcagaaatattgttgacaaattaaaaatttgacattattgcggcagatcccaacattttgacatctccaggaacaatacatatagggaaaagtacagaactagtctgatagaacaaacctcagcatgtagcttttccagaattgtaagagcatgctgatggtaagatctctcagcatcaacctggaaaatgaatatttttcagatttgacgtaaaataattgcattcagaaaggtgtagaatccctgtcatctaagtacaatgagaccatgaacattttactcaaaatattattcactgtgtaggtcttgaactaaaatttacaaccactcctccaacaacttgagctagtcccaagtgcaaatacgaagtatttatttctattttctttttacatctcacatacaaagtaaggcttcacaggataaacagtttacaacaacatgtatctaagtgtcgtagaatccaagcatgtaaataatttacaagtcaacccacactgtgaacgaagatattgccagcctatagatacataccagagagaatcaagtaagaataccatggtaaaaagtgtatggaatgtcatcttttgctgctgctcctcaactgatgacatagctgcagttgcttcccgaccaagagccataatagaatatttaagctcatccaatctaccttctgcattttgaagcttaattacactctcttcagatacggaagggcccctagactttgactggcgccttaacacttcagccacctaataataaactattcggtatgaatattaaacaatttgtatgtggtgtatgtaacgaattataagatgagcaattacctgggcttccacatcttgacgcaatttatcataacggtgagtcaagtgacgagcgtcctccaaaggagctccatttatttgtgcccgtagtggctcgcaaacctacatatttttaacgcctgtgacacgattacaaacacaaaaagaagtggagaagttggaagaaacttaatgatttacattaactagaaaaacagtatctcatgacatccactgttgaggaaacaagtttcaggtaatcacacaaacacacttttggaacagaagttaaaagaacaattatatattggctaattcaccagtgagataccaccacaaaaatgatagggagttcctatcaatttagtataatagtagcaaatatagcaaaatagtgaattgtatattaatttagatgaagaggatacaatgttcctgggtattcgagatacccagtgctctcccaagagctactgctcattaactaattcattctctctccaaaacccttctaagactctcctatatatactctcccaataccccctattacaatgacccatatacaataccgcccccccgaaattcaccttgtcctcaaggtgaagaacaacaaaagcttgcacaacaacttttgggtcaccaggtattttgaatggaatagaaccaatcttacagctaatttcatatttcttattggatttgggaaattagttggtgataaagggggttgtttattcatgggcactgttagacaaatggggcacaaagaaattactaaagaatatgaatgtggacttggtcactgttacatattctttagttctcaaatggtgactcaacacatttatgggata

SEQ ID NO: 187893 - DNA, 1943 bp, Cannabis indica
aaaaaaagaaagactttatcgtaaggctctacttctactatgatcctgacttagaaaattcttgtcaacacctagggagttgttcgatgatttttcttaagataggatgagctgaagcaggttgctattgatggtgattgttgcaatcctttaactattgaagatttcttgaagaatgatttgtgttctggttgttgtttcaaccacatttcaaaggaagagcttagagtctggctggatggtttgaacacactggtgattggtacgaccctgattgatgatgctggctctcgtgtttcatcccacacggatacccctgtggaggaggatgtctcaactcctccacaagagtcatgagaggggtagcttggaaatgtagagggttggggtagatctctacagttcgcaagctgaagtcttggtttggtcttgctcttctgacttcatttttctgactgaactaaagatcgatgttactccattggtacatatacttaatagacttcatttttacttaaatatttctgttcccactgttggttgtgcaggggtattattttagcttgaaaatctggctttgtgcttaaaagtttgtttgctctagcaatcaaacttcaagcttggtttattcggaccccctctcacctgtagctcctctcttgtgtttatggccctccttatttctatgctaaaaagaagttctgggctgagattatgaaggttgggataaatttggtggcccttggttaattttgggagatgctaattttgttcttaatgagtcagagatagaaagttataaagggaaggaccatttcattcctatcattttgaacttggtgaattttcaaggtctacttaattttccaatcaatggggacaagttaacatgggataatcataggtcttgcaatgcacatgtaaattcaacgcttgataaggggcttgttaatgagggatggaacttgttactcccaatagcggtccttcgttctttttagacaagtaactcagatcacatgcctctttgcttatacttcaatgggatagaagctaagtttaaaaggggcttcaaatttgaagaagggtggacttgagatgaaagaagtaacctaatggttgcccatgcttgggattctattattcacccttgggacccaaccaaaatgttcaaaaatattaaggctacttggattgccatccttccgtggaataaactccaatttgggaatattgactctatcatgaaagatctagaagctaaacttgacagtttacaaaaacttcccatgggtacgagagactgcagattgagcatgagatttgaattgccctcaatagggcgctggaaaggaaaactatttattggaaacaaagggctcaaatatcgtggcttaaagagggtgataaatgctcaacattatgttttctttctgctacttttagggggagacgtaatgttattgaaagcattttggataaaaatgacacctggctccatacctaggagctgattagaaaagattttttttttttgaatttttcagtgggatcttccataaaagtaacaacgagccgatacttaactgtgttaacctaattcctgatcacctatctcttaaggaccaggaagaacttcttcaacacaggtactatgcataagggggttttttctacaaacttagctctcttctcggaaattcagaacatgaagaggactcaccagtttagacctatttctctttacaatgtatcatataaagtcatctttaaaattattgcaaatagaattaatcccattcttcataaaattatcttccccactcaagtagtgtttgttcctagtaggaatatccaagacaataatgtgatcattcaggaaattttccacacttttaataggaaaaagggcaaagaggggttcttttccatcaaaattgatc

SEQ ID NO: 187894 - DNA, 3138 bp, Cannabis indica
tttcaaaattgaatcagtgtgatcatgttattatgttgggtaatgaatggtgttcatatggacctcttctctcaagtgggtcatatattagaatcatcaccagtatgaatggctaacgggacgggtctgccccgacccgctacggacccaccttgacccgacccgaccagcctctcatgtaggctaataaatgacctctttgatttatgtacctgcttattggtatatctaccggatctcatcatgggccatcactgatcactatagctagctagtgttgctaattaagatgaaattatactctattatttatttttattttttattttaattttaacttttattttattactgttaaatttatactctttaaagaattttttttttacatttttaccgttttctatagaaacaacacgaaaacaacaaaaaatacataaaaataatatctaaatagcatcaaaaataataacaaaaaataatatacagataacaaaaaaatcaaccataaattaataagaatacaatataaaaaaatcttattttctgtaaataaaatcaaaaaaaattataaaaaacatttaaaatagcttgtattttttttgataaattatagtggcttgtttcatgtagcataaagtacttgggtgttctgtaaaggtagtacctagccagctaactccactcaatttaaaaataaaatctttctgtcggttgtgaaaacgtttttcacatattatgaacttagtagttagtagtagtagatgtgtcatttatcatatatatataaatatatatatatataaatatttgtggctaaatataatgcagtacatgaagttagtgctggcttgatgtatgatatatcatcagataatattatctatctatatatattctgggacacgattttgtctcgtaatgtacttttacggaatgtattccgtgatgtacgacagccgttatatgcaggagttatttgatctgagggtttgggttgatctaggggtaattagaattaaaaaatggtaatgtaccatgagacccatttaatgtaccacggaatacattccgtgaaagtacatcacgggacaaaatcgtgtccctatatattctttttggctaatgtacaatctagtaattactgaatgagtagtagtattgctatgggacacctatagtaattagtattaagagggaccgatttttgaatttgaattatagtgttattctatggatggaaccaaatttcttgttgtgataatttgggttttgagttgagttagggttggtaaattctagttgattaatggctataaatttggtgactttgagcataaattctacttagttttctttgagtttgatatcatgaattttgtaattttgagcttagtgaaatatgtgtgtttaggcatgtatatattgtgatggtgattatacatatttatactttatattgggtttgtgagccaatatgttaacatatgtgaaagttggatttgaattggtgcaattttgaaatggtaatatttgagttttctaggttttaaacctaggcaccgcggccatgtttttggtcgtcgcggtgcccatgagtctcgaaaacaggggatcttccctgtaagagatacgtagcggcactctcgcgtgttaattcccttttggcccaaatttttgtaaacttattttgaccataactttttattctgaacttcgttttgggcttttttatatcgttggtaagctcgtgacgagctctagtacttggtctagagttggagtcataatagtgaatatttattaaatataattttagaattaaccctattttgtataaatttaagattgtgactaggaataccgacacttgctcgagatcacctgtagaatggaaattctcctcatactttagctttcaggtaagaaattgaaccttgcacatatagtataacgtagtggcgcacttctatattatgtaaaatccttagttaaaaatgtgaattagcgtcattacccttaagtttctatatctatgcatgcaatacatgaattaattgagtatataaataaggttatacgagtaaggcattacaagtttaatatatgttaagagttgttcgatcaaggcataactaggttagactcggtaattaaaattagataaaccttaataaggccttatgtaataaaaagatgtgtgagtgtatcacgtagtacctatacaatatagacttaggatacggtggcatcattataagtgcagtggtgtcttacattagtcgatgacacgattatttgcacatcatcatattatgtgtgatatgtatgctatatgttatacttgatttgattatgcttttttgcttggtcttggttcacaggtgctctattgtgcagcaagggtaaaatagtgtcaggccagccatgagttcagaggttgtacatgttcctaccaagctagaccacgagagttgggtctagcaggaaaattgtttagaaatcttagttttgtcgcttaggtcagcttgtatataaacaacttgtaatattttttaagaaaattatgggatcccgaatatgtaactatattattttaattttaattaaaggttcttactattattacaagctattttattatttaagttaaaattgttttaatcacttggcttattagatcccaattaatgagactagcacaatataatcacgacatgtgtcgttcctttaattaggacattatagttatctcgtgagttctcttatctatctcaaggaagttgacgtaagttgtgagttgaaaaagtgacttggaggtgcccctaggttgggaccttcatcgaactggttattgtggtggtggagcgttagtacgaggaggctcaagatatataatttttgatgaagggaacctcattgaagatagagggttccatccataattccttcctccttcatcaacgttaatatctctagaagcaatggatggttgagaagatggaaccgtgttattgcatctcacgcaagttttgtcgtggaggaggtggaacattgttttgaggggcagcatgctcttgcatgtccctctaggtcttattttgcatatgaggaggttcattgttctttctattctca

SEQ ID NO: 187895 - DNA, 2187 bp, Cannabis indica
aaaaataattaaagaaattcttagagctgtgatgcatgctctttaattacaatttatatatatatatatataattgtgtatattgtattgtgtatattgtattgtgtatattgtattaaaaatttagtcattttcttttaaggttctttcatttatattttaaaatggtttttttttgttgtgtttttacggaattccaaaaattcctattacaactaactatataacttaaatcaaaattaaaatcagcaatccacacgtagaaacacaaaaactatttcaaaaattaaaacagtaaattttttttttaaaaaaatatatggagtaacaaaaatttgaacaaatttaatatttcgatgttcaattgtagaattagagaacgtaaagtctcgcatttattagcaaaaataaaaataaaaaaagattgaaataactacaactatattaattcatcaaagaattttcgtccatctgatttcagaaatttaaaaatgcttgatatgtcatcaatagtactatacgtggcgacgtgtcacataataaacgtatttgcgggagagacatatttaattgaaataaattaataattagtatgtaaagtaaaatcagaatattagaataattaataatatttatacatcactttgaagcatatatatatgctacaaaattttaatcatatgcacaaacacttgcttctgttagacgaaacgatcgatgaaagtgatatttgagtatatagatatatatgataatacatcatatatgacctttagtcggcctaattttaacttcaaaatattgaatggacaaagccaaaaacatgaacatgttaataacaacaacaacaaaacatgatgttatttagccaattcagatctccaaacgacctacatgttattgttaattatgaccaaaaaagtgaaatatgatctcttattaatgaaatttctaaaattatacataatatgttgtttgaatgcgaagtgatatttaattgtggaactaaatataggtgatctaagaaccttaaaataaatacgcatttttttcattaaaaagggtcttttcttatatataaatatattaataattaattccgtggctatatttatgtatgtatatccattcctctctagctatatattgtaaagcctttgacgtttcttaaatattttgcttatcaaacatgccaaagtcagctgctaataatgatgatctgccacgaacgagtaaaagggttggccttggccattacttattagcagatgacctgtgtttgttattaattattaatttagttttttatttcaacaatttgattggttatatgttatatattctagtagaaatatccacatttatggggcaagctatagagaagttgtgatgataataataaagacacaaaaaacttcaagtcttcaacttgacgttaaatctaacaaaatattatttggatcactaaggttgcctttaagactagttatacatactctcacaagtttttcctaaccggccaaacaacattcattcaatatttgcgctccaagtttttatgttacttcttcagttgtatcatcaaagtcagctcattatataatatataatgttggaccacttattcctcataatctcaaacgcatataccaaccaaaaccaaaataaattctctttgaatcgaaaaaaagtaaaagaaaaacaaaaagtctctattgattaattcttctatagctagcaaccaatggaaggaaaacataagttttttcatggaacacttgaagctacgatctttcatgccacaccttacactccaattttccccttcaatgtaagtaatattattataaagtttgcaaattcgatatgcatagggaaataattacaaaaattttaatctgggattttgttctttagtgtgtatttacaaatggaaagcctgcatatgtgaccataaagataaacgacaaaatagtagctaaaacgacatcagaaagcgagcgcgtttggaaccaaagctttcaaatcttatgtgctcattcttccagctcaactattaccttgattttggaaacttcatgctcattcttgggaaagttccaagtccaagctcatcaaatattagaggaatcgagtttgattaatgggttcttccctctttcattggagaatggaaagcagcctaag

SEQ ID NO: 187896 - DNA, 6800 bp, Cannabis indica
ttgttattctgtgtgctttctagtaattggatattgactgcatgttacaattagcaaatgttgctattttcaacagtttctcttgatactcatgtcagggataatagttatcgtaggttaatcactgcacatgacatgcactcaatgcagcttagggatatatgaaaaatcatgaaaagctgcatgtagttaccaatgggctaaaaggaatgttcaatgtaactgctatgaactgtgcccagaaagcatttctcctttaggcatttggttaaagcaggttcattatacttgtggttgataacttgtgggaatgttttgcatcttattgggcatttatgcactgtctttatgctaagatgggaaaccttaaatacagattttgatacaatttcgtaatttggcttttaattttcaggctttgaaagacttgtatacacatctgactcccatacagcgagtcaatattgctcggcatcctaacaggccaacttttcttgatcacgtgtttaacataactgaaaaggtacggtttggtatcgactaattctcatttgggattaatgtattttgatagttgatctctccttgaatctttataaaaactagacgttcacaaaattatattaactaatgatttttttctctacacatatctagtttgtggagcttcatggagaccgagcagggtacgatgatcctgcaattgttactggtataggaaccatagatggtaaacgttacatgtttatgggtcatcaaaagggtagaaacacaaaggaaaacattatgcgtaactttgggatgcctactccccatgggtatgttttgtgaaattgtatagatgctatttgctcctttcagctactaatggaattatattttttgaatctctctgactctaattgacacatatatgcaaacagttatcgaaaagctctacgcatgatgtattacgcagatcaccatgggtttcctataattacttttattgacactcctggtgcatttgcagaccttaaatctgaggaactaggccaagtgtgttttcagctatgatttaaacaattccttccaattaaaaagtgtggttccattttagtgtgggccatttatgctttcttccaataaactactttctctttatgccttcagggtgaagccattgctcaaaatttgaggactatgtttggtctgaaagtaccaattatttctatcgtcattggggaaggtggttcgggtggtgcccttgccattggctgtgccaataaactgttaatgcttgaaaatgcagttttctatgttgccaggtatagtcagtttgctttgaatggctcttctttctagcatggaagtggaaaaaaaaaagaacttcaaactaatgtagagaaaatagatctcaatgattgccatggtagtatgctaatgataataattattctgattgtcagtaaccggaaaggaggaaatggctttagggcaatatatctgaattttgtgccagtttcccttattacaagtgcagacttatgtggagccaatgctatcatttattagattacttagacgctagatatgtccatttttccttagcttgtaaaagttaaaaatatctgttccacacaattactatgatatttacaacctcaattaccatatgatctggtctattctttcttcttattttgtctttgttttgtcatggtttagtccagaagcatgtgcagcaatcttgtggaagactgccaaagcttctccaaaggtttatacaaaagttccttatatgcctgccatgcaatttgattatataaaaaattattgcttgacatattacagaaaattaagaagtgactattattattattttttgtaattctctctttttctattttgcaggctgctgagaagttgaaaattactgcaacagaattgtgcaagctgcaaattgcagatgggattattcctgtaaatctcctcatccctcttcttaatgaattccatcaattttttccgtccttacaacttgaagaaaaccaattttttatttttctttttgttcatgatttcccacctttatattaatcatttatttaactgcactgcacttaatcatcaattggagtcccgtgcataattgtggaggacttccatatttgatgaacagattgtcttttgggtgtcaaatatgtaacagggtttctctacaattaaccattatatttctctttgacaggagccattaggtggtgcacatgctgattcctcttggacttcccaaaggataaaagctgcaattaatgaaactatggatgtaagtgccactcagatttaatcatctttaaagattaatagatggagttatatatgcttatctagaagtctttttttgttgtaaacaggagcttaacaaaatgaacacagaagagctattgaaacatcgtatgcttaagttccgaaaaattggtggcttccaagaaggaatcccaatagatccaaagaggaaagtcaacatgaaaaagaaggaggaacccactctacatgtggatttagagggtgaggttgaaaaggtgaaacagcaaattttgagagctaaggaatcttctagtgaacccccgttgttgcatctaaacgagacaattgagaaactgaagaaggatgttgatcaggagttttctgaggcagctaaagccttgggttttgaagacaagtttgcggctttgcgtgcagactatcagaaaataaattcacaagaccaaattgtggatccagctttcaaaagtaagattgataggcttagggaggagttcaaccagaaccttccaaaatctcctaattatgaaagcctgtcaaataagcttgacatgttgaaagagttatcaaaagcaaagaatattgcagagaaaaacagtaaggcttccatgatgaagctggaaatcaatgaaagatttaaagaggtcgtggaaagacaagacatgaaggacaagtttgaggcattgaagactgaaattcaaaattctggggtctcttcatttgaggatttggactccaacctgaaggagaaaattgtgaagatcagaaaagagatagagtttgagctcgaagatgttctcaagtccttgggtttggctcttgaggctgttaagtcaaacacaacttatttagaagaactcagtccatcatcagaagtaaaatccaagatagaagaattgaatttagaaattaaccatgggattgaaagtgttatcaactcatcggacttgaagtacaagatagagctattgaagttggagattgctaaggcaggaaagaaacctaatttagaagccaaaaaaagaattgcaactttggagcaacaaattaagcagagcgtagcagcggccttggattctacagacctaaaagagaagcatgaaaagctgaaggcagaaatttctaaagacatcaaaacttctggaggactggatgggagtctgaaaaacaacagtcccgaagatgcaagactgaagatgaatgctggtgcaaatcgcaccttcgcttaatgtgagtcccttctgttcttataatgtgtgctcaacctgtctactccttttcctttatttttcttgattttgtttgaagctaggaaattgaagagttgttttattttgtttaacttcttgtagttgtatgataaagaagtacactattgaatttattctgtattggcaaataaatgattatacttgtaaaagtattttaagatagctatatcggaattcatttttcgactagtttcttctgcttctggaattgaactgttagcttggtcagttattatagtgtatttcatttttctatcagcagtagctgttttgttggagatgaagatagttcagaacagaggtggaagaagtcattgataaatgagttcaaagtttcccaacattcagagagagttcacctctcccaaagcacagcttctactgaaatttgtagacatgaagcacaagtttttgaatctacagaaataggaagaaaacaaaataataataacagcaacaaaaaaaaaatctgcctggaactcttttaattggaatttgttttccatgatattagcatctatgtgtcattattattcgcatcttcttaactttttacctcccttgtttattgagatagtgttgtttttggggttcaataatagaactatggtagacacttatcgtttttgttttggttcataaactatgaaacactctttgtatagttgtcaagaaatgggtgatatttgctgtcttttccattgttgtttgaatatgataaaataagctattacattgcatgtgacacatgtggtttccctttggaactttattcctgtaagggccatatctgatttgaccactctttcctcattaatgttattatataagataagggacaatgaaagaaaaatgctatgtggtgtgatagttattgtagtggatcaaattgaaatgtggttgttaggaataagtttacctatagttctaaactcgtaattatgagttgttttgttttgtttaactcctcatgagtcatgactacaaattcttgcaacattacaaatatatttaagaattgtgttcctcaaaattaccatctacagccaaatataacttcttctcattaacaattccagtcaatttcaccatattcaattactcaaaacaaatattcatggaaaaaaaataactcaataaaaagagcatataattgatcataatcaatacagaaaaggtagaacagcttttctagatttgggataatcttccccaaacttgtccaaataccagttatggttggcacgtgctctaggcaccaagttagcacacgtgtaaagaaaaaaagcccaatccagcccaagaccacgtcataatggcccagcccaaccactcaacacactctccaaaataattaggacaactcactctctcaaaccaacttcctctcggaaccttataccctcctccaccctcctttaatcggaccaaaacccgatccgacccgacattaatcgccattccggccaagaaaaccacagctccgaccacgaatctccaccagaaccactcatctccgtcgtaatcgctgtaatgagacaccgatctagcctgcaagtaaccgttcaagaggttgaatccgaaagccgtggcggctatcgtgaggggaaaatcgccggcggttttctggcgaaggaggcggagagggaataatacggttcggttgaagtagtggaggaggaagaatgagatgaggaagatggatttgggattggaggtgttgattccgaagggtaagaggagaaaggtgagccagagagtgggactttccatgaggaaccaggcaagtggagccggtatggtgggaccccatccgggacggcggtgctttccgtagggagcttggaggaagtggagggagatgaaggtgggtggtccgacgaggtagagagtgataagactataatggaagagggtttgatcatcaaactcaaactccatttttttgaacaaagaaaaagtgacctgtttttttttgtgttcttttttgtcagaataaatgtaatagattaagattgtaaagaggcacatttattagggagatcttgttatccttagaacgatatacttaaatataggggagatcttagtggtgtggtcatatacacacactcaatatggattttaaaaagtttatatggcaattttaaatttggccatggtaattttttagttttgggcttttatataaacatttgttttttcaagaggaaggatgctatcttcgatccaaattgtagcttcgtctaaccccaatactaaattagcaagcttgtgggcacttagcaaagcgcttaacacgagtgatcgagacattaggaaaatgagataaagctgatttaatttgcttgataagatctccaaatagagagaggtcttctttgatagcagctaaagcgtctgtgatagctttacaatcagtttctatctgatgaagaggaaagcactcttcaatgcaccagtgaagagatttgagaatggactttactttgaggattgcagcatctcatcctcctgtatgaggagaagctatcacagccacaacacctctaatactattgcgaattactccaccaagattagctttaatgtggttgtttgaggaagtcacatctatatgagtttgagaaggccatgtggggaggtattcaagtgacggtggcaacagacttagcttctggagaaggtgtaatatgaaaagcagttgttgctttataatcagccaagtagttttcagcgaggttgaggatgacatgaggttgatccatggtcttgatgcttaatctccttgttcctattatgttaaataaaccaagatatacaaagaaaaaacttcacttcttctttgttcatgttagaaaaaatattaaagacaatttcatgaaaagaaacagtagttgaaagaaataagtaaggatagaaaattgtacctttccaaactcttctaactcttttacaaaagaacaaggcatgaggaactgattcaacctctctatcacaccagacacataagggggactgggttatcttcctattggcaaggttcaaagtcagacacaacaccactttgtttacagaccagacagtctgtgatcttggttaaggctgtaatttgatcctccaaccttctggtgttgttacctgagacgtcaattcctcaaatttggtcatttatgatgttcatgaggtctcctccatgaggccggactttttcacatcttg

SEQ ID NO: 187897 - DNA, 835 bp, Cannabis indica
aaaaacaaaaaaaaaacctagaacagagagagattaaacctggaaagaatgtatattttcccaaacagatgtttcatcttgactaggcaaattctgtaatatgaattttccagcattccataatttgtttgtgaatgccttgttggaggttaacctctcagtggataaattgaggtcctggaaaaaggaaactggattaactgacagtgatttgaaataaatgctagtacaaattgaagatctacccacacgtaaatgggcactcatatacgtttcctccattacaaattctgacttgtagcattggtacttaacaaaattaacaggaaaacaaacctgaccagcagttcccaaagcaagtgtgaatcgtaaagcatctgtgccaaattcctttatcgtatctaacggatctattacatttcccaatgttttagacatttttctcccctgaataatatggtacagcacttacacagtcatgcatcaaaatctagaacagttaaaaggataaacatagaagaataatttgaaaaaaaaaaaagtatggaaccataaaggagggataacatttgtgatcgacagcaattagttcatctccccatcaaatagaaaatagttataatgttttactccagactaaattttactagactaatttatagagcgtttatctgaggaattcagtgaaatgaataaaacaaaatgtcagaatagttggaacttttgaagggagaattaaatcccctctaaacaattaaataaaaataatgaaagagagtgaaaactccaagacagatagaattaaatggactaaaatcaaataaaaaaaaaaaaa

SEQ ID NO: 187898 - DNA, 4159 bp, Cannabis indica
aggactctgctcgaacctaatctattcatatattttggcatttagttgatcacttcactcaacttctacgctattacatatatttatataggttatgttggagacaatgaagcaaccgctgcagttgtggatccagaaggatggctcaaaactggagacctttgttacattgacaatgaaggctatctctttattgtagatcgacttaaagaattaatcaaatacaagggctatcaggtttttgtctctataaattaacgataataatacaaatgggtctcattaattagtaattttccatcaaaaaagaaaccattttgtgtcttcatgtgtgtacttttatcaggttgccccagctgaattggagcatctgcttcattcacatccagatgtaattgatgcagctgttgttccgtaagtgtttcataattagttgttattagtaactaatggaatgattcaacataatcatgtttctaattctaaatttaaaaaacacaggtaccctgacgacgaagctggtcaacttcctatggcctttgtggtcaaacgccctggaagtgctgctgatgagtcactaatcatggactacatcaaggaaaaggtaaatgaaattttttctgtattgagcttatacaagctttatcttagttttgcacacgtacaaatggctgtaggttgctccgtacaagaggataagaaagttgaggttcattgattcaataccaaggaatgcacagggaaaggtgttaaggaggaatttaatcaaacttgcatcatcatcatcacctcccacttcgaagttataatttgttcttgatgctacattctcttattgtactttagagatatagtctctccaactaaaatcttaaagctattctacaattcccttattagagggtcacacgatcaatgagcttccgatgtattgtgcttcagattataaagcatttcatcaaattatatagaagagatatatctgtatatttgaaaaggtaaatgatcaaaaaaagttgtgcaacaatcaacattatcactacaacgtactattaatgttattgaagaagctaaattgtggcttcagatggagatactattaggaattccacgtccggttacccctggaccagaggtaggaagaagcaactcgtatgggggaactccggcgccacttctgttctttaggcgattatctttgtttcttttgttaataatcttatctatctcctctaattgagcagagtatttactgaatatcttgagaattatttgatcatttgtccaatgtgtatgaagtggattgacttgacccaagtactcttcatctgctgagtgagttgagagagtgtcttggactgccattactttggtggcttgaagttgggttggcaaagaagacaggaaagtgcgctgtggatttaacataaacttctcataatcagtgtcgtcttcgtgtggaatgagctttcttagaagcgtggggcggttagggacataccctccaaaagggtactgtccaaagttaatagctgcatgctgacccgatgctatccaaataattgtggtaagcacaccagacaagtcttgtttggtctcaagtttaggccaccatggctcgtttctcttatcataatgacccttgttcttgatctcatcccaccaggcttggagctcaacatcagttcttacagagtttggctcaacataatgatgttcaacgtaagattccacccattctttaatggcagaccataccaaaagaccgtctgcagcataagggtaatcttcaatgacaagtttgacaccacaaggcatggaggggtcctccacagccatacccctgaagattttcaatgttatacaccaaatttttaaaaggtttgaaagaaattagattttaagatgcaagaaaattaagctcacctgcgaagaagatcggctggaagtgcttccatgtcaaaccgccattggctttcgtatgctgctgaactcagctccatggcatacttaccaggactgaaactcgcctcgattattcctcctccattgatcaagctttgcctggcgagagcattaatttccagtgtgtagcgcatgtgaggatgaaggagtacataaacagggtgcattgagctcagctgcctatgagttgcaataatataaggctccatacaagcatgagtcctcaacctttaataaacaaacacaagagcagactagaattaaacacatctaaacttctttggacataacacaatgtaatatttcatcagccatatttaccagtgatttactaattgatgaactccagcatcgttggagcaaacatgagctttcgcaagcttccaaatccaatgcgttgtggcatcatgcccatgtgtgtaaacagtcttgttactttcaagggaagaagaagatggtggaagtgaaagctcaataactaatggcttcagaacaccagactttgtatagaagaaaactgtcctagaggcataagctttcctcccgggcaaagagttcatcctctctataaatggcaaaagcatgtcatggtagtcaagtatgaacagcttcttatcctcaatcgcctgcgaaaaatataacaacattaaaggtagaacagaaaagagatgattctctatttttcttaattatactacataaccatagcaatatgtacaaatatcagtaccttttcaacactcattccaccaagttcttgctctagaagttcctttgtgatggcagattccggggcaccgaatttagcagggtctagtttactgagaatgggaaactcctggagttgatcatgaggattctcagaaaatcattcaaactaaactaatttagcaaaattcattagaactagatattaattaccttcaaaagctcaatgctcacaggattaaccccagctaaacactggcgagcgaactcgttatctcgcaaccatgaaaatctgtctcctgaagaaagaaagttaaagtggtcatatatggtcttaagatcacttgacaagcattacattaggaagtacggaagattattacttacttctaataacagcagggacatcatatttgaacaacctttcttgaacactcatgacctgtttcatgaactttcccataactggaaacgtgaaactgacttcattttggtcctcatctttcaagaagaatccatcgttgtatagcttatcaatatcagtaaaacagttgaaagagatatctgaactagaaagtgatgcagctatagatggtataagattatgaagcaaagcttttaatcttccagctgagaaagtgttctgcttaatctcttcaaatgtttcatctcttggtacataaactggatgaggcttctcgattcgagtctcggatagaggatctgttcgaatccaattacaatcacaaaccaccaagattaagaagttaatcttatttatactaaagaaaatacaatgtatatacctgatttgctaggaggcctgcctgttctacacctcctgggatatggtctcttctccccaccaatgactggccgagcaagatctttgttttcaggcttacccaaatcattgtaaacatcatagtcataaatcctatcatggagctttctctggcctttcccattgcctctaatgctcagcaagtcttcacgtctgaggtccttaagccctgctggtgtttgtgaaggtaagtaggcctgttgttcaccaagattgtcattattacgagcccaaaaaaatcatacttatctatacatcaagaaactaaagcaaagaaagtttgaatttttatttgtttttttacttgatttttgaagatgattctactctctggattatcattccgtgaatggatccaagtattggcaagaaagaatatggggcctccatcaaaaccacgaataacaatctctaacaaataaaactcttttccatgaagattggtaacaagaacagcaccagggcaaccaaaatcttttgggacaatgaagtttgctgcaaattcaactatgtgaagatgattcgttggcttaggtaaccaccctcttacactagactgtatactcttccctgaattagtcactgaaaaaaaaaaaaaaaaaaaaaaaaaaaacgtacaaaaaaagtacacaataatgatgt

SEQ ID NO: 187899 - DNA, 3201 bp, Cannabis indica
aaaaaacctcgctcaatttttaagtaactatattaaaccgtcagagatgcttcatgaatgcttaaaatcgttaagaatacttaatttttttcgacgatcttcaacaatcacgtaaatttattagcgatagttttcgaaaaaaattagtttgagacccgactcaatataagcctttttatagtagtgaatatgtgatggagtgattgaaggattatggagtagagtaattgaaggtgatgtgtcatggaggattagagataggttggagagatgtgagggtatatttgcaatttataaaagttaaaacaataaaaaagtagtgttataaatgtaaagttttctagtataaatgtaatattaagccaaagtttagtattttatgtaaaaaatgaaatataaaagggcctttcaaatatataaaaaaataaaaagaaagaaagaatgaaaatgtaggaatgaatgagattgattttaccaaaggtccgataacaatgctccaccaccaccctcacctctcacccttctctctcctttctaaccatttttgcttctcctcctttcccagctcacattacatcccttttggtaatctctctctctctcttttcatttattcattttgctgacatgaattgtgattagttttttttaatttttctaattctttttttttttctgatatttctttggggattgatcattctctagtcctggtaattaaatatcttgtggatcatttactttaaattgtattgtattcatgtttgaaaatgtcatatttttcacattgcttgttgaccaagggaaattaagaacatacaatcttcaatataaacaattgtatttcaattataatttaattggcttagtaattgctattttcattctttaatttctggtaatactaacatgtcttgctaatatttaaatcattctcaagaggtgataatatatgatcccttaacatgttttgctattttcaaccaaaaaagaaaggaaagaacaaacattagtagtatgaaatttacctctagcatctgttttaatgtttatttgatggttcccataaggtagttaattatggttttgagattgcttttgtatgtttctctagtgtttgattaaggatactgcataattcatacaatggctgttaacttcaagtattgggatgactgtgttgatcccctggatatggaagctatgtggaaaatccctgaagtgaatttggaatggttagatgctggcgaaacaaggggacagaaagttcacctttcgcgcgatcctgatggacagccttatttgactcagactgagatgaaggtacatagaaaagaaaattgaaacatgtatatttgtttattttacattacacagctaaaaatctaaacatgtacaattgtttatttgtttgttgaatattgaataataatatattcaataacaattgttaactgcactatgacatatagaaatgaatgtgttgagttgctattattctaaattatgattgacatagacttgagttgcatattttgttattaaaccttacctatctttcatcatattacttttttcaggctgtggttgagattattgtcagcagacattttcatttgcaagtggatcctgtaagtgtttgcataacaaaaacattctgttttttttttatggtttttctgttgttgtttatatgtgaatatgtttcatcactagtgtgtgagttttgaaatttctctccatactcaaataagtcataagtattataaacagcctcctttccttggagaaaaagagagtattctgataggattataaagcttagaacagaacaatagaacaatagaacctgaggtgtgagagagaactcaactctcccaagagccaaagctcagtcccatacaattttcataccccaaccattccatcccatctcctatagatgctctgctcaattcatagatcctaggtctccttacaattactcatttaccttctttatttattatgcgggtaaatagtggcattagtacccaaagttttaattttgtaagcggcataaacccaatgatttttttagtggcataagtatataaagtttataaaactgtaattttcctccagtttcatcagtacaacctattattgttttaaacagggcacatataagggttaggttctatattattgggtctagatagaaatatgtagtatcagttacttccaattcttcttttaataaattcaaaacggggtctgtactaataaaaatgaagaaaaattacaattttacaaacattggatacttatgccgctaaaaaaaatcatagagttcatacagctaaaaaaatcattgggtttatgccgcttacaaactcaaaactttgggtacttagcccgctatttaccctttattatgctaaggcctaacatattcatattatatgctagaacacatgaattatctgttagtcttaagagttcatttcttagctgatgaaaatccttctctcttaattatttattagaatgacagataattttttaaaaaaaagatattaagtaatgactttctaagattcattcactagtctatagagcagaggagtgaactacaatcgaggacttataatttaagagacacattcagagatttgagattatattttacaaataaaagaatttcttatgttgcttttgatcattcttcttaatttatgttctttgaggtgttcagttgttcacatggttttgataattcaagtttatatgttataacactatgaaacagaacatgatttgtgccattgctgagctcgaaagtgacagacaacccctttctatacggtatgacaagaaatccaaggacacaaaattaggaatcatgcaactttttccaaaaacagcagaatggctttataggtacatatcaattacacttgacatgttttaccacttattattattgtgttggaagaatggagtgatagtagagagtctttgttactaatttgcagagaattgaattaccagtcttatgaagtagtagggaatccagatcttctattcaggccttttgtgagtgtatattttggtgctgcttatctgaaatggttatcaaattttgaagagaagtaagtttcttggtacatttctttattcattttcaatagtttccttattactccccttacatccaca

SEQ ID NO: 187900 - DNA, 2242 bp, Cannabis indica
ccactcccatctttagccacaatcacgtccggcttcaaattttccttagcatccaaagcgagaagcctccgaactccagttgcaatccaggggctagaaccctgatcaacttcgtgattgggattttcaaactcaagaagtctcctacggctaatgttcaagtccgcgaaaaccgaagagatctcagaaaccatggcaagagcattactactcaaacgcattgaagtcttcaaagccttcttcatcttctctgaagcatctccagtagtattctcgaaactatccaaacaagtctcttggtacgtaacggttgcactaatccatatctttaagtccataagcatctcatcaaatttagtaatgtcaaagtcactgatcttttcaaccgatttgtgaagctcgtccattgagttatccatgagctgcttgcaaagacctagagctttggaagttcttgggtctttctctagctctttcaatgtatcggatttctttgcagcctcgttgataaacttcttggcgacgttgaaaccagcttggatgagtttctttggatcggttgtgtttccagcctcagaacccaatgtcttcatacaatcttctttgtaatcagttggtgcacaaatggctttgattgctttgtttgaggatgaaatatggtctttgctaccgttagatggacttgaagattcaccattgttaagacttactccaacagtcactgcaatcaccatggctaccaataagaaggaagacacaccgataactgcatacctctttctcttaccaccatcatctccattgttgtacgccataatatttagtttttgttttttatatttttatatgtaatatatatatgtgttatatgtaattaataataatgagcagctcttcgacacattaaagggagccaaaaatgaatgtatttttctccttttcttcgtcacaaaaagcgttctctctccctctctctatctcctccctgtgaggccaaagaaagctgctttattatatcgtagtagagagagaaggttaaattatcccttctttttttttattatattgaagctttagatagagctatagcccagctctctcggacctattgatgtatgaatgttctgggggtttgatttataaggttgatatgtgatgatatgattaaattaaggtataatagacttaaatgaatgaccatatacgattgggagattggagtgaaattagtagaaaggagaggacgaacgagaagatagggtatattggtttattactattattgtgtttttctatataattttgaggtagtagagagatttgaatcagctggccgaattaatggtcactttttcctccacgcaatgatattaattaatgtcttaattaatttatttcaccaaaaaaaaaaaaaagaacgtcctaattatagatatagatcatttgtattcacaattcacaagttgtactccaaaagtagggtctcaaatatttgattctagatgcattctatttaagtcattaattgcgaagattgatttttggccaactttacaaacatatacatatatacattacataattacaagctaaataacaagctaattaatattatatatggtaaataaaatatgatccgttaaagatatattataataaagttatttttttcctattatataaggtacatgtatgttagtaaaatggtacactgtttaaaccaaaaaaaaaaatgtatgtattacttatgtatatacataatgatagtattatttgaattttggatttattttttcactgagatggctaaatatttattttatataaaatatagttatgtaatagaatttttaattgaatggagtgttttgattttctaccttaactttaacataatatcctaattatttaagagaatattctttattaattttataatattattattttgataaagcaaccattcatattgcacaaaacaatctttttttacaacctagaagcaccaagcaaatatgcaaggccttagtattctatacaaagttatttacaaagtgttgaaccaatcttcatcctttttggttactttttttggctatacaagagttattctttgtttcactaccactttaatttggcttgtcacttgggttgttatcattatcttttgttgccatattgcctcatttctacctctccatatgttgtacaccaagcttgcaagaccagcagccataacttt

SEQ ID NO: 187901 - DNA, 2214 bp, Cannabis indica
ttttctttttttctttttatttgagtgtggttagaggatccaatatggcctcttacaggcctttccctacgcaatcgtctttcggtccgccgtcgaaccagaaccctccaccagcagcagcgccactacctcctccttcatcatctcaacagcgcgtaaatcagtataacccagcttggaattacagtggtactgctgccggtggcaatggtggtgatgggtctgttccatcagccccgtcttattttcagaacagtgggttcggaccttcaacttcatcacaacattatggtgctccaagaagccaacaccctgctcctccaccaccccctcaccagcagtacgcctatccacctcctcctcctccgccggattcctcgtatcctccaccaccaccgccaccagcttctcaaaattcgatgaacttacagcctccgcaacctcctgcgtactacccttcttcacagttttctcagttcaacaatcaacagccaccgccccctcctccaccaccatcatctccacctccgcctccaagctcaccaccacctcctcctccaccaactcagagcaaagagaatggtccagatagaggggttcacaaggaggtatcagcgtccgggaggcgagaacatgggcaatcgaatcacggtgttcctcataaacaacagaaatttcctgttccttcagtgccagtaaagaaagcaaatgggccttcagggagagtggaaacagaagaagagaggaggttgaggaaaaggaaagaatatgaaaagattaaacaagaagagaagcacagacagcaattgaaggagtcacaacactcagttttgcaaaaaactcaaattttgtcttccgccaagggtcatggttcaattgcaggatcacgaatgggagacagaaggggtacttcattcttaagcaatgaaaggattgagaataggctaaagaagccaacgacatttttatgcaagctgaagtgagtatgctcacaaggactaacaccatcgattttttcccttccttattcgttgtttatgttcttttttatcttctagtctaacatgtatttaatgaaacgtaaactttttggtccttgaaggttccggaatgaacttccagatccaagtgcacaaccgaagctcatgtctatgaggacagaaaaagatcagtatgtggttctatcttataacataatttgggcatgcctgcagttgataaattgagtagcttgagttcttaatgcatcacttgccaaaaggcaagtgaaggaattcgtgatagaagtttctttcgtggtgtagaatatagatgtcagcatgtgaagtgaaatctatctcaacatctataaatgctttttctcacttgaagatctcaacctagttggtgcaatgtgacaatatttatgttcgcgtgaacttatatattcattttgttttgcagatattcaaggtacaccataacgtcgttggaaaaaacatacaagcctaagctttttgtcgagccagatcttgggatccctcttgacctacttgacctcagtgtatacaagtataattcttaacaactttgaattaataaaccttcaggaattaggggtgacaaatctgattttgtattttattggattgatcagtcctcccagtgttagaccaccccttgatccagaagatgaggaattgttgcgtgatgatgaagcagcaacccctgtgaaaaaagatggaattaaaaggaaagataggcctactgataaaggagttgcctggctggtcaagactcaatatatatctcctctgagcatggaatcggcaaaacaggtgcactatttcttaagatttttgtgtcttttaactctctgaaagaattttattacacatatgtcatgactcatattgctcacacatgcagtctctaactgaaaaacaagcaaaagaactgcgagaaatgaaaggccgcaaccttttggagaatctcaatgacaggtttgcttgctcttatattgctaatgtcaatagttaatttcatgagataattgtaaaagtaacaccagccaaaaatcttgcactcgttttattaactttgtgagtcgcttttcagggatcgacaaattaaggaaattgaggcttcttttgaggcatgcaaatcacgccctgttcatgctaccaataagaacttgtatcctgttgaggttctgcctctgttgcctgattttga

SEQ ID NO: 187902 - DNA, 3571 bp, Cannabis indica
ttttttatttttttaaaaaagacatgcatcagtattattattattattattattttgaaacgtgcatcagtattattaaatatacctataataattcatataatccgtactttaatttttgagaagaaagtgtttagcatcactgattatgagattgtaaaaattaagaaaattttggtgaattaatgaaaagtaaagttatgtttttgtagttattcagtttgcttaaaagaattgtaatgaggtcacatttatttgtgttatatattttaatttaatttttcacggtaataatattttaattatatttttaaaattttgtaagtatttggttcaatttttaaagtatcaatgttactaaattttggttttttatttaaaaattaatttaaaatttttaatcatactaataaaaaaatgacatgtgaataatgacttaagacttaatgatgttctagaaaaaagaaaagttcccaataaatagagatgagggagtttattgaagtggattaaaacaagcaaatcttaatcaatgacaatatatatgctcactcataataattatataataactttatctcaatcaataatagatacacataataacacaataaagattacatttttaatgactctgcaatcttcttagagatgcaataagcagtagattcaatagtgatcattggattaaccccaatagctgttggaaaaacactcccatcacaacaaacaaaccttcagcttcccaactctcaccattttcatcaatagctccaactttttcattggatcccattctgcaacttcccatttggtgagcggaacagtaaatggtccagtaatctcctctgctgctaggaccaccaacagcagtaactgagtccaaaaactcttcaaactctttatctttaatccctttgcactttattttctgcccatcacttctgtaggtacccacttcaactgcaccagctgacaccaagattctcaatgcctgccttagcccactttggagattgtctttgtcaactttgctcaatctgtaatcaatcattccttcttctttcacagttccagaaccttcatctttcacaagtgaaaacaagtgagctgttcttgaatatcttaacatcttatctttcatgtcagctcctgagatccaaggaaacaatgctgcaaatgaagcaggtcctattgcaggtgtttctataattgcccttgttgtattttcccccgaaacaactcggtggagtgaagtaatgattcctccttcgttgattttgcctttgaattctgtgttttcttccgggaagtagccccaagtgaagaggacagggtggaggtgaaggtttctgcctatgttttgattcttaagaccgctgttgatcagcagaggaggagttgagagagccccacaagctgaaactgttactttcgattcgatttgcagcttccttgtgattttgttgtttaaacaatttgcaatcactccaacacatttctttcttgttattcccttattagcattcttttccaacacaagtttctcggctttacatcctgttaagatcaccgcgccaccacactcaactgcatcaaccaaccaagtcgaatcagttccctttttatcacctgttggacaaccataacagcaagaaccacaataatgatccggggatgagtttcttggaacagaatcaacttttaggccaagattttcacacccttttctaagaatttgattttgaaaaccctcttcagtacaattgttagtaacaccaattctctcacacacaacatccatagcggattgatactcagagctttcaaaaaatggaagcttatgatcaactgaccactcgtgcaaaacattactcggtgttcttatagatgcagaccaattaatcgcagaacctccaccaacagttgagcctgataatatcatgactttcccatccttagttgataaaattccactagattcatacatttccctcattgaagggccctctaaagaagagtaatcttgtgaaacaaaatagttccctttctcaagtacaatcactttttggccagacttggctagaactgcagctgcaactccaccacccgagccagaaccgatcacaactacgtcacatttgattttgtaaacgctattatcgttgggatcttcggtaacttcaagtcctttttgtttgagtgattgaatgagagaggaatcagtttccaacatggtttcaatgaccccattttcaagtggcctctccttatgagttttagtcacatttttcttggtgtctatgtgataaccaattgcttcccatgttgggttttgtgagttttcatcaacctagaataggagtaaagattaaaaaaaaaaattgataaagattgaaactttgaaattgaatggaacaaacaaaagttaatactgtccacaaaatgttattattaattactctactaataatttcaatctattatgaataaagttttagactttgctaaaaaataaatggttttcaatccctttcaagagtagggaatacaaattattaccctacatattcactataaaccaaccaacctaacaacaactattttaattgtgaattaagtcaagattatttcatctaaatggtataatataatttgcagaataaataaatacaggagaaaaatatatttaaatatataaaatcaaaaactcaagtaacatttatttaagaagtgaaatatagggtaacaaaattggtttatcctttccacttaccttcaagtccacaaaaagaatattaagtaattttaaaaagtagtttttacaaaaatattatattttggaaaaaagtacaattttaggaaattttgtacaaaaaatactgttttttttttaaaacaatagtgaaaaaatacagtatttttttaaaaaaagaaattagaaatttataaaaacaaaaagtaaatactaaattttcaatccaaattgcaaacaaatttgacactaaacctatacttataccgaattacaaaattgcattaatttatttaccatattttttttttactctttagtcctagaaaagataaattagtaatttttttaaaagaaaggtttatttatttaccatatttttttttgaacaatttatttaccatattttagaatgcatatcaaataaaataaaaattggataatggaaagaaagagatatacccttgagaagaatgtgtagaagcaaaaaagtttgatcaaaacaaacactaatcttagaggtattagtgttttttccttagaccaattcttgagaatttgttctctctttcccactgaaatttcacaaaacttatgaataaatggccatttccaatccaaacaaagtttcccacaaagcaacaaacttcccaatctgaaagacagaatctttagtactgtcctcactaaactcacagcctgtggcagagcctttgtcacagccaactgtcccacctgttttctcaatcccaaaaaaaaaaaaaaacagagaatgagaattctagaatccaccatagttaaaaaaaaaaatcctac

SEQ ID NO: 187903 - DNA, 1134 bp, Cannabis indica
gtgattagggcaatgatagctgcaatgaaagccaagggagataataacaaccaatagagtaccttatacaagtcgatttcaactagtttaacacgtagatgtttctccaaaacttcacggataacagatttctctccttcttcacgtagcctctctgccaaaagataatagccatctcttgccagatcatcataagaacaaccctgacctattctaaaacgatcagcccagcgaaacaagtcacgtggagttatgtaaccatgttttccagcaaacaccttgcttctctgcctattcaattgcaactccttcatgacatcaaccattttcttagcataactttctggaatcttacaccttcctgttattatggtgcttaactcattttctggaatttcatccacatggatctccacaaaacgattcctaaatgctcgggaaagcatttttcggccaccatagacagtaggtggattctgagtagcaaaaagcataaaatctggatgtgctctaatagtttcttgcaattcaggcacaaaaagttctctgttgtcatctaacaatcgattcaatgcctcaagcacatcagatggagccaagtttagctcatccagaacaatccaacaaccatttcttacagccctaaccaatacaccttcatgaaatacaagtttccccccagcatcagttatataagtacctagatactcctgcaaatcagtgtgttcatgattattaattcgaacaaactcgtgaccagttatagctgcaagataccgaacaaggctagttttcccactagatgtgggtccctgcaggagtacaggatatctttttaccaaaatagcacgggccacaatacttagattttccctgacactcttagttaagatataattctctgtaaagctatcagctttatcaactttagataccaaataatcatcaaaaggtacatgtggaatcttttttcctgccatcaatttagacaatatcttcttatccatcagcatggcactaggtctatccaacaaagtctggaaaaacatacaaaatccatcgtacaaagctttctgaaacccaaaagtttttttggccttccttgtatattctagagcacggtacaatgacctt

SEQ ID NO: 187904 - DNA, 1782 bp, Cannabis indica
ataatataatacaacacggtgtattaaacgagcccttactgtttaattccttttccttctttttattttagttaaggtggcttgttgatataaaggctttgtttcttacactgtaggctatgccatttaatatcttgtgggtgcatgagttggaagtgccagtgtttggatcgcttgccatgagttctctgactgggaatagtatgtttttcaattatgtgactttcatctagttattgtgtttgtatctttgagaaatcctgtcgcacaattttatgtagtttaattgttagcccttttgatgtgtctggtctctcattgaaattctgtgatatttttttgacaaatgcagtaatatgttgcttggtggatgggcgtgtaatagctttggattcaagtggatccaaaatttggaaggtacaatacaattctagttgtttaaagccaaattttaaattctactttgttagattgacactgcaaacatgagttttttaatctgctgaaagcacttgtttatctatcagcattgcagccctttgggcatctatcactgcaatatattaaacacttgtttaatggatttttattttacaatgaaaagtgttgtgtactagcttctccatcgtcaccattttttttttcaaataccagaagaaaagtgtaagaattaatatttagttttatctttctccgagaattaatatttcgttttatctttctctggtagcattttattttacatactgatatgtaatgtgtatacataaatataggaaaagaaattttgtgagagcatcaattttgctcatatcttaggggtatctcttgtttttggtatatagagaaaatataaactaatttttttatatgatactatacattatagttatactaagaattctacctgttttcggaaaattttgaataatttatgggttaaaaaataagattcaaacatttaattgtactcgtatctattttattttatacatgtgcaaaagattattttgaattttatttttgatttcgaaagatattcaaaatttctcgaaaacggatataatatctattataactataataattcatacaaaaagtaggacaatttcttaaaatacgaaaaataagaaatgtttggagcaaaagtgatcccccagctccctatgtatatatttacatatataaatgtacttgcgtttgtgtaatctaggagttgttacctctttacaccattccttaagttcgcatgtgattcattatttttttgattgaatatttgatcaaatgtattagatgttatgacatctatcaaatccaattcctcgagatgatctgtaggaaatttatattaccatctaaaacttttacatgaaaagaattttctaatacaaattgatttagcatggcatgtgtacgagacatgaaagcttgtggtttgatcgtagggtggaacgaagctactcgactgattttatcgtgcactgattttatcgtgctttctctccatacttattttttgttagactaattaaagttctatcctattgatgatgtcaatgctcttatttcagtgtaaaatttccggtccaatatttgctggagccaccatatgctctgctcttccttctcaagtatgtttttaaatttccttcgacaattttttttttttttggttagtgatctgaatcacatgaagacaaaaacgtggagggactttaaaagacaagtataactgaataaaacatgacattaaccggaaaaaaaaaaacagaagaagaa

SEQ ID NO: 187905 - DNA, 2440 bp, Cannabis indica
aaaatctcatcaaagcatgggtgttttttgtccaataagtttgtacagtgtcatataaaaactcatatcaaagatggtggttatgagatttaaagaagcacttccttttgtagtctctaaaacacaaagtgatttcccctccaatatgcttatcacaaacaacatcctggttgcttttgaaccaattcatcacatccaacataagataagaggagcaaaaaaaaattttacaatcaagttggatatgagtaaagcttttgatcgtgtggaatgggcgtatttatgggcagtaatgcaaataatgggtttcaactgtaagtgtattgccttgattcaaaactatatgtcttctgcaagtttctctttctcgctcaatggtgaagtactgtgtcatgttaaatccactagagacataagataggaggatcctttatctccatatctctttttgatatgttctgaagggctttcaagactattacaatatgaagaagctattgggaacctccaaggacttcggttcacaagaagagcacctcagtttctcacattctctttgccgatgatagcttgttgttttgtgagaccaataaaacttttattttggcaattaaaagaatgttgaatatctatcaccgtgcttcaggataaatactcaacaatcaaaaatcagttatgtctttttcacccaacactccgattgcagcgcaaaggtttttcaatcaagctttgtaaatgtcgattaatgaataccatgaacaatatcttggtttgccttcttactctagacgtgacaaaaaggagctattcagtaatataaaggagcaagtttggaaattaatgcatgcttggaatgataaactgttctcggtgggaggaaaagaagttttactaaaagtagttgttcagtccattccaacacatgctatgagttatttttgtttaaccaaaactttttatcaacaacttgaaagcatgatgaaaaacttttagtggggttctaataaagatggaaccaaaattcatcgaaaaagatagaatctactatgtaaatctaaagtggagggaggtatgggattccgatcttttgtgtattacaatcaagctttcttagccaaacaagcatggaggatccttgaaatgtcaaattctttagtcgtctattgaagtgtaggtattttttaaacaactcttttctggaagcaaaattgggacactcgtgttccttaacacgacaaagtatacattgggggtagagagttgctttctcaaggacttcgatataaaataggtaatggttttagtattcagtgtgtttaaggataaagggataccgggttacacagaatataaaccactagcattcaatgggccgcctcactcctgattgctcatttgatcactactgaaaggcagtagaacttggagctgcttcaaaatttttttgggcagttggatattgacagaataactactaccccattaagttttttcccatctagtgatagattaatttggtactagacatctacaggcatatatacggtgaaattaagttttcatttggcagcaagtatagatgaacaacaatgttcttcatcttcatattcacaaaaaactagtggaaaacattttggaacctgaatcttccaatgaaaataaaattttttgcttagaaagctctgcacaacacccttccaactgttgctgctcttcaaaagagaaagatcattcattcactaacttgctctttatgtacaaacacatgggaatcaattgggcatgcttttttctcatgtccacacgcaaaatcagtttgaaaaaaatacaaagaacaccatagattttcgaaaagctcagcatatgtatagtggtgactattttattcatctttcaactttgcatttccaaactgagtttgaacttattgtttgcatcatgtgggctatttggacagagagaataaggtagtccacggaggaaagagaacagatagtacacggactactgccttcgccatgaactacatcgaaaaattttattcctctcgaaagcgtcaaaagtaggagactactttgattgcatcaggtccgttacaaaactcgggttctactagcaacccaactgaagggataccatggaagcctccaaatgaaacgagaatgaaacttaatattgatgctgctctgaattcgactttaaaaactctgggtgtaggtgcgattgttcgagatcatcaaggtcgtgtgattgctgctctctcaaagctagtacaagattattttcgtttagataaaatggaagttaaggccctttttcatagccttaattaggcgatgcaagagcaaatacatattactcatatggaaacgaatgcacttagagtctctaatgctttgaattctagatcgaccaatttatcgtgtttctcgaatttaat

SEQ ID NO: 187906 - DNA, 2245 bp, Cannabis indica
aaaaaaaaaaaaaaatactaaacacaaatcccaccatcaaaacattttcttctcaactcaaagactcgtcctttaccttttaccaagaaaaaaaaaacacacaaacagccaaaaacagtaccacacacactcctactcctactacagtctcttctcctctctctctctctacctcttccccatcatcaaaagtccccctaaaatcacacccaacacttcacatacaatcattctccacttgggtttcgcttatccctttctaaaaacctctcctttttcatctctagccgccaccatgcaagccgcattcctagctccctccccacgtctcaccctaaacccacagccacgactccctttcactgtccgggctgttcaatctccgccctcgatcgccgtggaatccccaccgacgaagacccagaagctcaacaaatacagctctcaaataacggagcccaaatcccaaggtgggtctcaggccattcttcatggagtggggctttctgaggatgatatgagtaaaccccagattgggatatcttcagtttggtatgaaggcaatacttgtaatatgcacttgttgaacctttctgaggctgtcaaagaaggggttcaagaagctggaatggtggggtttaggtttaacactattggagttagtgatgctatttctatggggactagaggaatgtgttatagtttacagtctagggacttgattgctgatagtgttgagactgttatgagtgctcagtggtatgatggtaatatatcaattcctggttgtgataaaaatgtgagtaaagttccttcctttatgttttgtgtcaatgattttggttgtttcaaagtaatgggtgttaagtgtttaggatttcttttggggtttaaggctttatttttatggattgcatttcatactttaatacttacactatattaaagtcctacattggtgatatatccctaattttgcaatgttgggtgcctctaatattgatttgttcaaagtagtttggcatggtatcaaagtcccacattggcttcatatagacttgattcacttaataaggtgagagcaatcatcccctaacaagccgggttttgttagggtgagttaggcctaataacttttctaatagactatgctagagttactctgagtgatattagtatcaatgatataattggttaatattttagaggctgaattgtcaagtcctttagtggctgagatgatgttgtgtgttaatactagatttctattggttggctagttaggagtcttttgttagtctaggcctataaattctaagatggagtcttataagatatggaattttgtgtgaattatttagagtaaaatattgctataggaagataccaaactgccttgaaagtttggaaaattgtaattctttctttgatatcaataaaatgcctattctctaattctttcaagaactgaattggatcaatggtgtatcagatgcttgatgcttggtgttttagttttacttgtagattttgtgaatcttatgctagtgcttttcttacagatgccaggtacaattatggccatgggccgccttaaccgaccgagtatcatggtttatggtgggactatcaaggtttgtaattcctatttatttggttgaaaaggcattccaatattgtaatatattaaagttgactatgctttttattgatgtatattctagcttaacagaggttagcatttagtaaagcaactaactatttgtatatctcgcttcattgttttgcagcctggtcactttcagggtcatacttacgatatagtatccgcctttcaggtaagcacttgatgctgtgctttggaattggatggttcaaaacattttctaagatagccgattttcatagatcatgcaatttgttattacctgtgctgttgtcattcatagtgacaacacatggaatagtagttttttacttattgatgttgatatttccataatgtctgattttgtatttttgaaagttaagagaacacctctaggagtggaagtgtttgctgttctgattttcgcaatgtctaaagcattttggaaagttgctagaccttggttgtacaggattgtagggagaaaatatattaaaacaattggagatatgaactgcagattgggcaggcttagataaagtgtagcctctatttttcagtacgccgagcttcctggaattggctctcaatcatctt

SEQ ID NO: 187907 - DNA, 3493 bp, Cannabis indica
tctcagcacctggatagttcaccttctggtcatactagaatagcccatttccttttccagtttcttctgtatctagttcccttcctgcttcagtaacggtgacagctgctgcaaaaggtccctttcttccacctgaggacctattacggagcaaaggggagcttggttggaagggttcagcagctacaagtgcctttcgtccagcggaaccaagaaaggttgtagatatgccttttggtgctgtgaacatctcacatcctgaatccactggtgggaagcaaggacgccctcctctcgatattgacttgaatgtacctgatgaaagacttctagaggatatgacatctcggtgttccgcccatgaaacaagttctgcatccaatgcaatgagtaaaagtggtcggacttgtgatcaatctacaagtgcaacaccttttcgcagttcaggaggacttgatcttgatttgaaccaggctgatgagactttagatatgggcagtttcacaatcaacaatagtcgtcgaacagagattccaagtttggtaatcaattcttcatctagaggtactttagatggtgatgtaggtgttcggagggattttgatttgaatgatgggcctgcagtggatgagatgagttctgtaccaacacattttagtcaactagccaagagtagggctctatcccaaccacccgtttctggttttaggatgaacaatatggaagttgggaacttctcatcatggtttcatccggggaacaactcttactcagctgtttccatcccatctgttatttctgatagaggggagcagcctttccctattgttgcagctggtgggccacagaggatggttggtccccccagtggtggcaattcgtttactccagatgtttatcgaggttctgttctgtcagcttcaccagcagtgccttttccttctacctcttttcaatatccagtcttttcatatggaaccagttactcgatgcccccaagcgctttcactggaggtccaagtacgttcttggagtcatcttctggcggaagggtttgcttccctgctgcgcatccacaatttttgggaaccaatgccagtgcggtttcttccaactacccaaggccttttgttattagtctcccggatggtagcaataatagtagtggtgagagcagtagaaaatggggaaggcagggtttagatcttaatgcagggcctggaggcccagaaatggaggctagagatgaatcttttcatcttgcgccaaagcaactgtcggttgccagttcgcaacacctattggatgagcaaatgaggatgttccagatgccaggtggcactttgaagaggaaggagcccgacggagggtgggatggcttcaagcaatcgtcatggcagcagtaggatcgtgtgttagggattctggtgacaagaaacttgtaagttgctatatgtaattcttactgcagtgtgcaaggctgttgatttaatattttattgaatcagctgtcaacctcttgaaattgtctttagtcaaataatataatcatacgaagctttctttactgtttctccttgattggaattttctttagcacagcccaccacaggactgctttttttgttattggttgattctgatgattacaattgacttgcagcctttctgtgattgtaaattctggaaaggggaatgaatacatagtactccttgtttggccctagattcaacatagatttttgtggataggaagaatgtgggactgaaaagggaattttagtaggaaataaatgagagaagtcaagaccattcaacaatttattatttccgttgacatgtattagcaaatgaggaaaatttcttttctttctttctactctggttgatatattttattttgaactcaactgcagggtttttttttttttttttaattattgctgaatcatgcgcattctcctctttcttgtacatccaaaggtttttcatcttatatttgggctgtttagtctttcgtcataatttaacacttcccctttagatcttttaattactggttgatgtacttgaatcttttatttttcagtgatttgaggatgaccatttgctaacccctgaggtcatcatctaacttgtgtgcttcttggggatgggtggtaagtgagttatttgatgttgttcctagtctctgacccccacctctttgctgtatcaattgtatctgaagggaatttgtttgggtcgacaagctgttgttccttaaatttgttatgggtggctgcagatcagtgtcccttttgtagatatttaactgttcgcacacatacactatttcctaggaatctcaagattggtgctcatactggttttaatgcttcaacttaatatacaattggacccaaaagtatgtccattctcaaccctgccaataatggaggttggattgtttaaatatctttacccaaaagaaaaacacccatctgtatgtgttttgttaatttattctcttagtatcatataaatatacatatttatatatatataaagcagaatggcgatcaaattttggctccctagcttttcttgaccatgcagtattctgttgtattctttcttttctaatggtaacctcaaatacggactaatttgtagttttgatctgtattttatttatacttgaatccacaccttaagttggtgtttgctgatgctgattgtttctgtggtagcactccaggagatgattgattcagggaaaaatgctttaaatgctttaaatgatattgtattatcatcatttaaaaacgtcttgtcaaattatgaaagttcaaattaacttcaatgagaggacagagggcttttcgtttaaaagaaatagcctcattctttacagtggactactatatagtatatgcaaattataagttagtgtctacaaaaatatactaatttttccaaagttctgtttttcttgatacgagctcaaaaaaaaaaaaataaaaatgaaagctgggttggtcgtggacgataaaagtcacgttttggcaagcaagagctgtgatgatgatacatctttcatttgagacaaacgaatttcctcccacatagtatatttctgcattccaacacaatgggatagtattacactcagcaaaacaaaaccaaagcaaaattctaaaatagatagatcatgctaataattaatctactttgataatcataatacacgtatacaaacgatcttgtataactaaacaacagaacgtagaagaaagaaaatacatacattaggcatcctctacgttgctttttcttcttctctttctgcttttgtggtggctttatgacaactctgattgctgcatcaaaaacggctttcacgttctgcaattgcattcacatgggtcatttacaaaattaagatccaaaaagtaaggaaaaaggaaattccatatcttgtacagaggcaagggagagagagagagagaga

SEQ ID NO: 187908 - DNA, 2911 bp, Cannabis indica
tttagattccccaataccaagtcattttccacagacccatcatcattagactcaccccatgagatttcccagcctattgatgcaggctcttccatcagaaaacccatcagtttatggcctggaatgttcaattcacccgttacaaatgctctctgggaggcgcgatccagcatgtttgagaaacccggcgacccgacggcggatcatctttcgcagagcgaattggtcgccaaaactccggcacagagccggaccagtattctgtacaagctctcctctgattatgcactcaaggaacattatagaaatccttggaatgagatcaggattggaaagttgctagaggatcttgatgctcttgctggaaccattgcatttaaggtataaagattgtattttttttctcccttttttcttagccaggctcaaggttggggttttgattacagtattgccctagtttgaatttgaattctgtacaacaacattgttgcctattttgattgtgaaattctacgtgttggcttgtggaccagcattgcgccaatgaagatggcattacaaggcctctaatattggtgactgcttctgttgacaaaatggttatgaagaaaccaattagcattgacactgatttgtgtattgttggtgctgttacatgggttggacgatcgtccatggagattcaacttgaagtgattcagacaacatatggtatcctggttaatacaatatcttgttttgattcacaatcaaaaggactgaaatgttttgtcactgttttaggagaagtagaagaaaatcacactattattcctacgatttgatttgtgcgtcagtgtcattaatcttagctttcataggtacctgattctgtttattcatgattatcaatatcaagattgtttgtattgcagaatccccagattcatcagactcggcttctcttgtagcaaacttcacatttgttgcccgtgattcgaagactggaaagtcagctgtaataaaccagatttcacctgaaactgaagaagaaaagttgctttggaaagaagcagatgaaagaaacaaaatgaggaaaaagaagagagaaatgaaaaaagacttggagttagagaagcaacacaatgagaggctgaatgcattgttggcagaagggcgtgtgttctgtgacctgcctgcccttgcagacagaaacagcatccttatgaaggatacttgccttgagaattctttcatttgccagccacagcaaaggaatatcttcggtcggatttttggaggattcttaatgcgtagagctgttgaattggctttctcaacaacatattcttttgctggtgtggtaacacattttctagaagttgatcatgttgatttccttagacctgtgagtatcccttggagcatgaatgacatcatatcatttacttaaaaataacagatagaattgcacattaccatattatgcctacttattacgtactaaagatctggtttggttgattttgtattaattatgcaggtggatgttggagatttcctgcgtttgaaatcttgtgttctgtacacggaacttcagaaccccactaaacctctgataaacgtggaagttgtagctcatgttacaaggcctgagctaaggtccagtgaggtaagcgcaactttttgaaatgaaatcatgttgtgaaaaaaataaaaaaataaaaaacaaaccacagaaattgagtatcactgctagtgttgttgtatgtttatatataatattgattttgttttgttttcttattctacaattgtgttaataggtatccaacaaattctattttactttcgccgttagaccggaggctgtgaaggacgggttacttgttcggaatgttgtgcctgctacagaagaggaagctagacgggtgctagagcgaatggatgctgagactcctcaaccatacttgtagcctctcatctcatctcatctcatctttcccaagaagaaaatgaaaacagttgatgcaagtagccaattgtagcctctcctctcatcatcaaaataaataaaaacatccacttcagttggtccacagttactgatatagaacggcaacttgttcaaatttgcttcattttcttgtttaactctttccaatgatacttgtcaataaaaaacctcatctttttaatgataatagaaaatctaatgatgattactaattactattatacaggattgacaaaatctcaaaatcgttttgactgtcacatatataatatttataattacaaaaaagaaggtaattaacgtgtaaaatccagcaagctccattcaattcacaccccaatagtacttgaaaaacaacccagtgacactgaaaagagaaaccaactcttgaacaaaatcatccgctatgtgtctgtgaagaggacgaggtttcatcgtctgatgatgatccgaattgttgccttccatcgagtccggggaagaacggtagaactgtaagatgtgtagcatttggaaactggcgaactaaacccactgtacttctctcattaactttgcctacttctttgcacacctgatccaggattgcaagaaagtccctcacaaccaagaatattcgcagtggacgagcttcttctttagctgagttaccatgaaaatactctgttaaatctttcactagggacagggcaagtttctcttgcctttgaagcttttctatctcttgcactgctctattcaagaatccgttcatggcctctgagaatctctggctgctttcctttagaggaaattcttcattcgatttcaacacttgtgccactctagtaattcctccagtaagttttgcaacctcattgctgagtacatctgaatccatggcagctgctttcttaacattactgagctccc

SEQ ID NO: 187909 - DNA, 5058 bp, Cannabis indica
aaaacagaaaacaataccaaacaaatactttttgttgttgttcttgttcttcttctggttcttgtttttcttcttctgctattaatgacccatttgtagatattcttcacattaattggcttccctttaagcttaaaacctttagcttttctcatcatgaaattgatctttgtttattagaattagggggtaactaaattgaacacaagtcaagtcaagtcaagtgaattgggttttatagaagaagaaagtgattatattatggtgagtgactgccactggcagacagggacaaaggaattaagatataagttgagacagaattttgatttggttcgctttgttatgagaatacaatcaaagaatgaagagagaagaaccttttttaaaccacgtgtgtaaaattacaaaagatgcacacgcacacgcggttgtatttttatattatatgggttatattatttattttagcttttaaaaaagaaagtgtaagaattgtatggtcaaatatgaatatgagatgtttcttgagctagaggctatgagttaatctgggtggctctttgggggtctaaaatgtgaggacaacctttgccacttgatatttatctcataggtactcagtttatgagattgagagagaagagagaaataacagaaagaagaatactctgttttcattaatgaaagtgtacagagtacaataagcaagctatatatagcttgttgatactagatacaatttggttactattatcagtaactaacaactaactgattctaattgagtctacacctaacaatttgtctaagggattctaactaactcgttcagcttctcaacttgatactcctcctcaagatggatggtatatgtctaccactccaatctagtcctttaaaacattaaactgattaagtaaaagtgcttttgtcaacatatctccaagttgatctttggtggagacaagtaaagtttgaattaatccttcttgtatcttttgtctgatcaagacagtcaatttcaatgtgtttcgttctatcacaaaatactagattagctgcaatatgcaaagcagccttgttatcacagaacatcaaagctggacctttctgttctatcctgagttctttgagcaatgacaacaacacagtatttgccattaccctatattctgcttcagcagaccttgaaaccgtttgttgctttttgcttttccatgagatgattgaatccctaagaaaaatagaaaaccctgtagttgatctcctagtatccacacaagctacccagtctgaatttgtgtaggctttgagcaatattttgatgttgcaagaaagagaattccttgccttggacttgacttaacatattgcaaaatcctttgagcagtttggagatgtctagatctaggagcagtcgaaaattgacttagtttgtttacagggtaggctatgtctggcctggtgacgattagatattacaacttcccaatgatctttctatataatgttggatatgcaaaatcatctttttcatcttgtgcttcatgtgacagtttcaaatttacttccatgggtgtgctaacaggtttagatcctaggtgtccaagttcttcaaggaactgaagtgcataaggtctttgtgtaataaagatccctttactggacctagcaacttctagtcctagaaagtactttaagttacccaaatctttaagtttaaacctgttgttcaagctgttttctagagcttccaaaactccaatattgttacttgcaagaataacatcatctacataaaccaatagaatgatgaaactttcagaagagaacttcatgaacatagagtgatctgtagctgaacgagagaaaccttcttcaataagagcagtggagaatttttcaaaccactatctaaagtcttatcttaatccatatagagatttttttgagtttgcatactgcatttggtggcaatttggtctccaacttaagactatacccaggaggtagactcataaaaatatgttcatgaagatccccatgaagaaaggcattgtttacatcaagctgatgtaaatgccagccatacataacagtaagagcaaggactaacttgaatgtaactagcttagtgacaggagcaaaagtctcgaaaaatcaaccccctcttgttgattatatccctttgccactaaccttgccttaaacttttctactaatccatcaacattgaatttgatcttataaactcaccaacaaccaataacatgctgtcgtggtggaaggctaacaatgatccaagtctcatttgcttccaaagcaataatcttagaagacataacattatcccattcaaggattccttgtgctttctcaaagtaggttggctctttcagacttgaaatggccaaaacaaaagctcaaaaatgaggtgaaagctttgaataatcaagcaattaaagaatgtgcagtgacaagcatgttgtcttgagatgaaatagaaacattgttagtagataagaaacaatgatagttatttaagtaggattgtttagtagtgtgtcatgtaggtcactctaggaaggaggagtgtcctcaacagtgactgtgtcaaaatgagtggaggaattatgcctagcaggaagagaggaaaaatgattatagtgaggaggtaatgtataaaaattgacaaagggaaaattgtctcatgaaaatggacatccctaaaatagaagaccttgttggtgtcgaggtctaaaaatttgtaggctttcatgcctaaggatatcctagaaacacacaaggagctgctctaggagtgaacttcgatctggcatgttggagagtagatgcataggctaagcagccaaaggcccttaaatggtcatacataggaggcttaactttgagcttttcaaagggagttttaaatttaaaatttggagtaggtgttctattgatgaggtatgttactgtagctatgcattcattctaatattccaaaggaatatgggactgaaataataaggctctagcaacatttagcaaatattggtatttcttcggcaccacaaaattttgttcaagtctttgcacacaaaaatggtagtgcataactcccttgatttgaacatcaaattgagttcttacaagctgcatgaactcaggaataacaatttgtgcttctgctttatttttaatgaaatggacctaagtatacctagaatggtcatcaactatggttataaaatacttgcagccatctagagtaagagtatagaaaggggcccatatatcattatggattaaatcaaacacattagcagacatgttatgattggaaataaaagaaagccttttttgcttagcataatgacaaatagagcaatagaaaacatgagaagatttattatgaaattgcaaaattttattcaaagaatgagttttaatacatgaagaatgaccaaatctctaatgcaagattgtatcaatagaaatcttagaattagaaaaaacagaaaatacaaagggtttctgtttagttcgtgcttcagcagcagacttcaaatagtaaagtcttccaatcttttcacccattccaatcacctatttcctcaaattttcgtaaatgacaaaatgtttagtttggaaattgaaagaataaacacctgaatcagtcaaagcactgacagataataagctacaatgaaaatttggtacataaagtacattgtcaagatatagatttggtaagacatgtattattcctaagcaaataactttggcattggctacattgtcaagatatagatttcgtaagacatgtattgtgcctaagcaaataactttggcattggctctatttggcaacttaacagttgtgatagaaggatcaaaatacttatcttgaaataaagtaatgtcataacaaacatggtgtgtagcacctgtgtcaatgatccaaccagatttaggcatttttataatcttaccagagaatcgagagaccataggaggttcagtaagggaaagtggcatctctggaaccctctgggacaacaatgccattaacctttaacactgcacagatgatagactagaaaccaggtcttgatctctaacaataactttagtattcataccaatacttctttttgattaaacagtagcattagctgcactaggtttatgaccatgattgtttcttgaagaattggcatttctatttgggaactttccatgaagcttgtgtccaagagggtaaccatgtatgcaaaagcaccttgttatggtgtggccagtacgtaataccacaatgagtgcacactaaattcagttgatgtggctgcacagctccaacaaattgaccatggttggatccaaatccaattttatcactttcagtggaaacattcgacaaacatctttgactctcttcttgtatgatagcagcataggctttgttgatgttaaggatgggatcttgcataaagatctgagatctagctccattatacaattcattaagaccaaccaaaaattcaagaacccgatcttcattttggtaatcttgaattatcttcatagcaccacaagtacaaataggttgtggtctatattcttgaatcaaatcccacagagatttgagtcaagtgaaatatgtggttatactattgaaccttgaacaagagattgtttggttcgaatggcttcaaaagcacgagtatcatttttttggttaaacctttctttaagattagactagatcgtagtagaattatccatatacatgatgctttcagctatttcatttgatatagcatgaagaatccaagaaatgacagtgttgttgcatcaattccacaattcaaattcatcattgtcttcttcaggtgaagagagcttgccattgacaaatttgaacttgttcctcgtgattaaagccacttgcataacttgacgccatgagctgaagttttctcaattagctaagatctttggaacctagctggctctaggatgatcactgctagaaagaaaataaggatttcg

SEQ ID NO: 187910 - DNA, 3071 bp, Cannabis indica
aagagtatcactcactgcctttctaatgtccttcagcatgatacaatgccataccatgccacttaagatttcacaaaagccagaatccaatctaacaaaccgacaagaaggcaccattgcaagccaataaccccgtttcatcgagcagaaaaccgaggtctcatgatgccaaatcttcttacgaaccacactaccattgactgatgtaatagacaaattagccacaacttaagagaagacaccatatatggagcaatactagtatgcacctatatctataaacatgtaattaaaattgaagaagtaataagaattaatgtttacttgttcatcagagaccatatgagaaacaaattacaaatattcataaatttacattttcttttacaataatagtccaaacagtgttgactactcttttacaaattataaaaattatgattaaaaataaaataaaaaactctataatttcagtcccaaattttgagaagtgaaaaattggcattaccaactaaatatttctcatccacaaggtttcactgttcaatcatgtactttctttcctctagctgcatctgcatcacagcaaatatttctatgcatagccacttctaaccattccaagagcacagtcaatcatgtaatagagggtttgttttataataaaaacaagtattatttctattgaaactcaatagcacaatggaaagagaacaactgtcttcaatcacattacgagggcaataaacaaacaagttagagagtgaggaaggagtggagagagccaaagcagggtggctagatggcacaaaatgctgattagagattgcaatccactctttattgcacaactagaatttaatagaaaacactataaacagtataaaacatctgtttataattccaatgatattattgtaacacaaatatgtttcttgaaagcaacatgatgcgtccatcacaaaacaatgattcttttactaggagtttgtgtcaaaaattgattacatatacctacgtgaacaatttaaaaaaccacataataggatgaaaataactgttgctcaaggacgaacaacaagacaggtcatgaggccttttcaaatggtcggcggataaaaaaaacagactgaccaaatgaaagaaaaatgttgaacaacctgcttgaaggattgttattgttctttctaattgatagacatcctgcaaaagctaactttgatgactttttcaagctgccgaccaattaaaaaaaaccacataactcgtgttgctgctcgtcctcaaacaacataattcaattaaaaagttacaaatgaatttagatttcatttgtgaccaaaagcaaaactcaaagaggtgaagtaataaaaattaagaaacaaaacaaaaaaaagggtaatgggaaaatactaaatgaactttcatttacactcttatttcaattaaatgcttagcaagtgtcaaaatatcatacattaggatgaagtgtttaaactaatttctttaacattcttgaaatagtattatacattagaaaagacagttaataatagctaatagctactctaccaagtaattaatactatcaaatgactttcatctaatccccattagaactttgagtccaaaaaaaaaaatcactttttgaatacaaaaccagataaataatcataaaaattcccataataaaccttaatagctcttacttagattagatgcaaccaatataaagaaaagaaataaagcataattacgaatgtctcagcaaataccaatgattactctttttcaaaaatcaacataaaaataccaaagatataccaataaaaaaatcaaactcaaattgaatcacattaaattattaaaagaatagaacaaataacactgacacagcattaaaactctcataaatgtgagaaatgactataaagcttcacatatacaagtacagactaatactatcaaatgacttttacctaatccacattagaacattgtgtccaaaaaagttcacttgtaatacaaaaccagataaataaacataaaaatcttcataataaaccttaataaaacccttacttagaagtaaccaatacaatggaaaggaatgaagcataatcattaataaaaataccaaacatttcaatataacaataaagaaatctaactaaaattgaataacagttaaaatcataaacacaatagaataaataacactgactaaagattctactttgaagagtgaaagagaaaccaacctcaacaaaagcatacaaatactcataattgtgagaaatgactagcaaagattcacacaagtgtagtataatactatcaaatgacttttatccaatccccattagaactttgtgtccaaaaattaataaaacaaaaaaaatctaaccatcttctcatgccatagcccttacctagatgcaaccaatacaatgaaaagaaaatcaagcataattatgaatgtttcagcaaataccaaagattactctttcaaagatcaatacacagttatatcataaacagaatagaatgaataatactaactaaatattccactttgaagagtgagaaagagagaccaatcatacaaatagtctctcacaaaattaacaaatagacatttcatcaaacacctacaatgcataaatcaaaaaaccaaaacgaaaagataaatcaaaagattgagaatttgatgagcccgcttggaccatcactgccctgtaatattactaggctctgaccgcgggcagtcttcactgcaagataagagagcagccattagagttccaaaacgaactaaccaaagaacaaaaacctagagcttctttgggggaatgagagagccgccatcaaccccggaaggagggtggctcgagctcagtcccgccggagaagagaggaaagagccgatggttagggttttattggggagctctcgtatgctaacttctcttgctcagataagatcaagtagtttgggtaaaattagggtttcttccccatttttatacccaaaatttcatgtaattattaatcaaaaaaattataacaaa

SEQ ID NO: 187911 - DNA, 2648 bp, Cannabis indica
tatttatttatatttatatattagaatatttacattgaaaatacttattaaatcttttcaaaaaaataaaattaattttcttcaagatagtaaatactcactaacaaaaaaaaaaaaaaaaaaatcttttagtgataactttttaatcacaatataaattttttgtgactaaatatcacttttagtcacaacataaaattacttgtaactaaaacctagtttttagatacaagttctcaccaatttatttatagtcgcaataagtattgtaactgaaaacacatttggtcacaacaaattataatttttgtgactaatacttttatcacggacttttcagtcacaacataaaaataataaatatttataattagtcacaacttaacttttagtcacaaattttgttgtgactaagagtaaatttttttgtagggacttaaattattatattattatggtggttgttattcgtgtttttgagtagaggatacgtgtaattttaagaaaattttagtttagtagttctaggcctaatcacaagcttaaccaatagactggatccattagcaaagtcaagcgcggatggttcatccagaaaaaggataccttcagcacaacatatcttcggataatatcgaatagatcttccagatgacgaaaagatgatttgttcgagtgagataagccttcagcacattagggctcaagatagcatcaaaatagtgcttccggaaaggtaataaacgagcctctagatatccagttccgtatgacaacaatttattatcaaatctcacaatatcaggacattattactaggatcatgtccaagattcgtatgttccgaataataaaataaagtaattatcaatcaagcattaatgtgtctttattatccacaaaagtaggacatgatttgataactataaacgtggtgtggcatccacgttagcaaaagatcaatacctcatgggtcaggctttaccaaatgtgcccgaagtcaatatattatttgtatttcccccattagtggacaatgtgtacatattagaaccctagtactataaatataaaagctcattcatgcaaggggttagaatctcgatacttaagagctaaggaaaatcacttgtgtaaatctacaaagctttttttttaggactaagactctttaatgccccaactacgtaaaaactctgatcttattctttgtctacagtatatttctttaagctttattatattttatcgattttcaaaaatctcggtaaatagaggtgaagaaagaagtgataccaaaaatattgtatactgcaaccatggaaccatggtagccatccgaaccaccgtcgacaaatctggtatttgtgatggggatactgccatggagaatgtgaatcctactactcaggaaaaaacaggagtgaatggaaacccatgagaagtgatcagtcatcctaccaagaagactcaacatatatcaaaaaatatgttgatgaaaatcccatcgatgaagatccaaaggatgatcctgaggacgatgatcctaaagaggatggaaaagacaaagaagaggaatattattatgagccagaccctacagtcgctgaaatggctaaagaactcactaaaaataagaagaagttggcagtaaggaggacttctccaattgaatgctaaaaaactttcatcagattagaggctacaattgaataaagggaagtagctcatgatgaaaatattcttgatgatcctgctcgttaggaacaatgctacaaagaaaacaaatccaaaagacctggaacttcaaatcttgtagggacaaagaaaaaggtgccatggaaaacaaggaaaaagactgctcccactgctccatggaacaatatgaatattgccaaccaacctttgtagagaaagaaggtaatgctccggggcaaaaccatccaattgatctgtgaggaagagttgcattgggcgataaggcgagtactcaggtacaaaggcctacctctaagggaagaaaaaactgtcctagtaattctattaatcacaatggagtaaaggcggttcacccaatttcagaaggtagttttccaataaatgacctctaagaacgtttaaatgcaaagtaagaacgagctagaggcaaaaaggcaagacctcgtggaaacaacctcaagaatcatatcaatgatagagtttgtgggcaagagttctaggatgacaataaaaagcgtcaggaagatcaaatagctgaattgaccaagttcacggagcgtcttacctagaagcaaagtggggctatatatgatttaaaagaagaagatttgaaatcatgtgtaagaagaatatgttggaattattttactaggatctagatttactaccaagtatgttattaacatcctaaatatgaacttctaaaacgatattaaacaaacacatataaagtatcaggaaccttacagtggttgcagcggaatataatgtatccttccactcagatctctaacccttgtatcctttctgtagtagggtatcaccaagatctgagtccgaatctccttttcttgaaactggataattcacagccttacacactatgattgagtactatttgatgtgtgtggtgttgtgataaatccaac

SEQ ID NO: 187912 - DNA, 3227 bp, Cannabis indica
ttttttttaaaaaataaaaacatgaataatttaagttggtttagtttatgatgtgttgctttggtgttgacaaaacgttgacaaaactaaaatcgataaataaaaaaaactttaaaattagagttattaatattataaatactaaataaaaattgatatcgatgatttttttgccctatcattcggcttcttcatgactgcaatttggggtatttattaaaacagattcaatatttttagatatatctagattcaatctatttatatattagatattacattttattatttagtcccatctaattaatatcaatcattgttgattcaacatgtaatggatattggattggatgttctatcaatgagatgtttttcatatatttctattgcattgatttagatttattcaataatttaaatttaatatttttgaaattggatcggatccatgaaatatttaaatccagtattgattagattgtcttcgatccatccaattaacaaaatatagtaaaattataatatgttcatatatatataaaaattttaagtataattaataacataaaatttaattatttatccaaactaaataaaaatactaattcattcaattggataattgatgtcttgaactttgggcaccccattcaacatttaattcaatctaattggatattaaaaataacattctatctgatctgatcaccattgaatattcaatatttatatattgtaattgaatcggtgagtgttaatttgattgactcgatatatgcacatccctaactacaattttaccatttctgttcatatttttccacatacttcatcatagtattacccaagatatgatgttaaaaaaataccacaatcactacacaacataaataatcaaaacatgagaagctaacaaaaggaaaaaatctcgaaatgaaagagattgatgtatgaatatcacgaaaagtttattttatatacatttttattaatgtaagcaatacataatacattcaatatgaatagaaaaaataagttatatggctaattttcaaaaatgttgaaactctcacaacgtcttatcataaacagttaagccagaaaagaagtcttatcataaaagataataaataagttattttcaataataataatatatagtaatttgagtaatgataaatatttattattaaaaagataataataaaaataatgtctttataaaataataataataataaattagtgaaaatttatgtggtagaaactttttttctaggaaaagtgtattattataaattaaatacaatcatttacaacaatcgagaaaataaatgatagaaggtatttttctaaccaaatacaatcactatctaactgtaaagctggtttagccaaacatgtgaagcttaattagcatcgctcctaatatgagatacacaaacagaagaaagtgaggataaatgatataaacatcttgtaccaaatcatgaaaacgagaattatttgatgagctatcactcaaagctttaacaagtatcaaacaatcagtttccacgaagtcaagttgtagatgcaattggtcagcccaacgaagaccaaagaacattgtttttgcctccatctcctgtggcctaaaatttccaagagctggtttaaatagtgaagccagaacacgtccaaacaaatcacaaataatcacaccaataccgattttgttcgtcaaagaattaatagccgtatcgacattcatttttaatttattctctagaggaggttgccactgggtagaagctgttgaactattttgagaagaggctactggtttggctaaattattgacgtgttgaaagttctgaagatatgcatcagcttggggcaaaatttggactggtttttttagcctgtttaccatgtacaaagttgttttgatctgaccaaaaaataacattatgcatataattttctccaattcctaccttgaaaagactgttgacaaatgaataaggtagtcaccatccttcatatattctgctcttcggaaatttatgaataaactagtagtttgccaaactgccttggcatggttataagaaaatagagcatgtcctattgattcccaagcagttgaacataaggatcaagtggctcaaatcaaaattttcttttgaaataatgatttcaccaatggatgggaagattgtataaccctccatcgaaaaaatttcacttaggaaggaagatttaaaccccaaaacattttccacgatgaagcttgtgaattggagcttgaagacaaatcacgatcctctaaagtacaagcaaaatgataacctgatctgacatagtaatcaccagtaccattgtggtgccaaatccacctatcattcttagcatgaagagataatggtattgtgagaatgcgatcaacatctgtaggagaaaaatccattcttaaaagctccaaattccactcacgattggttgatatgtagtctaaaactttattcaagtcactaccagtataacatagtggtgtgaagatagaatacccaaaaatccaagcatctaaaccacatcttataattgtactatctcaaacttttagtctcaagcctttaactaagaattccttaccccaaataatgtcctgccaagtaaatgaagacaaaccaccactagtagctgtcaaaaatttattgtttggacagtagcgacccttcaaaacacggcctagcaaagtatttgggttttggaaaatgcgtcaagcttgtttcgccaataaagcttgattaaaataaacaaaagatctgaaacacataccaccttccattttagctgagaaaataaatttcccttttttccaataaatcttcttattgtccaatgtcgatcctcaccaaaatttggtcatcatagtcccaatctgcttacaaagcatagaagataaccgggagcagctcattgcatatgtgggaattaattgcacaacaactttcaaaagaacctcttttcccctattgaaaaaattttatcgttccaagcatacattactttccaaatcctctcttaaatgttactgaacaactgtgttttgtctcggtcattataagcaggaagacccaagtatgattcgtgacattcacaaatcagcatacgtaaaatttgttaaaaagaattcttgaaagtcgttggtgtattaggtgagaaagatattacagacttat

SEQ ID NO: 187913 - DNA, 591 bp, Cannabis indica
ctattttggcttagatgagatataagtactagagttcaacaagagagtcataactcatacctggccccccttcttgccaaaagttacgcagtgaggatttcccatactaacacatgtaacactccaagtttctccattgacatctatgtcggactttacaactgattgatccttatttgcaggtaaccttgtaggtacatctgatgctttaagtactggttcacccatatcaactttaacctgaaatcgaatactcaaaaatcactatgcagtaaaatttccataattgaaccaaaatgcaatcacttgtgaatgttgccattgaagcatatgaacccaatagatataggtaattttcaagtagagaagtctatacctgaccatcatcttgtaattctggaataattaaaccagcaccagtatgtacagtaaagctacaacaatagatcataaaggcattgtcaaagaaagccgaaagaggtattcctaattgataaaccaaaggataaagcacattctctaattggttgtgcttagtattattagaatagttatagtatcgtctaaatgttttactttgctactcattaa

SEQ ID NO: 187914 - DNA, 9457 bp, Cannabis indica
ttatttttgaaaacactcaactaattaagaattcttatatggatcccaccattttaattttcaaaatcataaaactgttttcaattctatattagcaaactgttgtgtattattattaaggggatggatgcaattgctccgccctttcatgcaatgttttactaataaaggaatgacacgaaagaaaaatatcaataaaaggaaaatgaaagcttatgtattaatcagagttctaagaaaacaaaagggtcagttggctaaatatttcacgctctagttttggtgagtgctgtatggctatcaaaacatatggctgacataatatgtgtaaacttataagattggctcgctttggccgaccctcatttaaactaatttctatctatgcacgttttttagtttcaaaaaaaaaaaaaaaaaaagagttctaagaaaactttccctccctcataaattgaaaaaatgaacaacagaaataattaaacaaataaatttgagtggaattatatcaaaagaataatagatttaataaattgtataccttttaaaaaataaagcctttaaataaagagcaatttgcggcgaaacctccttatgttttaatttttatacacttaacccctttatcttttttttttgtggcaaaatccccttatgttttaatttttatacacttaaacccctttttttttttggtgacaaaacccctttatgttttaatttttatacacttaacccctctatcttttgttttggtggcaacacccttcagtttactttttttttgcaaatttaaagttttagttaaatattaccgttaaatactaaccggattactactgtatcgacttcgaagttttaccgttacatatacaaaggtgtatacagtggtcttccaattgatatttaacggtaatatttaactggcgtgtcaaatttgcaaagaaaaataaacataagggagttttgccaccaaaaaaaaataagggactaagtatataaaaattaaaacataaggggattttgccaaaaaaaaaaagataagggagttaagtgtataaaaattaaaacataagggagttttgccaccaaaaataaagataagatggttaagtgtataaaaatcaaaacataaggaagtttcgccgcaaattgctcttaaataaatttctctacacaatacactggcactatagcaaataaaagtgtaaaatacaaaaatactgggaagccaaattcattcaattgttttaattctccatttcaatttctaagagtatttctaatcttcgatcccacaacaaataaactaaacaaagataaaccaatatatacaatgccatccagtagcatgaccaaaattttattgtcatccacataagataacataataatacataaccctagaaacaatcatatttattattttatatattatatattatataatataaataaaaaggtcaaatacaataaaaaatcgctccaaaatttccagaccgggagggtcatttcagcacaaataaattgccttctcatttctttttctactatgcatcaattagttaccgtaattggtttgaaatttgaataaatcaaaagggctattctcatttcatccagatgctccagcagcacttctcttctcaaattctccctgctcttctttagcaaattcttcaattaattcacgctgtctttgagtaagattcctgcgtagaaagcaaaaaatataacattattttttcacaatctataaaattcaacgacgaagatggaactcttctacaattaacacggaacagaagacaggaaacttacgttggaatgctgacattgaagtgcacgtattggtcaccaaatgaatatgaattccttgtcttgattcctgccacacaatagcataacaatgacaaaaaagccaaagaaaacaacccatgaaaaaacacagaataccacaaaatagaataaatcaatataaacagaaagaatagatgaagaggtccctcatcatgcaagacaatcaatcatttccatagtttaaagaggtagcaatgatcatgtcttgagtaactacaaatgggactcagtttgaggtagctgccaataatagaacaaatcacagtgcaaggagcatgcgaaaataaaaattacaaaggcaggaagtctgcagtgcactaatagttattcaaacagaaaatatagctaagtctcacgatgtgctagttaataatgcctctatatatgacactagattcatgcaagaataaaaagctggttgatacaaactatcttaaaaatacccaccctttgatagattaaataaattcactcccaaatagaaaagctaccaagcaaacaaaataaaaaagggttccctacctttcttcttaagaactactttctgaccaggttgagtgccaggtcgaacctgcaaattaaaaagaaaataatgtaaaatgacggcagaactgaaaaagcaattggcgataaaaggtgcactgcattactgttcagacctttaaaacaacatctcctgtaagagttggaacttggatagttccccccaaaattgcctgcagataagaacaagtcacatgagccccaaaaccaaaaatacaaagacttgagcaaaaagaaacatgccatattttagagacgaagacaacaaagtggagaagaaattaaaagattacggttacagataactgattactggttaatatataagatgttaatatcacatgaatagcatgtttacaatatgggaataggaatatgattctcaatcatgattcaaggggctgctaaatgatgattctcaatcatgattcaaggggctgctaaatgatgattctcaatcatgattcaaggggctgctaaatgataatggctatatggcaccttaagacacccaacaccacatgaggcggcacatgggtgattggtgcatcttgtcgtgtaggggtgggccgtagcaatattctaactaaatcttgaaaatatgttgggcccacataaaatcagaacaggaatgctaattccccacaaccataggaaatgatgttacaattaatcattcctttcacgttttctactacaaaaatcgtgagatatttttacctttacctcgaagaattttttaacatatgcaagctatctataaatgggcaattcagtaaattcaatgatctagattcattttgttatgtaatcataacataaacaatgatttccatttacatcaatctatttattatatttccccctttatctactccacttacaatcaagggtggaaaaacacaaatattacatctaaccacctatagcactttatttacaagagatatcaaactctaccaagaaacaaacaacataatacatcacctgtgtaatactcagagcagtatcaacatgaatgtcagcgccttccctccggaaaacaggatcttctctaacctacagtggaggaagagagaaaagaaaaaaaaaatggacaacataatgcaagcttcaggatgataacgattaagataaaaaatagaataaataataaataataaaaaaaaattagaaaaaggcttaaggctgttgaacaagaagcaaactgatctcagtaaagcacagaaaagagttaatgtaccctaatggtaacatagagatcaccaggttgatttccatcaggatctgccccaccactaccaaagaccttaatagtttcattgtcatctactcctgcaaatgataaacataagggagtcaagcattttctttgcaacaaaaacataatgaaaagatttcttaagctctaaatatttgacagtacaatgagtcaacatatgttggagccaaaaaccactgattacggtaaggttgaatacaattgtagcaaaattctcattgtaggtgtacctggcacaatatctaacttgactgatttgactccactcatcactcgttgaccactacaagatttgcacagtttctggtagaatacacaaataattaagtatggacatgtcaaagtttggcattatgctatcaaataaaacatgggatgaaaaacagatacttaaatattaacagcactgtatacaaatatacagatatataatatgtgtgtgtgtgtgtgtacaaacagcaatcccagcatactcaagatatctcctccctcgcacaaacattggaacatacacatgacaaaattgaaagacataatcagtgccaagaagatgaactccaaccatcacttcatatccccttccatttatttatttatttattttgaagcaatgaaatcatttaaaataatcatattgtcacacacacaaagctaaaaaatctaaatattataaatgaaatcaggatattttataaaaaacaatgggaaataagtttagcattataaacagcactatttagactataattttgattatgcaactacaaaacatgggaaacaaatagttttgcattataagcgaaaaaactttgaatacaattttgattatacaactaagaaacaatggcgtatatgtataaaaattttctagtaacaaatgaaaacaaagatgcttctacaatgcgacttcatcccactgaaatttataatgttgagaatacattgctcatatgtcgtttcagtcattaacaagaaacagaattttctaggctaccaggcccctcgcccggtacccaacttcattccattagaaactgatcatgtaagaaatagaaacatgtttgcaacatgaaaatttgaacactcatcctatcagagtttagtaagtattagcatgtggtaaagctcaagggcaataaacccctagtgattcgattttcttttgtaatactaatagcatattcaatgagtgagttgttctctacttccaaaaacacagtcaaaacagcaattcaagaaataccaatgaaaggagattattttcaggtgacaactagaagaaaaacagatcaattatttccagaacctacaaggctatggtgccaaaaaaaaaaatgcaagataatacaagaaccataccgcaaacgtttttccagttccaccacactgagtacaagttgtttgcatcctaaatgggccggtttgcatgaatgtctgaataaggaaaattatgagttagttaacaagtacttgacatctttattttacatgaaaaccttaatatttattttcaagaaccaaccatgccagagcctctacagcgcttacaagattccggtctggttccaggtggcacaccactcccacctacatagagcaggataaacttaaacaaatgaacacttgaccaacaataaatcaaaagcaactagacctctagtacgtaaaattaatcatcataccacaagattcacaaggcatagcagcttgaaacgtcacagttttactgcatccttgcacagcttccatgaaagatagttcaatggaaacctacaaattatttaaaacaaatgaataagatgaacatcaaacatgacagctgtgtagcaagagtgatacatttaaataaaaaagagtataaaccaccttaacatcttgacccccaaaattctgtctgaaaatgttgaagatctgccagagcacagttatatcattgatgcatggtgcatcaaattaaacaaatttatcgttaaaaagttgcatgattaaaattatagtaagagtagtacactttaagtacaatcaaaaactcagaaagtagtccttacattatcatcaaaaatatctttgaatggattcctaaaatcattggggaaaccagagccttcttgctgctcaaacgctgcatggccaatctgcaacataaagcagagtaatgaaatagatattcgtgtaaatcaaattaacaacaagaagtgcaatacagagaaaatgcttgcataataatgatggaaacagtaaaacaaattaagtgaagaacgagttttacattttaagatattccaacaattaagtattaactcaacagagctctttccatatagcattctaccctttctcaactagacattggtacgcagcagaacctccctttaattagtttgttatcacatatatacaatgtgaactcatggtagctcaagggtacagtgaaattaaccaagcatcattttctgcactctagcaattcaaatgaaattttcctaacacgtgacaatgagaacaccaaagataccgcagaaaaacggtttattttgactcatgcattggagaggataaatgttattcagggctctcgttgggcattgcaatagggaggaagtagaatgaaccattctcattattggcttggctgtaacctgtaggaggtgtttccaatgtttattttaactctaagcttggtatctgtatactctagccccatcaactaaattttagtaaaattgagggcggcctataaaagcctagtcccatcaactggatttagaaagataagaagggtctttagagaaaactcaatcctcagtgagattcaacggtaactaatgcaggagaaagaaaaaatgaacacaaaactaataacagacattaaggatggtaaaaaagcaagagaagcttttcatctcaaaaggagaaatgtcaacaggtacagaatgtataagaactattccatttcagtagttaaatttcccattgaacacacacacacacacacacacacacagatttcctacttgaaaacctgccactgaaataaggtcaaaacaatctaccatatcaccggattcaactcaatcaaatgtatttcagaaaataagtaaatgaacaaaacacatcggcaggtaacataaatatatgtattaagatgagtcacaccacacctcatcatattgtcgacgcttatcctcatctttcaaaacctgcacaaaaaagcttggttttagcataaactgattagaataaatttagcaagttcttcgtgcaggggacagaccacatatagcacttcctactcagtgtgtgcaaaagaaattgtgagactatcatttatttttgccaatgagaatttgtggttttggttatggagtgacataaaatacatgaaactgtgtagttatggctatcttattgcatagaattcttctgtccccaaattatacacctccttgacacaccacaacaaataaatgttgtataaatgtgtaattattgataaatatgagtacaaattttagtaagtagttgatttatcaaattttaaatggtgggacagagagacatatatttggagaatatatttttattctatcttgttgcctttttgaacgtacaaaaattctcacataggtttgccacattttttttccttagtgaggaaatcaagttcgttgccaatctttgggctttggcagatacagattcaagaatttcgattggataattccaggctggaaaaatactaagatcagcatattattttatttttctatgttttgaggatacaataactttaacatgtaattcattttttgtaatggtcttatacctaatttcatcaatatatataataagaaaaataattgaagataaaacgtaagtttacaacagaagtaatgacttggtttggaatgagaaggtagtctatcttgagagtattgttgcttttgctaaagggtatcttgatcaatggagagttgctcaaaactcaacctttgagtcgtcatggtctggtttacaggcgagtgatggggccgagcagtggacttcgccaccagagattagtatcaagatcaagatcgatgcaactttatttaaaagtgggcaaagctatggctttggtttgattcctagggagtcgaatggtctactcattgaaggttacacttgcttttccttgggccgtgtagaaacccgaacttgctgaggctgtgtgggagtaagagaagctttgagttggatcaaagaacatcgttgccagcatgtcatagtggagacagattgtttggttgttgtgcaagcacttcggagttctattcctatgatttctttatttgagtttgttatccgtgattgtaaaactctacttgttgaattggaaaatgtttcagtttattttgttaaacaatcagctaatatagtggctcatagttttgctagggcctctattttgtatcctaatcatcgtttcagtttgaactttgttccaaatgatttgttacctagtttggtaacagaggttagagtttaaataagaatgattttaccattcaaaataaatactacctcataagccttttgaacttcttgaaacttcttttcagcctcaggatcctctttatttgtatctggatgaagcttctttgcaagctggaaaacaacattaaaataactgatgaaaggagatgtagaaaggagtaactcaagctctgtgactaacaataaattttgttcttacatagattacaacagcagaactttaatagaaaaacaagaaacaagtatgagaaataacaccatgcaagattacatatttaatatttaagacaagaaaattacttcctccaccgaaacgataatattatttaaatcactttttcaattgtaagaagaacagtatactagagaagcaacactacatgttccctttgatcattacatatatacatattgaaaaatatacatatttatataataaaaaaaatatagaagcaatactacatgttccctttaatcattacataaataaatattgaaaaaaatatatataataaaaatataccatttgatcactacaacaaattaggtgattagagcaagatggaacaggctacaaacccattccatataatttctattaataataagaaaaacataccccataatatgctttctttatttcagatgcatttgcattcctattcactccaagaatatcataaaagtctcttgacgccatggaagctacaaagaaaaataaaaacgattaaaagggacaaatcgtgtaaatagtattgacaagagaacaaagagccacaaaatgcattctaaaaaccaaaaaatagatacaagctccacattctcctttcttttttgaagcactctatagatacatttatggatattacaataaaaaatggacatccacctcaagtgacaaattttccctattgcagatcacaattgtaagttgagaaaactaatttgtagagaaaatgtgaataaattattgcaagagaagaaaattgaatgaaacaaataaattcgtgcataatatgcatttcccattgatacaaaagaataaataacaatagtaaaagcttacaccgtaccagtgccgtgaaatgtccttgttgagccaaacttgccatttaaacctcccaatacgaaccagttcttataataaactacaaaaaccgtgagataacaatgacaagtaagcaactcaccaaaactgagcgagctcaggcattttacacttccaatgccaaaaga

SEQ ID NO: 187915 - DNA, 4070 bp, Cannabis indica
aaaataatgagaatttagtggcaaattaccaaaaagtataatcatatcttgggtaggaagaaaccgcgtaaggtgtccaccacccaccgcctcttatgatttccaaaaatataattcaaaccaatctagaagaccacgttcatctaaaccgtccatatattttatcaacatttaatcttagccgttcatttaaacatttttttgctataaatagaccctggctctctcttattcctcaccccattgaagtctccagaatggggtcatctcgctctacgagcaagagctatggttagcgttttctattcgaagcattttgtatttgattgcttatcgcggctttgttcttccatcgatatccctgcgtttgattaatgtttgcatgcgttttgtacggatcggtttttgatctttgtcgaaattgatttatgcagacgatcgtcgatttacgcttgggattctgattagatcggtgtcgtttgaaatttggattaatatttctttttcgattcttttttcctatttagagtttcctttggctttttcagcttatggattggtggccttgggcctttgttttggtttcatctatatatgcagattatgcctacaaccattgagtgtggttttcacataatctgagatctttctttcgataacattgttcgagggttggcttggattgttgaggctgggaatgccccttggtcgtgtggtatcaaatattcaggttctttctggttaattgatattctctgcagagttattcataaaagcatgtacctactctgcttgtgaaatttccagatttattgaatcaagtctctttctccagcttgctcaagaggttgggcaagatgagctccgagttttgccaaccccttgtcttatcttgcgtttggcgatcttaccctaatttctgaaatcatttgtcatgttaaatttctgaaatcgtgatgacttttttttatgaatatctggtttggatcattgattatttaagtacggacggatggtttgatatacttacacatatacatttcatttgaattgcagtgccttgataaaccgcggctcatccttatgggtttgacatagtatcatcatccctgccctttttgtttatcatgctttgttttgagtttctttctgcgtttaggtgattgagaggatggttcaaggtcttgtgtcgttagattaggcgttttcttatttgcatatgcattttattcactaatttcaggttcgcgtctggcgtaaggcttcagtcttctttaatcgggtcaattaaacaagaatttaaccttggaaggtagttgtcttggactagcgcttccttttaaagtaccttttttttttattttacaacttaagcttcggtctcttgtgagattttggtttatgtcttttgttttggacgttcaatgaattttcaggactcttcttttactcaagaatattataaatcatggatgttttaattgtcttccgcttctccgtttccatcattgcgggctagatatgtttcatcaccttttcatctcttggtattgtatggttgagttatgctttatgataagtatctattttcatatatgattgtcagagcatcaccgagtgttgatatgcagcttaggtatatgtattagtacttatatgcgtcttgtagaggttcagaggttttgtgcaagcacaactactttttggttaattcatattctctatgcagaattattcctaaaagcatatacctatttagcttgtgaaatttcttgatttattgaatcaaatacctttttccagcttgctgaagaggtttggctagaaaggcttcaagtttcgtcaactccttgtcttatccaacgtttggcttttaatttctgaaaccgtttatcatgttgaacttctgaaatcgtttaaacatctttttttctgaatttctgatttcgatccttgatttccttctttcaaggacgggcggatggtttcatattcttacatttatatttcagttgataaactgcggcaattcatcctaatgggtttgacatagtatcatcatccttgcttttatctctccttttgttcattatgctttgttttgaatctcattcttgagggttttggtatgttttcctcttttaggtgatcgagggaatggttcaaggtcttttgcactatggaaggggtgtaatctgattatttcgaatcttatttattcatccttctttctttcaagcgttttctgatatgctgtccatcttagcatatgcattttttttcactaatttcaggttcttgacttgcgtcaggcttcagtcttctttaattgggtctatttaaacaagaatttaaccttggaagggagttttccactagtgtttcctcttaaatgggtttttattttctaaaacttgagctttcatctttgtgagattttttgttcatgtcttccgttttgggcattcaatgaattttcagggctcttctcgagaatcatttatcatggatgcttttattgtcatgctgcaagtcttgaatgccctccggctctccattccctttactgcgggtttgatctgtttttccacctttttatatctttgtattgcaaggttgggttattctctgcgttaattatctatttacatagatgagtctctgagcatcacctattgttgatctacactttgcaaatttgtaagtgctggaggtttttgtgggtattctatgtgatatttgcagatccgccttcgatttctatgtggggtttggatatacacttgcgaccaagagttattgtaccttcagataaaaggtcaaatatttagttaatgacgtccaggttcgtgatttctatggttatgtttccttgtagctttgatggatgcagagcataaatagtggtttgacttacgcttggtactttgcatgtgcatctacagcacgtttggaaactttgaactctacacatctgttaaatttatcttgggttgtgatctccagtcaaataagaatgctataattttggaaatttactctcaaactatatgatggtatttcctcgttaggtaaatgcgtcattttttgttcgtttgatggttgtgctccattctcactccttaactttttgatggttaacttattgtttagatttcatttcttgtattttcttgttttggacttcgaacatcattgcatgacttatggagatagcaaagcatggtttaccagagttatattattggagttcatgcaactgacctatttttctgaaaacaataccgatagttttatttacttccaatcgttgaatcgacatcctctacatatatgaagagtattttctcattaggtaatgggtagtttgttttttcagcttctggagatggctctaacggtttcacatattcaacactggatttcctacagccaacctaatctgtgaaataagaatttcagctttagttatctcctttatatatgtatatatatattgatcgtcttcctctctccctatgtcttttctcatttggtgattgtgtcgttttttcagtacatatttgacttttgactggattgaaccttgtgaaataattaaagctggggtgcattggtgatggtattttgggaacaacattgcattggtggtatcatattcatcgttcctattgtactatatcctactttgtataatgtatgtttagttttccttcctcttgaatttttttgttttagtcttcaaacaacattgcagttcttatgggatagcaagcatggttttggaatcaagattagagtttacctacagctgacctattttgtgaattataagatactagttccatgtactttgcattctctaattgattctctccctggatgatggtatttttctcattatgtaaatgaatcatttgtttttttcagcttacagacatagctgccatcgtttcacattgtcaacactggattaccagcaatccctgcctgcaacctacctattttttgaatttttttattacatcattacatacttatcctattataaattgactctctctctctct

SEQ ID NO: 187916 - DNA, 2197 bp, Cannabis indica
acttttataaatgattggattaaggaagattgatcagagttgttaatcacttaaagcataaatgtgttagtacaatacaaccttagattccatgtataaaaatgtcatgcaataccactacatactagagtatttaaagcgtcttaaaattactaatttgcccattgtattacattgtaaatttttcaggatcattattgttgggccttaaaaagcccagtagagatcaattaatattatgtcaaccctttatgttctaattcaaaaggttacattaatccaagtctccgaatcccaactttttcattttagtatagtgttagtgttttgtgattgttatgttgataattctacaagattaatcatatgataatcatgtattctatatttaatcattttattaatattaaattatcaaaatttaaactcataatttcaattctttaatattcaaaacttaaaagttactaatatgccatgtcatacacctaaaatttcctattcctcatttttacacacaaaatacccaaaattgtatttttttttacaatttcacggctgttctttagaggaaaaacaagattatttcaacaaagtgtaaatgacgtttttcagaacaacctaaaaataacagtcacttaaaaaaaatcgtaaaaatatttaaaaaaacagtattaggtaaaaatgtaaattttttgttgtttttgggtatttttgaaataattcctcataaaaagcccaataaagatccaaaagcccaacttgggaattcaaccatccaaattaccctcccaataaccactcacttcttctccatcatcacctcttaaaccatgaacactgagccgccgccgccgccgccgccgcggctttcaccggcgacgggacccgaatccgacccaagagctattcatgcacgagccatcgtcaatggtatctccgatcgatccctctacaacaacctcattaccctctactcaaaatcaaaccactcctcttactctctccctctcttcactcaaatccccaaacccaacgtcgtttcctggacggccctcatcgccacccagtccgacactttcctctccctacgacacttcatttcaatgctccgccacccgacactgcccaaccagcgcacgttagcatctctcttcaggacctgcgccgccgtgtcttctctctccttcggtctcgccctccactctctttccataaggctttcgctttcttcgcagccattttctgggtctgcccttgttcatttctactccaaatctcgtttgccactcgatgcacgtaaggtgttcgatgaaattcgtgacagagatgaggtttgttacgctgctcttgttgttggtttggctcagaattctcgccccattgatgctttagcggctttttatgagatgatatctagtgaggttaggtccacgatgtatagcgtgtccggcgcgcttcgttcggcggccgaacttgcggctttggagcaatgtaggatggttcatgctcatgccatggttactgggcttgacactaatgctgttgttggaagtgctttaattgatgcttatggaaaagctggatttgtttcggatgcgagacgagttttcgatgagaatttgaggattaacattgtgggatggaatgctatgatggctgcttatgcccagcaaggagataatgattcaattatcaagctttttacttcaatggaagctcaagggcttagaccagatgattatagcttcctagcaatcctatcatcactttcaaatgcgggtttggatattgagtcagagagatggtttactcgaatgatagaagattacaagttgaagccggggctagagcattacacatgtgtagtgggagcattcagccgagctggtcggttatccgatgctgagaaaatcgccaacacaatgccatttgtgccagacgctgcagtttggcgagcattgctttcgggttgtgcttatcatggtgaggccgacatggcttggaccatggcgaaacgattgatcgaacttaaccctaacgacgactcggcctatgtgatcgtcgcgaatgtgttatcaagtgcaggaaggtgggaagaagtttctgaagtgaggaagatgatgaaaaaccggagggtgaagaaggaagtagggcgtagttggattgaagtgcgcggtaaggtccacgagttctt

SEQ ID NO: 187917 - DNA, 1213 bp, Cannabis indica
acacgtcaaaaataaaattcaaaaaatttattacacacgtaaatatttttgttttatatacatgtaaaataaatagtttgaatattaatttttatattataaaatataaattattttaaattttataaaattttacaaaatatcataaactaagaaaaagttagattaaaaaattcttgtcaatatgcctattttaatagagtacagtgtagaaaccagtaataattttaatttgtttgatttgtaataaataataaagaaaagtaaaagaaaatggaagatgatagattagcaatactcttttgtcgtttactaaaacataacatatcatcaaacgatatattgataaaacgataaattgagagagtaggtacacggtacgatatattcccgatatatcaggagaaaagagaatctgatgccgtttttgatttgatgtatgagtgggtggtgctctctctcttctttttctttattattattattttatcaaaaacccaaatacttctcctttctccatttcttctctcctctctgtaatcccttctattattattataacaattaatatatagatatatatgtatatgtactgctatagctactattattaaccttttttttcttcaaatcataataactcaaataccaaaatccaatctttaacaagcaaggtctcttctttcttcttcttcttcttctttaaagtttgtatctttctgtattttttctttcaaattcatgatctatacatctttttaatcccaaagattgaagctttctccattgattttacgcaagtttcttccttttcaatctctgaattcatatttgtttctgggtatttatgataattttagattgaagcttggttttattattatgggtttttgttcaaatctctattctccccacataaaataacatcttctctctcttctactacttactacttcacatgaaataactatgtgtgtttttgttcttgtgtttaattacaggctcttttctttttcatggatgaagattcaagtactcaagatgagacaaaagtagagggagaatttttcaaaagggttattgttgataatatatacatacatatatatacttataataataagaattactagcttcaggataaggtcatcaacagatacaacaacaacaacaacaacactgtgtttatctaaacaagaagaagaagaagaag

SEQ ID NO: 187918 - DNA, 2792 bp, Cannabis indica
aacaacaatattaggctaactatgatctttacaataattatgaaaaaaaaatatataatagcattttcaactaaatcacttataaactgaaagaaaaaaaaagctaaccaagtcgttaattatgtggattaggtcaaaagtaaaagagtattgtgtggattagatgtaatagcacaaaaaaaagagttgtctcatgatatttttatgctaatggacaaaaaaagatattagatgcatttattaattcattaattaaagattatacagtaaaaagaaattgtttcaagaaaccacaaggaaaaaggtcatgtgtccctcaatttttcattaaataaatcttttaactattttatttttggtctattaaaatttaattagtttttttttttaatttttacagaattctatataaaaacatctactgcaactagcgctgcaacctaaattgtaataaaaaatcgtacagaaatctctattgcaactagcgttgcaaccactctaaaaaatccaaatcgtaaaatttgaaaaaaagttaaaaaaatagtatatagagtaatccccctagttttgttcctgtaatttttttttatatatttctatatgtagttgcatggtgcacttgaaacttcctcttttgatcaatgatcccaaagcacgttatggaaggcagtcttcgtctaagttcttagatacgttccattcatatcatagcatccatttggtacacattttagtattgcgtgcatataaaatatacaatatttttatataaaaatcaaaatttaacataatattacataaaaatatacaatataatttaaaataatactatacaaatcaatattatctaatacaccataagaaacgaacagtaagggaatcccatcaactattcttaatacatagtaggccaatgaagaacatagtaagtagaagcagcagttgggctctttcaaaagtcccttcatagcttcaacaataaggacacaagaagatgcaattggaatttggactcttggtgcagatttctctattgatctcaacaaggatttcttcattctagtgttctcacatctctaataaaatactaacaaacgaaactgttaatctctactgaactacatcctggtacctttctaactccgagattattcatgttccttctcacctttgtcatgtcttcccatctatcagcagaggcataaatgttagcaagaagcatgtgagcactagaatcacttgattcaatatctgctagccttcttgccacccgttcccccatctcaacatttccatggattctacaagcgctaagcaatgcaccgtaaagtggaacaatagtctcaatattatcatttgggatcttttctataaacccttctgcttcatgtaacagtccagctcgaccgaaaaggtcaatcagacacccgtagtgttctaactttggctcaatgttgtacagagttgtcatagagtggaagtaccggcggccatcttcaaccaaacctgcatgactacaagcacttaaaacaccaataaatgtgatatagtcagggttaatgccaactcttttcatttctgagaaaaactctagtgctttgtttgcctgcccattcatggcgagtccacaaataattgaagtccaagacgctgtatctttgtcccttattcctttgaaaatttctagagattcatcgatgcacccgcatttcccatacatttcaataagagcagtgccaacaacggcatcaattttaattccatgttcgtttatgtagccgtggatccatttcccttgttctaatactcccaactgagcacaacctgtgaggagagaaaccactgtaaatttatctgctttcactctttgtctttgcatctcctggaatagagaaattgcctcatcaaagcaattgtgttgtacatatgcattgatcataaccgtccaaagcaccacatctttaaacggacttctttcgaacaactctctagcttcatccaacttgttgtagtgtacataaccagaaaccagactagtccaacagatgacatttttcattggcatctcatcaaaaatctttcgagtgtcgtttaaaaaaccacacttggcatacatatctaataatgcattgttgattctgacagtgaaatcaaggttgtttctaacataatcatgaatgtccttaccaagttctatatctttcaacgctgtacaagcggatagggtgctcacaatagtagcttcagttggcttttctttgctatctactctcatacatctgaaaagtttaatagcatccccaaacctcctacacttaacataagcagaaatcatgacattccaagaaacagaatctctctgaggcatttcctcaaacagtttggtgaaaaattgaacctcacccaattgagcatacatgtcaatgagggagttacatacatacgtatcgaactcaagcccagttttaatcacaatcccatgaacctttcttccttcttgaacatctcccagggacccaattgctttaagaacatatgggtacgtgaaattatcaggccacaagccaaccactcttaaacgattaaaaagccaaaccactcttttgaagctgccctgtttagctaaagctttaagcataacattgtaaatgaacagagatggttcttgaatgaaatcaaatatcttttcagcgtaccccatgttaccaagagatgggtctgtgcagaaggccatgagcttgttgataggacccctactttggtgtaatccggccatgaaaatctgggtctgt

SEQ ID NO: 187919 - DNA, 593 bp, Cannabis indica
aaaaaaaaatagaatgagtttattgtgatgtagtgaagcttacatgtctatttttacatgtctattaaacgttattaatttaaacaattataatatgataaattaatagtagtgtccaaaatgataaaggacaaaacataaatcaattattgtgtgatgcgtggttctgtttgacgtgggaacactcacgtgaaatcacaagaaacccatagtgaatatgtacataagtaatgcagtgataacaattgtattactgaacaaacaccttataaacccctctacggttacataaaattttctgttatgtttgtattatataaacaaacgcatacataaaagtccccaaattaataataaaagaactaagataaatggccatatatatataaaatataaattaaattttgttttctttaacacttgagacacagaatacgtacaataaataattgaacaaaaaaaaagtatgaacaacatatttgaaaaaaaaacaagtgtaaggctatgcctaatctatgaaccaaactgatccaaaactgccaaatgcaggaggccaaatagatgccataccttttaatgtttgggattgctct

SEQ ID NO: 187920 - DNA, 3308 bp, Cannabis indica
aaaaaaaaaaaaaagttaaaatatgggaaaagcaatttagggtaatcaatcagttacccttaaaaaagttaactttcttttttattttgaatttttcccaaatctaactttttttaaaaaaaaatccatatttttagataattgtattaaaacataaaatgtgtaattttcactttatttcttaggccttacaccatttgtcacctctatattggcacatgtactatactagagaaacaatgtcagctgagataggtagtgagaatacaagaaatgatcacctttgacttgccgggagtcgttttcgaaatactccaattgcgtttaatttttccatcatccacaacctcaacctcgacctcctcagcctcactatcctcactttcatcctgagaaagaaaagaaaattatagttagaaccgcattaacaagtacattggacaatggcgaccccatttgaaggaaaacttgcctcgttttcaccaatgtcaacagcctgtgccatagcttcttctatttctggtacctgctttagttgcaattgaaaattcagtaagaagctatactattacaacaagcaactaaatgagagatgatctcttcataacttttctctcaacaaaagtcacaaaatttagcttcgaaacaaagattgcagcgtctcatgcgtaagtggtggaagtttacttcggagaaattcgtggggaggtagctttattgtagttagaaaaatcaaaactgaggtggttattattactcaagtaattgctgtaaatgtaaataaagtcattgatggtaataccattttcaattagaagatttgagagtaaatataagtggagccaaatacgaaatgacatatctatgcttatcaaatgatcacgttgtaacttgaggctagctcgagtagtcataggggtagggaggtgcatgtgtggggtcataggatcgaatcccagattgtgtaacgtatttataagacgcttcaatcaaaaagaaaaaaaatatgatcacctgaacttcttcagtcttatcttttgctagaagcttttcaagctcttccctggatatgatttttccatgctgatcacagggagggacaaaagtcagaaatcattgtgtaaattcagtttcaaatcgtagtgttaaggatggaataatattcttcaaatgactgacctccttaagaaaatcgagcatattaggtgttggttcatgaaaatctgggcccctataatcaatcactttatctggttcttgaatatagttcacagttggataaactggatcgccaccccatactgcaaaggccgaaagaagaagtcaattatcatagctcaataaattagaccaatgaactgaagattttaataatttctaatgtattgctattaatataaatcttaagaaacaagaaacaaacacccacacacaaaaagaaaagaggataaagtagccgatacttgataactactttgatcgactaattctccacaaaagtaaaccaaaatactcaatagaatatcggagagaacaaaaatgcaaaagatttattagcttttgagtgagtactttgctttatttgatcctcgcgcattcgcatggctagaggatctctgggtatgcggatatcagttcccatcattatgcgatactctctgtctgtttgatgacaaaacatgtcgattagttgagctatttcatcttcaccagtctcttcataatgcttctgaatagcttcccttgaagtgtccttcttccaagcttttacccattctgaatagtaagataacggaccatctctactcagcctctctcgttcatcttgaagcctacatatcaatacatgatacggaataccctttatcaacaccattgcataataataaaaaaaaaaacttcttttcgagttgcaagataaatggatagttcctcgtacatatctgatcaacaatgccatgagaagttgactcgactaatctcattaaaaataacttacaaccttagcattttaaggctttctaaagttagcacagctaatatccatcttccgaacttagatcaagaagcgattttgttttgtaaattccaaccatacactgtacaacttaaacatataagcatttgcttgtttccatacatgtagggttaatatagaaatcttcagctgctaccttaagaaatagctttcttttaagcttaaaagcataaaagaaaatattaaataccattcgagtagatcaaatgttgcattctaataccgttctacaaaaacaacttcttcctcttatagatggaaacaaaactatgtctatcttaagctcataatttaactgtccctacatatatgatatatgcatgtgtacaaactacaaatacagagacacaaacttacctctcttccttaaataggtgtcgtctagctctgaaaagagcagtttcagtcaatgtgggatggtcaccataaagctttacctgcccagtctctgccattgctttgagaaagacctgaaattaaaatacaagctcaaatccaaaacaaaagataatttagacaagtcttaggttgtgaatgaatgtataaatggacaatcaccgagtttgtgaaagctaatacattaaagatgaaggtgcctgaaaataaaacttatcaggcttcaacaagtgatggtgtatacaccaaaatgcaatatatattgataatctaatcatctccccgttcagattttacatatagaaaataatatgtttatatatgcactaaccgtttcaacgtcaggtcgtcttctttgccacctagaccactgttccttgtctggttttctccagttccaccagagttcttcacttgtaagtgattccccaattggtttcttcactcttggatcaatgaaagcatgaggacgtcccaattttttgtcgagctcatatccagtattttcttccttatctggttcactctgatactcaacgaattcggatttctctttggcatcgtccatggaatcatctgaactttcagattctactaaatcactggactctacaattacttcagaggtttcatgagcagcaactgatgttaaatgcttcttcctcctacttccaggactctttccgaatgatggagatccaacagatttacctgtaggctcgggagcattggcagcccttactcgactagcagtgccttctggccaataatcctgctctggaatgctagcacgagcaccagatgccggttcaagctccccagatgttgagtctaaatagctgtaatacggtgggcgctcaacagaaactttttt

SEQ ID NO: 187921 - DNA, 7715 bp, Cannabis indica
ttttttttttcatgctttcagtctacgggatagagctcaagtggaacaattgttgcgttatattgtcgaagaaccttctgaagaagcagaaagcaaacgagccttcaagtatgcggttttaatgttttacagtcactattcgattttatcctattgacttttaatgatttgtttattgaaaaatggcttcttttaggtttccattcatatcatgtgagatttttacatgtgaaattgatgttattttgaagactcttgttgaagaagaggaggtgaattttcgcacagaacttattgtttgattttcaatagtgtcattttccctttgtgttgattgtggttcttatgtttccagctgatgaatatacttttctccttcttggaacccaatcgtcaccacagtgcgttgcttgctgggtattttagcaaggtacaaaattattccctagaataatttgttgtactttcatttgtgggaaaactagtacttgatgatgttttatgtggcatttcaggttgttgtgtgcctcatgataaggaaaactgtgccactgatgaattatgttcaagtaagtaataccccattgttttataagcatcattagttcagattgtcattagagtcagtctccttgaactttggttgcagcaacagctgatcagcttatgaccttaatgatgtcataaaaggcgtaaactggtttaatagtaaattgtagattatacggagaactgtatgatttaattaactatctgatttcatatctattcctgaactcttttttattttacatttaacttttcaggcccaccaggatgtttttcgtcaattagttgacttgataggaattacttccatcatggaggtgagaaactctttttttttggacagtgcagtagtgattcctgagatcaaaatgatattttttcaggataatatatttgcttgagtttgatatgtgatatgcttcattacacaggttttagttcgacttgttggtgctgatgatcatgtatatcccaattttattgatgtaatgcaatggttggctgagagtaatttgctagaaatgattgtggataaattgagcccttcggtaaggaacatgcccttattttctatttttgataaatgaaatcagcaattttcaaatacaaaaagtcagagagcacattctcgctacaagtaatcagaactcacataaatgaacaaaggttctcactttttagcttatgaaacataatttctttagtgaataattgtgttttgaatgtagcatcccaggaatacagcatttggctgtcttttgtgtccttaaattttagtttttgttctttctagttgtagtgcttatcttattataatatattttgttaaatcaactatttggagacagtgcttgtgtgtcttagtcttttgaattgattgaataaataaattaaaaaaaaactagcctcatttcaaggtaagactacttttagctgattggcaatcggtctggcttacaatgaagccttatctaacaatttcattctccttttctaatcagtgccctcctgaagtgcatgctaatgctgctgagactctctgtgctataactcgaaattctccgtctgccttggccactaaactttctagtccaaggtttgtgttggttttcttattttgtgtcatcatgtcctcataataaagtgaagtgatttgaatttcttttaaataattttgcttgcagtttcgtagcaagaatttttgctcatgctttggaggattcacattcgaaatctggccttgtgaactcactttctgtttgtatatctttgttggatccgaaaagatccatggctgcttctcctttatttcattcttttcgtagccaacatatgtacgatacttcaatccctgttactccagagactgtcggtgcgatgcttccaaaactcggtgagtgtttgcctgtctattgctgtagtttctgcaaagtgttatttttttatgttcttcatctgatgatgcttattatgtaccggttacaattttcatttgctcatttctgaacttcaatgcttccgttttatagagatgttagtcttgtgcagggatgctattatttgatgtacaattacttctgaaaacaatgttttaaaaaaaatattggtagctgagactgagagtgttgtatttctgtaaggaactattagtcaaagcctctcatttggagatcctgttgctatatattcgtatcagtccttggaacttgaagggcttcaatatgtaaattcctaataatttaaacaactttgtgacatgtagatgttggagtaaatgctggcattatggttgtgcttctaggcttgaaaattgtgtattgtttattacgagatctttccttgagtctttattaattatatccctcctggatttttaattacaaatgtctgttctgcaggtgacttgctaatgcttttaaatgtgtcatctgatgaaaaatgtttacccacaacatatggagaattgaggccccctcttggaaaacaccgtttaaaggttggttagtttgtttagcatttgaatgatgtatatttaagcttaagagcaattcgtttcttttgataccattggggccggactactgttcattgtcatcttttttcttctctccttttattatttttatatttttaaaaatattttctctttctacataaagagtctgataactatctgaatgtactattggatctctaattgctggcttaactggttcctttgtatcattcagattgttgagttcattgctgttctattgagatctgctaatgaagctgcagagagggaattagtcaactcaggaaccattagacgagtcattgatcttttcttcgagtaagctgttacatcatatgtagctctgaatgactaagttaaagtaattgcatttcttttgctttaaaaatgctattgcatatcgtgtcctaaattaccttgcttctcaaatggatggttggaaagtaattacaacttccatcatcattgtaagagagacaactttggtgattaaaatgtaatgaacttatgtttggctaacttgtttgtgtttttcaattcatgcaggtacccttacaataatcaattgcatcatcatgtagaaagtatcattttgtcttgcttagatagcaagagtgatgaaattgttaaccatcttcttcgggagtgtgatttgattgggaaaattctccaatcagatagacatcctgttctttctggtgatgttgtaaaggtaaataaactcagttgcctgctatatgctttattatatttgtatataattttctcatttgtgtcatcgaattacaaattgtcatagttattatagttttcgtccattatcaatttctttttcatgagttgagattccaaagaaaaatatgttgtatattagtatctatttggctgttcatttattcagattctgatcatgtgtaacttgcattgatcctgtagccaacaataccagcccctggaaaacgtgcaccacgggcaggaaacattggacatattacaagaattgctaataagcttgttcaattaaggaactgccagagccgcatccaggaattttttcaggtggttatcttgtcctgtgagctgtggctgatattttagattagatcgtgtctagggatattaagatgaatattttttgagttttttgttttaattttgaatgttgacttcaaaattaacgtgcaagcttttagaatataccagtaataaccctgatttaggtggctctaatatttttgttttgagcattgtgttctctactttcgacatatgatcaagagaattgtgatgctgatgtctttttggtcccaataaggttaattttttaaatgttgcctgacaaactttgcttgttatactaggataatatcgaatggagcgactggcaagctacagttttgcaggagcgtaatgcggttgaaaatgtgtaccgatgggcttgcgggtatgttcttatttcagttatatatatcttctacgctatgaattctcttatttgaaaaacatggttgtagatctggatatgctcaatgttctatgcagtcttgtgagttgagacataagcatgtcatgcaatggttagagtttcgttcaacattttttgaaatctcaccaagataatttatttcattgtatgattctggcatgatcttttacttttgcaaatctttccttttaaatgtggattgtttgtcatactctgccgattatattttcatgaacttttgggttgggggaagatggtaggatatcttccttggagattttagtgtattaggagaccgtgtcattgcttttcttcttttgtattttgttttaagtgtttgacaaaatactctggccaactgttttcagagcatgtgactttgtaataagcattaaagctttgtttaataatcttgatatttcacagtaatattagcttctccttgttgatttattgactttgttgtttaccatatgcagccgaccaactgctttgcaagacaggacgagggacagtgatgaggatgacctgaatgacagggattatgacgttgcagctttggcaaataatctaagccaggcatttagatacaaaatatatgggaatgaagatgcagaagaggtacagatttgttttttaagttttcaatcaacttctatgttttttctaaatttttttcctttttttctttgccttgtattttaatttcaattatctgatacatttttgttgcaggaacatggggctcttgatcgtgatgatgaggtaatttgttcttacatatgataaaattcatcacttacattttttttccacttatgttattttaacaaaaactcacttcggtttggtaaatgcaggacgtctactttgatgatgaatcggctgaagttgttatatcatcccttaaactcggtgatgatcaagggaggtgagttggccatttttctatggtacacatattatcttatgatatgaccgaggaacttggtgatggcatgaagcttaatacaaaaattttctcacacccgaataaatttaattgtcacttgggactttttataaaaatagagattggctttttgtttcaagagaagctatatgttacgtgttacctactaaactatatgcaattatttatgcagcagtctattcaccaattccaactggtttgcattccaagatgacagaatcggtaatgcgcctgctggaacatcaccctcagatatgatggaagatataaacataaatggaacagcaaatggtggcaatagcagtagtgatgatgaggttgtggttggtgaagacgatgagctcgctggaaacaaagattctaacaatggaacatccagttctgatgcaaacgccattaatggatctaatagtggaagtttgaaccaggagagcgagagggcaagtgcatctcattcgcatgagatgggattttttagatttgaagcaactgacaatgaggacttgtttggagataggccattacccgaatgggttgggtggggtgagtcttcagatttgcaagttggtggctcaagtgtgaacccatttgttgattcagataatccggatgttactgattcaattaacgagttggtaactcccagtgaaagttctccttcaactgcagattctggactttcgaatggctctccaacaaccgccacaggcagtgacgtgggccagagaaacgtggcagtaccttcactgttcgaagaggatgttgaatttgtaggtgtggaaatagaaggcaccgaaaaagctatggaacaagcccttaaagaagggatagttggggaagccgggccattgaagagaaacgttaaccctaaagtacaagagaaggagaacactgacgatggacccggaatgaaagaattcaacgatgcaaattattggagggttgatcaagaggtggctgtcctcgagtgatgtgataatggttaaaatcctgcttaggctgtttgaacccgaaagttgggtccaacagccatgggccccattttttggttgctaacggcttatgcagctgcgacgactacgacagatgatatgtacagtatatgggatggtaggttgtgttatggtttattatctctgtttaattgttgtaactttctttgttaattattttttaaggtttttgtttcctctttggtactgattttgggactttcccacatccttttttcatatttatattttttatttcatatttttgctggccagtctttccttcctaattgtgggactttaatattatcatttttgaatctggacaacccaagtatgatatattagttttggatttctcagtttttgaaagattctaagattttcttttattagtagtagagttgtataataagatgttgtattattcaatttcattagtaataatgtattattgaaggtggttttattagctgccttttaattattattgtgttttggatacctatatttttgaacatattaaaagagtaagtaatagtattattctattttagagttgggatttcaatcttccatttggagttttgaaatttcaaatgttgttacatgatgtgatatgtacattattaggtttgatttgattcatccctatctagagttgagctatttgcccttattttttgtggctgtggtgatgatgattacttgtggatgaggtaatgccctgattattcattagggtgcatgccatttcactttcaataatttaatgagaaatgcttaaagtactactggttactggtgtttagtatcttttcaagtgttatattgttatttgtaaaattaagtagcgagttgtatcgtatataatttaatggagtgtgctgttattgggcaccacaacaccttttataacgattgattagcgatattctataaaagttattttttaaaattgtatgtgactcgatacttaattacactaatagtgtatgacgagtatgatactaagcagtattgtcttttagcaattcttctctttaataaaataatttttaaaaaatattgctaacttattgtaagttgctacttcttgaatttgttgggcattcaataacaatgctctaattttatattataagtagtgcataatacttttcaaaggatcatatcgttattatttaaattaagtattaaattctacaatttaatttaataattattaaataatattattattcattaatttatgatactactaggtaccattgatacttcataataatcttgtaaaattttcttaatcctgttgaactgtcaaaaaaacaaaaactttttagaaatctaaaacaatcacttttacctttcagaaatctaaaactatcttcttggttgaataatatccttttcttctgctgggttgttctcaatgtagatcaagaaccaaattgggtgtaactacaaaatttgggaaagtgaaaacaagattctcattacagatattgtttataggaaaagaacaggggaggggagtaaagtttaggaaggtatagtctgtttatgcttgcacctaaaatagtgtgttttgtccattccttttagcattataaaagtaatatttcttttaatttatttttttttataaatttctcctactaaataatattataaaaaactaaataaacccccttctat

SEQ ID NO: 187922 - DNA, 3857 bp, Cannabis indica
atatataaagaaatagtaaaaatattttcctattcacttgttttattcatatttctttttcaattttttccaataacaacgtttttcttttccaaatttttatatcattcagatatatatatatatatatatatatgtatatatttatatatttcctatgtttatatacttcattcatttaatttgatgagagaccccacgaagttattagttattaatttgaatgggactttcaccaaacaaacctctagctaaaaaggatatattattattatataaatatatatatttatgtatatatgtcaagaaatttattaatatcactttataatagctaaaatcagtggaacacttagattcatgtggggtacatgacttcactcacatttcactgattacaattttgatataggtttacttttacttttttatatatattttacgatattttataaaaacacaaaaaaataacaaaaaattacatgaaagtaataaaaaaacaacaaaaaattacataaaaataacaagaaaacaacatcaaaataataacaaaataacataaaaacaatatacaaataacaaaaaatttatcggttatggttacaaattttgtcatccaggattggaagttgtgaatctgaagagcatatactggaagcttagtgtggatctggaaagccctgtgcgaaaggtcttgtagaatctaaaagttacttccaaataagcttgtaccgtgtatggaatgtctgtccaagatagcttgttactaatctggaggtacactcccgaacaacttactgtcagtcttgaaggtccatccgggaagaaagccatgtacgtatccggaaagcttgtgagtttataaagcttctagattgtctgtactaaaagtgtatttttcaagatgacgtggattattgttactggtgatgagttagatcatttaaggtgatttaaaaatatgccacgatgattcagaagatatttttagcaacaatatctatatagttgtaaatctttgtaacttgtgtgagaatcagaccaagtttactagagttaaatcgtgatagtgtaaggttgagagaaaaacttcttctcgtaatctttgagaagtttgtaaagattcctgtaactttgtaaacattgatatcaataaagatatggttgttgctgtttcaaccaagatgtagagcattgcacattgctccaactcgttaaacctagtattatttgagaagttgttgctatttttttctggtggtttcgttcttgggaaattcgggatcagatagtgaccattctctttttgttgtgtcgatttgtgggcaggttcgccatgtcttcttcagagcaagctggccactgcaacacggtgggtggtaattcttttgccagaaaaaggcagaaacttgtggtggctgatttcggcatgggaggatcggaagatcacccccagcctccttacgctcaactgaggctgagccagcctagggcccttccccttgcttcatcttggatgccaattgtggggttcgccttccccaggagggttgttcccttcgaccctctggagatgcagagggagaaggaagcgaatagggtcctaaaagagcatcttgaagtggagaggctctaagtagtccggcgacaggcggctgtgatgtctgcagtccgcaaagcggagtgctaatgacatgcacgctatgccaccatcaggacaaatcgtggaggtcgaagccctaaagaaccgactggcctatcggttgggggagaggtcgctccgtttgctgctgagcttttggaccaagtggccggaagcacctcggaactacccattgaggtttgggcgtcttgtagcattacgaacgccttcgcactgacccatttcgcaaagaggcaagccatcggggtaaggcttcaaaattttttgctttttattgagtttgccctgtcccctgtttttgaatcttcaacttctttgacttgtccttgtgatttgacaggcagccctgctagcgaaaaggactactgcaaaggttgtcacactcgcaacggagttggagcaagtctgggcgacaaaccgcaacctaggtgctaccactgagaccctccaagctgagcttttggatgtcgaatttcaaattgggggtttgctgcaagccaaccagcagctggaggaggagagtgcctgctagtcccgcctaatctgaaatatgaaggtcgttcacgacctttataatatggagactgtggagcggatgtctggtgcaggcccatcctctccaccaagcagcgtccaaccctgatccttcggccgactcgattcaaaatttgtttgttcaatttatttggtgaaatatcgcattcaaattaataactaataacttcatggtctctcatcaaattaaatgaaaagatatatatggacagggcaggtcgtccaattgaatgaataattataatttggtccaaagccaaattaatattcatggtactgcacaacactctatctaattacagttaccacttcattttactaaaaccctatatatattagtttgatattacgtgcaatgcatgtataattagttttctttttaattaagtttaattagatgatgttaaatagaatacatgtatgtttaattttttttaattagataatgtatttttttttataatttttgaaatagagtttgagattttgatctttaaaatatttttttaactattgatacattgatgtgtcatttaaatgtgattatatatatacgtattttttaaatttttttaaaaaaaaattaattaggtaaagtatccaataatcatatattgtgatttattatattcttaatcaaaactcacttaaccaaatttgggtgtgtctatatattttggatttgtaaactagatataaaagtttttttattcgcaaactttacaaaaaataatgtgtgaatcggtttaccataactaaaacataaatcaatcaattcattattacaaccatttcaatttaaaatataaaataaataataataataaagttaaaaatatttatgatatttcaaatttaaatttttttatataaaatatctacataatttttcattttattttaatttaaagttaaactaataaatttaaaaatataattaaaaatattttaaatttaaattgaaaattctttatataaaatatctatataattttattttttaaatatatataataatattataaaattaataaataatattttattaagtaataggatattctgttaaagttaacgcaaaaatttaaaaatcatcgttaaactaaagatttcattaaataaccacattttatataaaataaatatatacttaatgtatttaatctcacatatttatataacaacataaatacacaaataaataaaatatcatatataatccattttcatttttttttttggcctatgttttgtaaaattagattttattttttaaaacaatacaaaataatattctaagcttaattttttaaaattttttaatgtaattattttgaaaataatttatagcaggaataaatataaaaatgtaactaattttatcataatacctataatacctatatatatatatatatgaataattaaataatttaataatcaattttggtggtataaaagtaagacttgtggcttctcttctcctccacactactacatacatactttctttctctcttacacacacacacatatatatatagttataaaataataatatctttctttctttctatcttttatatataatataatgaagtcaataattttagtgatgatgatgatgaccactatggtt

SEQ ID NO: 187923 - DNA, 1812 bp, Cannabis indica
tttgcaatgatataacaaatctggggccatggatggagtttagtaatgattagcgatatttagcgatgtttagcgatgttttgcgatgtgtttcgcaatgttgtgaattggagacatttaaagatgttttcatgattttgtgatgtttcgcgacatctagcgatgtttcgcgacatcgtcaaaaattagaaaaaaaaatttttaaaaacaagtattattgtgaattggagacgtttagagatgtttcaaaatattttagtgtatttatttaaaggtggtatattaaaagaataatctaaattttcaagtatattttaacaaattaaataatcttttaaaaacggctttataagtgatgtcacaacattcattttgaatgtacattcatatatacaaacgtacctggactatatttttgttgttccataatttgacgacatctgtaattacaaatgtccttaatcttatcttatcgtatgaataaacacaaccttaactcaggactttgtactttgtaaccaaacttgttctccttcttcatttgccacgtattcactcatgacaagtgtcaaaacctgaatcaactatatatacaatcttagttcagaattgaaaatacaaaaccaaaatcaatccttaaagaagaataactaaaatgagtgaggaaatgcaaatcgaccaagaacccatcaaagaaaatcaagtgggagagaaacctattacttctcaggaggcttcacctgagtcgaccgtattgggcctggcccagaagaacggtgaagcctcgacggcccaaaagaaaactaatcactatgtttgtatgtttggtcactcaacgatcacaacctcagatgatgatcaactgagtgatcagtctgcaataacgataggagaagctctagaaacaacggcgaaggttattgggctcaagacgctgagaaagagcgacgcggcggcgattcaagctgcggaggctagagctacgggcagtagtactgataccattaaaccaggtggcctcgctgagatggccaaatcaatggagaatttcagtagtggtcttgatgtggacgacaaatacaagtataagctcagagatgttctcactgtacgtatccttcattatatatattttatgtatacatacattaacagcagtggcgtactcacaattttaattagtcgaagggggcgagttttggctgctaaactcttttactcagcttaaattttagctataaaatcttctaaactatagtatatgtttatattttttttaatatattaatatatttatatcagtacacataatattttaaaataaaatttaaataataatattaatatattaatataaacatgcaacatgcgtatacatataaacagtttaggttaatagttaatcttcaaaaatagaagatattttaaatttattaacagtttaatgctataaaagatttaattacctctaaaatttaaattttaagtccaaatgaaataataaggaactaaaaacaagttttatcgataagaattcaaatccaaaaattaaaaatgccattataaatataggttagtttgtaactaataactaactaaaatttatactttatatacattcttatatatataatataaattaataatatgtacgtagggcgctattgggaatatggtggccgataaggtggcgacacgggaggacgctgaagcgatagcaaatgcggagatgagaaatgatccgaatatgatgatagagcccggcggagtagcggcggctgtgaaggcagctgccgccatcaacgagaaaaa

SEQ ID NO: 187924 - DNA, 1259 bp, Cannabis indica
caagttaaaagtaataaatgactacagaagtgacttgttagaattggaaagttacttgctagttgatttatttcttacaatgaaaatatttgaacaatttctagtgcagataccatatgttaagagtttaaatattaggcttctaaaattagttcttaaattttaagctccgacaataatttagtcaagtgactataattgttgatacttcccaatacaaacacacgcttaactgtaacaaaacagtaaaattgaagattttataaattctataaagcattagaagccaagatcatataaaaccacctcataaattaataatttgtaggacagcaaaaaaacaattagatgtctctattaaacaatatctgcagcaatcttattgcttttcgttcttttgtgacgctttactaaaatcacaaaatgccaagaaaaaaatacaatatctgccaatttgagctacggctcttggataacaaatttgactaaatcatatacccagaaagatagattattacgataggataaatttcatgcaactttgttttgttagtgtgtacaaatcatttttatatatacacacacaaatatatttatatatattagaaacagttggtagttaccatttgtaaatgcttccatttaattaggagaaaataactatgttagaaagctaaaaataaaaaagatagtactaatttactgaccttgagggaaagggacttcttcacttcttccaccttatcttcaacatccttcttatgtttcctgtccaagtcactgacagtatcagcccactttatcttgtcttggattgacacaagaaggttgtccgatgtagccaacctagtttttcaaagaatagatgttaagacataatagtatataaacaccagtaagatatagtcttaaagatgaatgcggtaacaccttaagatacccagcaccagataaggtgaccactttatgaatttttatgaatggttgaatttaaaagcagaccccactcgttataatctaatcagcgttagacaccatcaaccacatataaagtggcacaccatgtgggttgtccaccttaacgtgtctttataacaacactcaaaaccattaaccctatgtgctagctacaaaacacacagggtagcacccttttctctaatatatttttttaaaataaattatcagaaaaatctaaaagatatttaaaaaaaaaataacgattggtaaaacttcttttattaattcaaaaaaaaaaa

SEQ ID NO: 187925 - DNA, 4385 bp, Cannabis indica
agcttgcgtaggtgagtttttttttactttgtacggctgaaggtttagaagaaaaggtattattaatatttagtttgtgggatgtataaatatttaaagggctgaccaactgtattttggcaatatagttgctttttttgtatatacatgaaaaaaatctaaaaattaagcctcaatttgggtcagttatataaataagaataaccactaaattataattagttatacattttcaaagtcacgtattgaaaaagtatacctcatataagaataattatatcttaataaaatatatataatttataaattcatttatgtaaaattaataattttctttcaaattataatacatgtataaatactatatttactcaaaaatattttattatgatatagtataaaagactgtttattgttatcgttattacactgatattttgttttaattttttttttctaatgcaattctatttagttatataacatcttaattagaatataatttgtttggttccaagtatattcttagataaaggttctcaagtatatagatgtagtagatgttttcctaggtccaactctaatggaaacatgctacttacaaattaccttttacttaaagttttaatatataaaaaaaaaaatagaatttagtatgaatgtgcatagggtttcatcttaaaattaattggctatgagaatagtaacgtatccttcttatatatggcaccatctttccacaaatttacaatataggactatttctaatacactctcactagaaagtgtaggtataacgaacgacctttaagaagccacagtgtcgaatgtgacattatttctaatacaccctcactggaaagtataagtataatgaacgacttttaaaagaccacatggccaaacgtgatatttgaaaagatcccacaagatcgaattgagaaatttgtgaattttttgaaacaggtcaaaaggggtatgaaggtcaaaagcggagataacataaattttttaatttctctaatacaatattataatttagaatcaagttgcataaattttcatcgaaagaagtaactcatattttttttatatatgacattagttttccacacattagcaatgtataactattttcaataatatacgtaagaataaattaatttagctctctatgaaatatgattttatgactctcatttagccccacttattaacacttccatatctgaattggcctaataacccttgaaagatacgagaggacattgtagtagtgtggagcatcatagcagacatgaattgccaatacagagaaattatggcagcgaaaagaaacaattaagtacagccaaaaaatctcaactgtcatagatatcgaatttatatgtatgttttcgtgtcttcatatgtgttggctcaggctaacctatacaacaactttttcatgtcatagatttaagggtgaataggagcacttcttgtctcattgtaaaaacaaaccgaagctagctaagcatcttttcataaagttatatatattatataaggttgggttgggtgtccaccaaaagatccaacagccaatggcaaagggtaaacaacactaacttaaccaataatccaatccagaaaaagtgatatatatatatatatatattatattaatataaattatttagttagtacatagacaaaacaactaaaccacccatgtgtccataaactctctagatgaataaaactagtactaagccaattattcaatttcaaccacaatgacagaatagtagtcttctgagttttaccataataatggcctaaaagtaaagaaccaacttcaaccataacatggagtggtttgaatttcaaagctttcaatacagattttcaagtacatcaacagatactagtttgagtaactatgacaaagtactccagtaaccaacattaatttaatcttctgtttgacaatgtatgagagaaaaaaaatacatatttctactgatcaaaattacataggtcaaaagtttacaaggtatagcacagatacaaaggcaaaaaagcctaaacttacaaaatagtcttgtttcctcttaaacattcttggagtaacagagggtacaaattttctaataagaaactgatatttcattcttaaacggctatattgtgtttttctaaccaatgcttacatgtgtaatagcatgtatattcatgctccctcgtaagacatgtaattaaggactcaaaattgttcccaatcatccacattattgaaaattgttaagaaatctcacataagacagtcaaagattttcaccttatttttccacataagacttaacagttgttaaccattgtacaagttcaatcctatctttgttcatcatataatcatgtaagaagaaagaaagctcctcatcaattccccttgctcctaagtagtcacgaaatgccttctgaaaaaaaaaaagaaccaaaaaaaaaaaaggaaaaatcaaaccagcaaagtaactaagaaactcatgtccacaaaacattaagatgcatttgatttatgatgggaacttgctatcaatttggtaaggacagtagcaaatagagcagaaaaatagagctaagtgctgctatattgatactaaaagataaaagtaaggaaacaatgagccactgggtattcgagagacccaatattctcccaaagccaaagacaagagctactgttcagtacaaattcattcaccactaagccaaaaccaaaaagcattataaaagaattacgaatgagactatctgattcaacctccactctataaatcataccaatatctgtaccctttttatttattatcctaaggcctatcaatttacaatggtgaattgaatgaatccatgtcccctccccacaaactaacacacccaaatacctagagctagcctcaactagcattttatatatgattataaccatatggatttgagttttttctttcagtctttctctaaatttaaattaatcaaagattgtgtatggtaattaacacaacagaaatgaaaatgaatgagattcacacctgatatcaggtcccaaataaggaagcctgttaagtttccgatcacggtgaagtgaataaacatggcgaacttcaaaactatcaggccatgctgaacatacgaactccaaatcatcagaactatctctcttggaaatactaacaagtacactgaggcgtaaaatcacatcttccccatcaccatcatgcttgggacaaagttcataaccatcaaacatggtaatttccaacttaatttcttcatcatcaccaaattttcctctcattgttatccattgctcacaaggtcgatcttgcacattaaatgatttgaatttcgtaggaggctacacataaattcccagcacaagcaacattttttaatgaatatcaaagcaaaacatggaaatcccatcaataattaataaaaatattgattaacgatttttgttaaagttttcaagcgacactagaatgtttttccttgttgtcaatatcgttttactccattacaggattttacagtgaagctaataaaagtgggaaccaaaccaacctcgtgtataggagcgtactcaggttggtacttgatctcgtgtcggaggattctaacgatgttagcatcgaggggtgatgtaggaagagaccctgatatgtcagtaggagttgaatgagattttggcgaaaggagaggaattgtggaatggtgaagaaaattatagaattggattgtgggtgaagaggaaggagaatgagaagaacgaaggcgaatcgcattttgagaagctcggattaaacgagccatcaaagctaccatctttagggcttgcgattgaggtaaggagagggtttaaggatttgggggtttagttctctgagtctgttattgccttcaacaaaacttttaagtgtaaaaaaaaaaaaaaaaaaaaaaaaaaaaaaaaaaattaaaaactagaaatcacactatgacaatcatcccgaaaaagaattttcagttaacaagctaagtatctagctaaagatataccgagtgagaatatgaattattacaaataatgcgacttatataagactaaattatctctaagatttagacaaaacaattttaaactacctttaaaagacatccgatatgaataactaaatagaccaaaactagctaaaaaaattaatatagaaaagtggatcagcctactatacaacggttgtgattttttagataaaataataaaacataattattattttaacaagaaaaaatttatcttagacttttttcactgagaatgttactattgtatcgaaactaatttgttatgtctaatt

SEQ ID NO: 187926 - DNA, 661 bp, Cannabis indica
atgagtgagtgtgtgtgtccaatggttcctagtagtggtggtccatccccaaaagtgaaagatattccacaagtcttggttctcttctcttctctagaaactaactagaactagtccaaaacgccatagatacgaaatatataattattataattattaaaccccctaaaaaaatactatgtttagatgtattattaatttgtaaattattataacaccacgataatacataagtgtactatctgttttcacgatttcttttactaaatttggacatcctatcaagctacatggacggctatgatcactaaaaagtagtggatatgactagctcattgattgaacggccaggatcatctcctggcttgactaattatccttatgagaatctctttaggagtgagtggaagacacgtgtagggtgtagtgaataggcgttgacttatgacccagcatctttggaagtggactaaaccttacaaacttctaagcccatatcattgcctatctttcctctcggcccacacggaacatagcccaagtggctctctcccactgtgatgtcctttgcttacaccaccaaagatatcccaattattgtagcaaattcaactctaatattttcggtttgacgtaaaaatttgaagataacatttttttt

SEQ ID NO: 187927 - DNA, 983 bp, Cannabis indica
aataatggtccactcggcaactcgacattaataatgttttcccgagtagagacctccatgaggaagtttacatgactattcctcaaggactcattcttcccccttctgattgtgtaggcaacaccatggtgtgcaaattacataaatcaatctatggactcaaatagtcatcgagatagtggtacaaagattcacacaatctcaagccgactacacaacttattcatcaaaggctccaacaacacattccttgctttattaatgtatgtggatgacatcatcatcacaggccctaacctcattcttcttcaaaaattgcaaagtttcttacaaaaacatttcaaactcaagactctcgagccactgaagtgctttttgggttttgaaattgctcgtgcaccagagggtctctgtctcttacaatgaaaatacattactcagcttccagaagacacaggctacgcgggtagcaaaccaacgaaaatgccaatggacccttgtatctagctagatgaccaacaaggcacaccccttaaatagccttcctcgtatcgtcaactcataggatgattactgcatctcactctatcgagaccaaacatcgcctatgttgtcaacattctcagccagtttatggtgcatactcaaacccctcatatccaagtcttacatcagctactttgctatttgaaaggaagtccatggcagggactcctctactcaataaaatcatcattgcatcttcgtggcttcttagattcgaattgggcctattgtcctgtgactaaccgttcgaccacaaccttttgcatatttttaggcgactaactcatctcctggcgtaggaagaaacaacctaccatctctaaaagctccactgaagtagaataccgtgcattggctgcaactaccagtgagatcacatggctccaagttttactcaaaagattttcaaattccacatgacacaccagctttcatct

SEQ ID NO: 187928 - DNA, 3623 bp, Cannabis indica
ttattattattattatttattcagtttcagttgcatttcaactatcttacattgttataaactagttttttcttttcttttgagaaaaaagattcattttgtatcatcactccagaattattttttctttttcttcctgactatctcgtatttcatttctgatcaataacattggctgactctgatctcatacataaaatttccatgcacataaatggtagcatataggctgacagtattaagggaaagctgtcagcctaaatttggtaaccaatttttgaaatagtgatggttatcttcatcagcccgggagagggcaccaagaggagttactgtaatctgaaaattacaataaaaatatcatgttaatcaccattatttataagcctagttcttgtattataatgtttttttaaagagaaaactcacatatccttctctcaaggactttttatctgtttcatcatcattatcatcactaaactgaggattccaatcctgaaaattttcattccatgtcaaattaagtcttttttgtttttgagtaaaacatgtaggggggagtagagtgtaaagactcacatgtcgttggaacaagagatgttcatgttctgatgcaattatttgtgtatgcttttcttgggatagttctgctagcaatttttctatttgtatgttaggagttgtaatttttttccatcccaatctggatctactttttccttgcttagttagcttgtacccctttaaaatttaaaaacagaaattgaaatcccattatgactatgataaagtaacattatatatgcacaatctatgtatgtatgtatatataccttatgattagcaatatcagttggaaaatccatattcagaaaacacccatttgggaaattttgattcttgatgtctaccaaaattgcattaatgataggcaagcaagccttggcagaaagcaagtagtcattgacttggctcttacctgaactcctgaaattttacaagaaaaaatatgagaaaaacatagcaagatagaggcattaaataatatagacttaccattgataagatagtgaaatagaaggcacaccatcaagaaaagcctctctagcaccagcaacagtgccagaatacacactacattgtaaaggaattactctagttattaagtcaatcaagtccaaaaatcagttccctaagtagagctaaaaatgcatatgttatagcattattaactacaaaacacacttattagattcttgatgttagaggccttatgtaatcttcactttttatttttttgagaaataataagtgaatcctaacaattagatgtgtgtaagaaataataatgataatgcaagaagattacataaaaaattacgaacatgttatatccgcagttgctacccttgtttatgccactgattacctgtgtatgcacgtataacagcattagcaaaactacaaaaaagagattttatcaaaaaatacaaagccatttagtcaatgcaccatgattagtatccaaaagatacttgaaaatgaagttgatattaattatagggtactatgcttgttaattaacatcaaaacaagaaaaataccagatcggggactgaaggaaaaagtgctttggagattcctaaagaaacacaatctactggagtccctgcaaaacataaaagggtttttagaacaataactactttgtaagattccaactttttacttagcactggaaaattagcacactcaaaaaacaagtaaactcattgttctaattatagaatattaaaagcgatactcaaattacttatgatgtttatagcatttaatttgggcacttagacttatttgtcaccaacagatctaatggtaccaaattgtactaaaacataacgaaaggtaatttttataaatgtaataattagtattttttaaagatgcatgaaataaaaacaaaccagaaactgaaacagctgttgctccttcaatctttactctcttcacaactagaggatgaccatatgtacaatgacttacagctgatttttctctgtattatatacaatatacacacacgcaagtaaatagtggtcatgagccagaagaatgagttccgttgaccaacatggtcctgtgctaaccacttgaggctagctcaagtagcataagaggatgcgtatgttggacgtcttgagttcgagtgctaagttatgcaatataatatataaacgtttgaataaaaaaaaatgtagtcctgtactatatatgaaaatttatataacttacgagtcaggtgcacaaacttgaacaacataacgactagccgagactagaacatgaaccagagctagcaatccctgggcgccaatgccgtcgtcattcgtaaccatgatcaccggcctattaccggagatcaaactgtcattttccatatttttccagctgaagaagaaagaagaataaatggtttagtggtcaactaatgcgcttggcacattatgacctgcccattatgttctcggacattacaaatgtgattcattacatatatagaacatttatgagtccatgaccattaatttcgaccttgattggaagatgcatcgaatttcattcttagtaagatgtcatcattgtggataagctagctactgaagaaaacacatggaaatttcttatctttgttttgttcgtaggaaagacaagggtcatcttccaattactttactgtgttttttaaatgaatttattattgttagtttttttttataagtacccaatgataatgtctaagtgtggattacgttgttgacttataaaaacactcttgtgtgattagcattttcggcgtataaattcataattgattaatcaatgattatgtaatgctaaacctatctctacctaactttttttttttttttcttcggatacgattgaatagtaggagttcgtgggctgtgaaaatttatctggccaattcccaatatcttttaaattaataaagctattttagaataaataggatttatctttcaaaaatatgacacttgtagagttttgcttcttgaatttttttttatttgattttttttttttttattttattttttttattttttttttacttagaaaaatcttctcgtagttgcattctgctcattcgtttaaataatttattggtataacattgacatgacattaatctagctcaattcaagagttcacgtaaaaaataaatacataaataacagtctattagagaattatgagaatatatatgttgactcagtttttagacaacaatgcggaatctagaatgtgataattaatgaatttaaataatactaatgaaagaactaacaaatgacatcagaatccttatgaaggtccgatcctaatgtgttagtaataacctactcccttttttgttatatttctagataacctgagccaaatgagtttcttaaacactctttagaattcttacaatattttcacaatatatagtgttgaccaaaaatcaatcactcacttattttgatgataaacaaaaatttgattattatttgttactaatcctttttttgattgttttgcaagtaaactcacaa

SEQ ID NO: 187929 - DNA, 4223 bp, Cannabis indica
taactaactctttctaacaaacaactaactgaacagatactcctaacacaaatcaaccaaaagatatttgctgacaggtttgaaaatgaagtaatcaccttttcctttatctatttgagaagtttttttcttttcgtgtgttaaacgagcaaggacgatagaataggggaacctaatgttattgcttcagagatgtggaatctacacttttttaaccaaaatctaggatgttaaaggtcaaaactgttaccttccggtgaagagcctcacgcatcccacctggatatagtaagacatgagacttggaagagaaaagtttgtagaagttcattgcagacacaggaactgcccccataattctcattgactcgaaatgtggatactcaggtaggcttcctttagctactttcatgaacatcataggatgtgctattcctctgacaaggatattcctttctatcaacaactgagatacaaaaggagccaattctaatcctagcaacatatgataaccaacgaataagacaggaccttctgaaggtattcctgcaaggcttctcactatcttcccatcatctaatgtcgagaacatcactgggctggcagccacgttaatccatctaagtataacataattgatagtgattagaattgggcaagcaagagcgatattaaaaagcatacatgaacaggcacaagtgaaaaactgcttctttaacccatacagcaggctatggattattaactattattaaataaacaagaatcaattttcatacatgaaacattagtattacgatgcagactaacgtgataaaagcatacaaagccaatatcaagcattggaaagctagtatgttcgagattaaaatcatctcaaaagtacattagagtcctactcctatgatgtgtatacatatgctagttgcaattcttggtcttctctgttttagtcaataaataaaactcattggctagtctacatcagcaaacaagagagcatacggtaaaatagacgaggataactagttctatattcttcataagttatacttactggtttgattccaccatctttctgaattcataaggcgttggtggaataaaatcagaaacataatcatgatttttcgaacgacgatagaaaatagaacccttgatgatagttaccacatcagtttcatcttcctgcatgtattgggagccataggattgcaattcaaatgaagtttcagatgtaaaaataattaattaacaaatatatattcaactactattttagccctaccattagaatgaagtgaccactctcctcaaaattgcgaatcctagaatttggcaaaatttggtagagtctttcaccttcctccttactaggtagcaacaggtcctttccgctaaagaaaacaaacagcgaaagtgttgtcattctgactaatgcacaagcttaagcagcaaagaactattataatgaaaattatggatgagttctaaatggctctgccacattgcaaaacaataagcttctgtgtgctaattttcactaatgtcatgagtaaagtgtataagtaaatttaattactcttctttttgcttcttcaggtttttcaaagaattcagctttgacagttgacactatacataatggtttgggacaagaattgtaactctattaatttcaatcagtaatatcagttagaaaggaatggatataaacctgcaaagtattagagtttcggcttttacagcatggaggcgtgaattagcaaatgcagaagctgatctaagcatttgtagcttccaaagtagtgtatctcttggtaaaatgtcggccagaacctgttggcttcaaccattgatcccgaaaaaagggctagttaagataatgttattgcaaatcagcatgaaaaagtacaattgatgatgtgataatttactatgcactagagcattaccacccataaaaaaatatcttcttattaaaaaaaaaaggaatgggccaaaggctagttttgagaacaatataaattccaatataagtgtatgccaaataactaagtgctaaaaccatttcttacggggagataagacgacatttcatttacaccacgggttagctctccaatcatctggagaggaagtcccttctcaaaactagccttaatcatgtttaaaggatcacctacaagaagtacagcacaaatatgaattcagtcaatcacagcactttgaaacgatatccagcatagagaaaactttaaaattgaagaactaggaaagcaaacctgtaactaaactgaacatgtacggtaggcttagttggagggactcgggcatgacttccaataaaggtgttaggaattgaagttgcgacttgctgaaagatgtagctgacaagaacataaaattcatcaataggacaccaacaattatgaagctgatatgtaactatagtttcagagaaactagggtgttcaaattaactagcatttttgttttatcatgttcagagctgtaatttgtgtcgtagcaagcacattgtttgagcaccagttcatttttgttacgggatagcttagcaagcttgtagtctctttactattaaagatatatttataaaccttaaaaaaaattcccagtgtctcacccaacgcatttgcaaatttaattaaacttccactttttctctatgcagccaatgatgcctaaatattcgtaagaagaagggtggtaacaacttaccgggattggctaaaatcagaacgaggtcaatgtcagggttaagggcagccacagatagcgcaaggcatgccccaatattctctccaacaagatatatcggcctatttggcgaacgatcatgttcaggccttattgttctctcgaccaacttcaccagctctgatcatggaaattaggggaaaggttagattacacaggaatacattttctttagcttacagttgagaagtattttaagtaagtaggagtagccatagcaacatagaaggttgataactagatatatatattattttttatatcatacaaaatcacatgtcattttacccgacacttaacatgtatagatacacactgatcaaatgaaagggaaagaagacgaacccacaaaagatgtgcgatcctcaacgggaatatgcaagcaccatatgtcaaatattcttcatgcacaattagaaatcaataaaaattagaaaataaacagcattagtagctggattaatgaagttaactgtaatggtttggtagtaaatgatgtactatatgaagatggtacttacttgccgagcttttcatgatgctttacaagtccaagcccgacgccatcaattcctacacaattcaattcagtacaaaacatagatcataataaaagctcaattcagtacaaggtcaaatggtcatttcacactggatttctatctaccaactatgattgtcttctttactcctaataaaaaccaaaaccataaattcataatcattgattgaaagacaaaaagtcagccgtaatcaaataaagttctaaaaattcccataatcaaattgccaaaaaggtctaagaatcttagaaagcaatgagaagtaataataataaatttaaaaaatatataaaaaatagtaattagagactaaccaggcaaaaagagaagcagaggagaatcattcaagcgggacccgcactccaagggcgagaaccaacgaggcggtccacagtctgacctgatcaaatccttggcctgctcaaagtaatcctttacactcgttcgccgttcctttatctgatcaacctcgttcaactcagcatgagaccaaaatccttcctcgcgtgaaaacgacgtcgtatgagctgattcttcctcctctaccgaattcttgagatttctcttatctgagattttcgtcttcgccttcgatgattggtcttcagtggtagacacagacaatcggtgagtcgaaaaggaaaccgaaaccgaaatcggaatggaattattacttgaacttccaggaaatgacttggttccagagcaaacgatagaagaaaagttaaccggaaagagagaagaacctgcggacgccatggaagttagctcagagagctgaagatcgaccagtgaaaaaccaagctagctaactggcggtttttacagatttaaagccttaactttctctttatttatttattttaattaataaaaaat

SEQ ID NO: 187930 - DNA, 3346 bp, Cannabis indica
tgtaaggtataactatgaaaagccaaaatagccgagctacaataaaactttcacctgcgaccatagtatgccacccttgctttcccaataaagcaagattaacgtctcaaatgctcttaaatcccaaacctctgacatgtttgtgtttacacattcgagtccatcaaagcccatacgcagcagcatagctcgaagataaccccactttatcttattatatactttacacatatagagtttcaaagccatatgaccattatcacatttttgcttcctcttcaagtagtgcatgatttcaaaagaaactattatattgtaagaaataagtctaccttgaagaaaagaactcttagtatcgaagaccgcaaaaggaaagaccgcaaaaggaataacaattttcaatctatttgctaaaactttagaagcaatcttcaacaagacattacacaaagagatcattctcaaatcacccatagaaattggattattctccttaggaagaatccagtttaaccacatcaggaagcacaccgatagaaaatgagttctgtacttgtttaaccacatcttttctcactatagaccaacatttttaataggaaccgggagtcattctatccagactaagtgacttttcaggattcatttgaaagagcactttcttaatttcaattgcttcaactggcttcaacaactccacattttgctcaatggtgatacaaggttgaatacactctgtcaccttagcccaattcacaccaaatgaagctaataaaatacgaaaataattcaacataagatcttccagttctgaatcccattcaaaccaattaccataagaatcttgtaattcaaaaatcatattattttaacaacgggcagtagcaaacttatgaaaaaaatcttgttttgatccccgcttgaagccacaactattttgatctttgttgcaaaaaaaatctcactttgagtcataatatcaaaaagtctttttttcacatccttaaacttctgtatagactctgtatcccgacctttacgccaacaattagcctcctccttacagctccaaattcaaaatttaaattaaccagtataggctttacccaatcagtcagaacttccctacaatcattattttttcctaaataattttattctcacaaagctctcaacaatcattcataacctgtaaacataagggctcctttaaccaagcatttttaaagttaaaactcttcctactagtagaagataattcaaaagtcggaacaagtagaattggtttatggcctgaagtagaggtatctaaattgaataacttaaaagaaggaaaaaggttcagccagctctctgaagttgaagcatggtccagccttacttcaatcaaattaggagtacctcgatcatgttcccaagtaaagggatatctcaaaagctccaaatcacgcaatccacattcatccacctctttttgaaacccaaaaattaattaatcgggatagggatttcatcccctctttatcctcatggctaagacattattgatttccctatcacatgccaaggaagaggggaaatagtgaccggatcacaaagcaaatcccaatagtcttcttccgtttacttttattgggctcaccatagatatctgttagcctccaaaccacacgaccttcaacactaatacacatatcaatatgggaactagaatagccaattaacctagcttcctcctcaaatcttaaaaaaaaaaaaagccaaaccaccactatgaccttgtacatcaactacaaataaactttcaaaaccaagtgccaaatgaatcctttctaaactatctcgttacaaagagtctcacacaaaataaaaatttgggtatcttttggaacacaacatccttaagcaattgaaaagcccatggattctcaagcccatgataattctaactcaatagactcctaatgctcggtggtcctagaaaccagagcccacatgtaaattgttttttgatccattcacccattccactgaaacctcatcatcttggtctttctcaaatatgtcatttggcccaaattttaggcccatatcaattttacgccttttagagtcaatggccataagtggcccatccccatgggatggcccataaatctacaattttctccatatttttatttatttattaatgtatttccatacttagccactccttcattaactcccatattcacacccacgatctgccccataatcatagaagcatgaacagtttctttttgtgtatcttccccatcccgctcaatggaaccaccaccatcaagactagaaaaatcagtaaaagttctcaaccattttgtacaaatcagttgattcttaagtcttggtttagctcgcatgcaatccccataaggcttgacaatcttatcacgtggagtaaagaaaggcttgagacagaaactcttagaatggcccataacaccacagataaaatagaacaaaggaacatgttcgtacttaaaattacactagaattcttcatcttccttgtgggctttgatagtttattggcatcatgagtgactctgacacgaagataatcatgccacatacccaagaagttcttggggtctgactccacaagcttctcaatgaaatttctacatctttcaccaccctatcaatcataaaacctggtctaagatcatgaagttgaactcacatgtcaacaatattcaatgtcctaggatcatcacctagtctcaaacactggaaaaccaaaatgagtttattaaatgtctaaggactccttttcatcaccctttgaatatcaatttcataaaataactggaacaaatagtgattagtgtccaattccttaacaaacaatcctcgcccacgttgcacaaagaagccatcaaatgttgcattacattaattgcctcactaaacaccaacgatcattaaaagtaggctcagtttgagccagatctgaataagccaaaacatcacattcctcttcctttaaatcaatactcgcatactgtctcttcaactaccttttccactggctattattacgactactagaagccatagcacaaaagcacaccagacaagtaagaaaatcgaaatcagaagaatcactagaaaaaaaaaatagtcacaattgagagaaaaaaaaaatacctgatcatgtcatagagacaagacacacaatcgagtgagaagggtcttaatcatagaagataaaagtttttatatttttataatatattagcaacaaataatattagacacatacttgaattatacttttttaaatatgataatgtacacttaa

SEQ ID NO: 187931 - DNA, 1420 bp, Cannabis indica
attagcccattgatcgacactgctaagcttaaaaatccactagtatgtagttcaagttcatacattaatgttagaactggccaggctgtactatataactaactataagcccttattaatattatcttaatatcgtttaaagctctcttattagaatgagacatgctggcttttgcatattatttgctgtttgtgaggttggaaagtccttttcttcttcctaacttatatattctctttctgttatgattatccattttattatttgtaaattgtatatatttaaggctttttttaatgggacttgctttagaatgaaccaaaagggcattgcctaacgaactcttttcttatcaatttccatataccaaatctattatcacttctcttttggactttatttaatatatataattgttttttgtgcttcaaattatgttaaccttattatcctctattttgactctctcaagaaacatgttaaccactctctttacgagggtttgtttggtcttttgactgtaattaagatattatttatttatataaatggtatgcattctatattagtttcgcaatcataactcgttgttgcatcttttattagaaataatattttataaaaaggatacatagaatatatggtctaacaaacccgaaaagcctttaccaactagctagaagaaataaaagaaaaaatggcttgtcttttaaatcatctagtacataagaataagaaaagaaaagcatcatcaatcctctcgttctctctctttttctctcattttcctttcttatattgggtgtttggcatcagagaaaagttgaagaaaatcagcgatggattgttgtatttgtatttcgatgccttccacgttaagacctccgaggaagatgttatgcgaaacttgctatgagggggcgactaaacttaaagagaccttgaatggaactaagagtaataataattctcagccaaattcttataaggcaagttctataattctattcttcttacctatactttttcctatatgtattaatttttatgaatgctgatattatattgctctctttgtaattcgatccaaatatatatttggttcgttgacaatgtagaagagaatgagaagctagtctagaattgttagtagttcctagtacatagctatagatatgatttcgggacaaaaaaaaaagtcttaaaaatagataattaaataattaagtaaactaaaatctacatttaattttcaaaggtggttgttttttctttttcctcatttagtccaaagtttagaataaatgtctcgtgtgataacagcccatttaaggttaagtgccatggggcagctgacttctcttaggacctacagaagcccatgtctcaactcaacactagttaagctattcgatgttt

SEQ ID NO: 187932 - DNA, 3096 bp, Cannabis indica
ataacaaagtttggttcttcttatagtgagctgttgttcttaatttttatttatttatttttttttataattttttgtcacatggcctctgtttttgcaataaatctcagtaaccaaattctctttctctctctaaccaaaaaaacactctctcttaattctcttttctagagagagaaagagagcaaaatagtaaagaaagaaatgttggattatcatcatcatcatcatcttcatcaactaaaatcatgaacatttttaccagtcgaattctccttcttcttcttcttcttttaatctcgtcttctcttctagttcaatctctttccttaaacaacaacaacaacaacttcaacaacgacgtcgttttgttactctctttcaaataccttctcaaagatcctttctttgtcctcaattcatggaacattaacgacaaaaactccccttgttcttggaccggagttacctgcaatggcttttctcaggtcaccgctttatctttacccagttccgggttcctcggtccgatctctcccgacctcggttccatcaaaaacctccaaagactcgacctttccaacaattcccttaatgggtcactcccaaaatctctgttccaagcttctgagcttaggtttcttgacttgtccaataacttaatcaccggagagttaccggaagttatggcgacgatgaatacaaatcttcaagctttgaatctttccgataatgctttggcgggaaatattcccagtaatcttggctctttaccaagtttaaaaattgtttctttaaagaacaattatttatctggtgttttaccgagtgggtttcaaagtattgagctcttagatctgtctaccaatctaatcaacggttctctccgttcagatttcggcggtgaaaatcttcgttacttgaatctttcttacaacaatctttccggtgcaatcccacctgaatttgctaaaaaaattccggcaatggccactcttgatttttcgtttaataatctcaccggacagattccaaagtctgaagctttgttaaatcagaaaacgacgtcgttttcaggtaattctgatctgtgtggagaaccaacgaaaaagctctgttcaactttttcttctttaattccgaacatttcagctccgacttctcctccggcaatagctgcgattccgagaacaattgattcagacccagcaacagttactccggcgaatcatgaaaagaagcaaactgggcttaaaccggcgactataatagcaatcgtagcaggggatgtgttaggagctgccattttaggtgtaattttcttgtacatatacagattaaagaagaagaagaagaaaaagattgaaacttcattaaagaacgaagctaatatagctaaagatgaatggtcatctccttcttcttcgtctgagtctaaaggatttacgagatgggcttgtcttagaaaagaacagaagaagaagaaagctcgtcggaatcaatggcttctgatgatgaagaagaaggtggtcggaaaagtagtactcaagaaaatgatcaacagagaaaggttggaactttagtgactgtagatggtgaaaaagagcttgaattagagacattgttgaaagcttcggcttatatattgggagcaactggttcgagcattatgtataaagctgttcttgaagatggaacaacattcgccgttagaagaatcggagagagcagtgtttaccggtttaaggattttgagaatcgggttcgggtcgtggctaagttggttcacccgaatttggttcgggttcgtggcttttattggggtgttgatgaaaagctcataatctacgatttcgtccccaatggctgcctagccaatgctcgttacagtaagttttctttctctttttgaggttcagtgcgtattttagcagaatgggaagcggtttgctaaaatgcgccgggtgtattttttgacggtggagtaggtataactgcttcgttttgtatgttaatgcaatgtaaaagtctaaaagtcaaagtcaactatttgggtttagtaggagtgagagagtgagtttagtgtgaggaggcccaatgggccgatagtgatacttgtttttttatatagtaatggaaaaacaatgcatatcaatgtctctattgtaaggtcgttttcagtgacctttgagagttagttcattcattattatttggtacaaaaatggaaaaagtgaccatttttaggtgtgtttaattttgtgctttgttgatttttttttttcagggaaagtgggttcctcaccttgtcatttaccttgggaagcccggcttaagatagcaaaaggagtggcacgtgggcttgcttacctccacgaaaagaagcacgtgcacggtaacttaaagcccagtaacattctattgggctctgatatggagcccaagattggtgattttgggcttgaaaggcttgtaacaggtgacacaagtaccaaaacttggggctcagctcgaaatttcggtagcaagagatcaacagcttctagagatagttttcctgatttcatacctgggccgagcccaagcccaagcccaagtgcattcggtatatctccttaccatgcacctgagtcgcttaggagcctaaagcccaacccaaaatgggatgtgttttcttttggggtaatattgcttgaacttctaactggtaaagttgtggttttggatgagtctggtcaagggccagggattgtggttgatgacaagtgtagggctctgagaatggctgacgtggcaattcgtgctgagctggaaggtaaagaagaatgcttattgggttgctttaaagttgggtacaattgtgcctcaccggtcccacaaaagagaccttcaatgaaagaagtggttcaagttcttgacaaaattccttgttcaacttcttcatcatactattattatggtaactaaaatagtaatattaatcataattttggacacccttttgtagagagttgtatgtatgatttgattgacttaaaaaaaaaatgaccttgtactttgtcaaatttatgttacatttttttctaatatttttac

SEQ ID NO: 187933 - DNA, 2774 bp, Cannabis indica
atatatctatatatatatatatatatatatatatttaaatcaaatatgtaattttgaactattcttacttattataacaaatatataatacatatattttatacattgacattcatattaataagacaattcatactgaaaggaaataccaagttttccgcaagcagctcattattacgtgtatatgcttgcttcaatacactagctaacatatacaaaataaatttaatcagttgtcaatggtcaaccaccacaacatatcaaacatatttggtcaaatgaatcattattaaactcataatttgtaaatactacaaccttcttcaatgcctaattctatagtatattactattaatagtctaatatttttttagatgtgtcgcttgtgatgtgattgactaataatattccttaaaaattattacattaaataatatagaacccattatgaataataacgttatagtgtaatttgtaagaataaaagctggacactaccactagtaaattttagtatatttctcatatacatatatggtattcctctttaattcctataaattaaatagtattatttagaaagtctcaactgaaaatttcatattataatgaataacacatatggctcttaactcacatataatcccttaattattttataattagttgcataaattaaacacttatctttacaagcatctcttgctaatcacggcaggcaaattcattaaaaaaaacatatagattgcgagaatcaacctccttgatacataaacttattcatggacaaaacatgttaattctataccattattattcagaataatcaaaattattctaaatttcattatgaccacatccggtccggcctccgccggatgcttgtgttgttgcctaataataagctggatcatcaagatcataatctccatatccatcgtcatcggcctagccctcctcttcttctggatcatagtcaacccacacaaaatgaagatccaaatcggcgaggcttctcttgcccagttcaacttcaccactacaaacgatactcttcattacgatctcaactttgatgttgcaatccaaaaccctaacaagatgatgggatttttctacgacatggtcgttgttgcttctgatcaagaaaacaattacgttcattctaaatgggaagtgttctaccaaggccgtaagaccactactactatgctgtacaactttgctggaaagagagagctttactttggtgattccaatgaacggtccagattcattaagaggtttgaagaggagaagagacgtgggatgtttgttattaatgttaagatagaggattttcgagtgagagtcagattggggaagattcggataggtgttttccagcccaaggttcggtgtgatccattgaataatgttgctttattaagtgatcataatatggggaaaaaagctactcaaaatagtgttgagtgccaagttcaattcaaggcaacctcaatcatggaacctctagattagatatttaattgatagctttattcatgtttaattacgatccatgcccttccctgtaatcaatttgttcatatgatgtttctctcatcaatttgttcgtatatgttaatgtgtttggtgttgtatatatatatctcccaatatctttgatagagtgcaaccaaccattgatctaaaactacgatcatgttttaatagttttctgattatttataatgttagtgggtatgtacttttacctattaagattaataaaggtaggtgaagatcctgtttttacgaatattcactaagagaatttttgccgtccaaatttgcatcggcaaaactaaacacaatgtgccggcaaactttggtcgagagtacttagtcggtaaaataatttttaccagcacaattgacaaatgtgctaataaaattaggctataccggtgagtttatgtgttagaaaaaattagatcgccggtgttattaattgttggcaagttttttccaattgatgggtaacaattttaccaacacataaaattgttacccaagcaataaaatatggcgggaatatagatatattggtgcacttttgtgccaacaaaactcttacccgccatattttattgttggtaggtaagttttgccgacacaatttttcacctgtaaaagctttatttatttatttattttaaaaattgataattaataatattttgataataatatgtattataattaaatttaaatattaagtgatatttaaaaaatataattaaataaaaaaaaagtaattgacatatataatttaaagtattgatacgaggattcttgaatttatgaggaattggtatagagctttgattcagtcagagagtggtgatcatcgcaatctatcgagtttgaactttgacaactttggggtcctgattcccttcactaggactgttagattgtcgaactctattttgttaacaccatatagtggtctacgtcccagttggagcttctattgcccgattagggtcacctctggaagctcccgcttccaccaaccgttttctggttagagtatcccgcaagtcttttggtcttccaagctgatcatgaactttagtcgacttggatcttgttatagtctcctgactacgggatcgttaaggcaacactagtgatgtttccaaaatgaacttcagatcgtcttgggatgatacgctacgagagcggtctttcggagcattgtacactacaagaaattaggggtttt

SEQ ID NO: 187934 - DNA, 4877 bp, Cannabis indica
ttcggttacggtctagtcggttttggtttagagagcaacttacatttattcaaagattgtgtttttgccaaaacaatcgggttattattaagttttattttgaacaaaaaattagtttagagtcttatttatacaaattttaaaaaaatataggatctattttgttatttaacaaaataaagggtccaattaataacttttattggtataaaatagtatttacccttatcttaataataactatttttttaaaggggaataattatttaaaataaaaaaatatctcattcatttattagttatctttttatttaaatttgttgtaattcgaattagaatagaaaagtgttaatttatgacttcaaaactctataaatagcaacctcatcaccacttctatttgattaagattcatttttcattgttttcgaaaaaataaaaacaaaattagaataataatttttcttaattgcacatttttgttttttaatacgtggaggtaggctactacgtggttgattattttcaacatcattatatgtaagttatctttgtccaatatttaagtttaacttaattgtatttttggtaatgatatttaaattctatttttaataaattattaaatattattaaatttttatttttttatttaaaaattaatttaaatatactaataaaaaaaatacttaaataataacttaatacttataaaatttttgtaagaaaattaaatttatatttttatataaaaaagttatattttagattttaagatgacatgacatttaaatttgaatttttttatcatatatatatttaaaattattatatatattttattattatatattaggtggaaagaatatcctaatttaatttttttttccaaataaattaaaattgaaattaaaaagaaaatgcaaagaacagaaggagagagagatctgtaagaaccaaaaatcaatctccacaaacacactcctctccttctctccgatctgatcggacctttgtccctaatcaatttttagggttttgtattttcatattcaaatacatatatatatatttcaattttcaatatatatttgttttgtttcaaatataccgaccgtttgatcatcgaattccgtcgccattcgcggattttttttttttggatttgaagtgttgcgctagggtttttggtgctaatcactgggagaaacattgtggattctgattagagttgtgaagttgaatggaattttgtttgtgcagtgaatttggttaaattgtatttgagctttgggatcttcatcttgttttgggttttcgatggcttcggctcaggtattgaccaactcggtgagttcttcatcgaagaagcaaggccatttggaagctggaaaacgtcgggtatggattttgttggcctcttttgtgttcaaatttttttaatgggttgcgtttttgaatttggtttgattcgaattattcacttaatactatattgaagcttgattgtttattgatttggtttccaaattttcttatttggtttcgtttatctaaatatatttgtaatgacgatttagaatttgatgttttacgctacaatgtggtaatctcctatttggtatctaaagagttgatttgagcttagatttagcttgcattatgctttagtcaaattataaccacgcactgggtttgtatgccttatttcgaaaaagggacagaggaaacttgtcttagactgtggttacaagccaactttaacatctagacaatacacctaaagataagtagttagcgaatatggaatgaaattacagctacctaaggttaacttagtgtagtatgaggtgctattccctggccaggtcttgaaaggacaatccctcaaaccctctcaacttaaataaccatgaagccacccagaatttaatattttcctatacttcttcagccccattatcgattttttgaagatcctcccatttttttcccaacaggatagacagtaaggcaatatattttctttgatgcacattaaggatagacagtactttgttatttgttcttcattgagttcttcgggctaatgttggttctaagtggggttagtctcatttgtggggattttctgtctttaacaaattaagtgggaaatgcttttagagttttcctttatgtagttgtgaatggatttttcttaagaattttcaacatgtggattaacaagttatttgatttctatcattttagtaatttttcttatagtgtttcatcaaaatattattttcttatagtttttctaagtggggttagtctcatttgtggtgattttcagtctttaacaaatggatcgtgaaatgcttttaaagttttcctttatgtagttgtgaatggatttttcttaagaattttcaacacgtggattaacaagttatttgatttctattattttagtaatttttcttatagtttttcatcaaaatattattttctagaagaaaccaatcgattatggtgttcctttatttattataaacttgttgtagcttgaagagttccggaagaaaaaagcagctgagcgtgctaagaagacttcatcaaccagccagaaccagaagtctgaactcaatttaaatgaaaaacaacctttagaaactgaacatgaacgagctacatattcaagtggagctggtacatcagatggacatggcaacactgttactgaaactgcatctgtagtattaaaccataatgaaaatttaattgattctttccagaaaagtgagcaagtttctttaaatgccagccacagtaatcagtttttatctaatgattatagttcgctgtctttagatcagaccctaaagcacacaagtaatgaagaatctaagagatatggtgatttaggttttggtggacctctagatgtcgatcaaagtcatggtaaaaaggggaacagtaatgacctggagaattatactggaggcttagttagatttccatatgggacacctggccagtccattcctttacactcacaaggcagtcaaggttttgaaagcagtattagtcaacttggtttccatcagagtgaggaatcccactcgaaagaaaagttgtcagaggattatgcaatttcaaatactggttcttctcgtgtttctgtttcaagtcaaaattctattggcacggtacagcaaagtgaacctagtaatgttgttggctctaaatcttcttccctgtatgaaggtacgtttatactttggaattataatttcaagtttttacaataattcaataatatttcacggtctttagttttcctgatatctatactctgaaggaagatactgatcattagcctttttgatttcatggtagacctgattcgaccaaccacaaacagagctgaatttggacacaacatgtttgatagtgggaccttcagggataccctatttcccaaatcaggcaaagaaaacattagtagctctgttattggtttatctggtatggacaatggggctggccagacatttggtgcgagctttcaatctgattttcgaagttctcccaatcatgtaccactttacccggtgacaaatgaagctagttcaagacgatctcgcccttcctttcttgataatcttaactttcctagagcatcttctggaactcatttggaacaagatgaacatattaaagattcatttaattccaacagtttgaaatcgaaaagcatggataccctagaatcttctccttttgataagccatccatttattctgaaagtttaggtcaactttcaaagcttgactcccatagcaattcatatgcatttgaatcttcaatgagttcagtttctgatagtattgtgagtgacctgccaaaaccatctgtatatgaaaatggcatggagaggaaacatgatttttacttaccaaagcagaatgaagactttacagctctggaacaggtaccccgctttgttatttctatataatttagtgttcattggttccccaccaaggagaactagtgactaggtgtttgttggcattggaaaaagtactgtttacagtcacttttgtttcccataagaagatttggttcaagtttttagagattttattttttttagccatctttttactcacgtcttgttttggtttacatagcatattgaggatttgacgcaagaaaaattctccttgcaacgtgcacttgattcctcccgcactttagcagagtcattggcttctgaaaattcatctcttacagacacgtataaccaacaggtcagcttgcaaatcatgattcggtcgcattgcacttgtataattttgttgcattaaattgttaagggttgaaaagatttatgatgctacatgtttttgtaaaattcatattttttatgacctgtataagaactctaattgtcttacttttaattttctaatagttgtaaaatctgattattcaactacctttatttcagaaacaagttttctgtagcagaccagctgtgttgttgcaccctttcaaatcgaaaataatcatactgaattctatctaaatagtttcatttttttttgtattttccagagaggtgttgttgatcaactaaaatctgacatggaaaagttacaggaagaaatcaaggcccaattggtttgtactaattctctccttactgcctctaaggcttagtagtcagtaatagttcctttacattttcatgtagaatttctgatgactatggaaggatgaaatccttatggaatttatctgtagttgcaatatttggattatttcattagagtgataaggagattttttaaagaaagttggtaaggttttttttttttaaatg

SEQ ID NO: 187935 - DNA, 1274 bp, Cannabis indica
ttttttctttttacattacaaaaagtttgattagtataaccttccatttccataattttggctcctccatcccccttttggtctctataattaaagtactaataacccacaccaacaccaaaaaaaaatttccaaatccaaatcctacccctaatatatattgctttgttttgtctccttttcaatccaaacaaacaaaaagaaaaacctaccaactcctctttctctctctttctctctctccattccaatatgttgctaatgagaaactccatttcctccaccaagaaattctttcaaagaacttttggtagtttgaagtgcctcttcaccggagggtcctaccaaaagctaccgaaatcccctcgcggccatcaattcaccggcgattctacaaccgcagccaccaccgcaacgaatatccaccaatggggtggtgccagctgtactaaaaggagagaaaaaagatcagatgatgagaatgatcatcatataattagtactactactacttatgatcaatatccaatggagcagaagaaaaaagatcaaacctctcctaataaaaaggtggtgatgatgagttgtaataataacaacaaaaagaagttgggagattatcattacagcaataaaaataaaaattgtttggttgaggaaaagctaaaagagctagaaatgttggatgttagtaatgtggaccatgttttggacatagaagaggttcttcactactactctcgtctaacttgcccagcttaccttgaaatcattgataagtttttcattgacatgttctctgagttgttggcttcttccactccggctcaaccacccaactccaggttcagatcacaatcttctaccatcacatcataatttatttatttaatttgtttctttatttattaactactaaattaattaaggttttatgtttattgattctttgctcgcgcctattcttggtttgtaattagaatattgtggatgatttttatttaatttttcaaataaaaaaaaaagttaacaggcttagagattggcctcattaatttgttcattttacaaggaaaaaaaataaataaagaaaaactggtaagaatgtggaaaatgtggtccggatgacaattattaatggtgccaaactctgtagttttttgttcctctgtttctatgttattaatagactatagtgtggagttgttattttattaatttggggtcaagttttatttatgatcatttattgatccgaatatataatgcaaaat

SEQ ID NO: 187936 - DNA, 8517 bp, Cannabis indica
aaaacaaaatgattaatggggtttctctgattttgaaggaatgtgatggaaagccgaagataagctatgtaactgtgtttgaacgtcctggtttgcacgaattcttgaaacagattggtgaatttgcagtccttgtattatttactgctggtcttgaaggtatgatgattgcctttcaaatattcaattatgcttttcttttttcttttcttctttccacttattttgtcatatttctcttacagggtatgctagaccacttgttgataggattgatgttgagaatcgatttagccatcgtctatatcgtccttctacagtaagcacgtaagtactaataatatgtatatatccactttgactggattgtgtttattttgttggtgactgataaccactgttaaggatcttgtgtcagtactcattagtagagagatatacatgtttatctagtcagtgtgctatttcctttgtgcttattcccacagttttggagaatgagactaaaaaaattctggtttactttccaccttttgatgctaatatatttctgtgcaactttcttttttatctcaagaagtatccagtttttactagttaaagtagcatgttcatcattgtgggtctgactacattttgggttttgattctgttacatttaatgaacttttaactgtttagtcactagaaacccatctatttgagcatcaaaaacccaaactaaaatcaaatgataaatgatacaactcacactcttatttgtattgctttttacatgctcatattttgcgtttgagattgacaaattcaggaaatgattatcacagggaatttcgagaacacgtgaaggacctatcttgtatttctaaagatctttctcgagttgtccttgtcgataacaacccattcagttttctgcgtcaaccattgaatggtataccatgtgttccattttctgctggacagccatatgatgatcaggtaatgcagttacttttatttcaataagttctaagtgtttgcataaatgtatcttgattttcaagtccttctgcctttgaaatgaatatagcttttggaggttttgcttccactcctcaagaacctctctcgacaaaaggatgttaggcccgtccttcatgaacgatttcacatgccagaatggtttcaaatgcatggaattccctcatctaacttcaaataatgtttgattaagtctttcaattcatgttaatcaattagcatatcggaaagccgtcggtcagagggcggatgccttcagatttacatgaacaatttgtgcaaggccattcatggaattttggattcttatagagcaccttagaagagaaacaacttccaagaagatcacctaaaaagttaaatcaaatgtatcatgtaagatttttaactctatttttttcttttgtaattaactattattatattcttcaagttgtaaaataactatgaaaaggtttggaatatttttatggttaaagaatccatccttcattgtactcgtgaaacgagaatgatctattctaaccctgcttatttaacaaccaataaaaaaaatcctatttacaattaatttgagacaataccaaatttgacatattaaaaaattaccaaatttgacaataaaaatctagagagagcacagacactgcactgtactaaatttgacaaaataaattataattttcccattaattatactctaatacaattactatattgttattaagtctttttaaaaaatatttaatttataaatgaatcatcattaatatgttaccttttttttttacttatttgcatcttaaatagcaaatatagcatttactgactatttctgtcaaatatagcaccgtatttagatattttggagatgttctaaaattaacaagtgctataattaaccggtctgataaatattcgagcttgaaatagtaagatccaaaccccaaatacttttcaatagattaagaacacaactaccctggaaaaatcatcccagagagaaacaacttaccaatttatgaaactcatcgatcattgtctcaactcctaaggttgacctctgaaaaataagaataattcatagagtgttcgaaagaacttttcttcatacctatcaatcattattcctcttacaaaatttcacactatagcacattaatattattaatttggctacttatcccctatagccagtttggcaagcacactgaaattctgctttatctgtattcataatgccctcgccttctcgtctatccaagaatataattgctcggcatatggcctccgttcttgactctgtccattcaatccaaattaaaagattgcagaatatcattccagtctgaggtaagctggtcataaaaagttggtgggaaacttggttgtattcgccattcgccattcgccaaatgccaagatcatttctcagcaggctcttcaagaattaattgagctgaaactttaagaagcactagatgattctttagctttctctttgataccctccttatctgcagtgctcgtttctgcagcctgcgactgacttgtttgtgcctgcgactgacttctttgcgcctgcgactgactagtttgcgcctgtgactgactagtttgagtctgtgactgacatgtttgtgcttgtgactgacttgtttgtgcctgtgcttgactagtttgagtctgtgactgacatgtttgtgcttgtgactgacttgtttgtgcctgtaattgacttgtttgagcctgtgctgaagtctgagtatcagaagctatgcccaaaactaccaatatagacctgataagaagatagaaaaaaaagaatataactgaaataatctaagagaaccatttacaggccacaagttctccccgtctgattccataaaaaaaaaaaagagaaggtaatttaatgaacctcggaagtgatgatcgaatatccatttgactagcatgtgcagccaatggggctctcaaagccggggtccgattcaatgcattttcaagttgtggtggaggtagctgccagacaaaaaaactttcagcatcttcaaagttcaagacacgagtttcactttgaaatgtgctagtgcactaaactctcctcctttgaggaagaggatgatttcacaaaaaaaaatgatttttaatcaaatttaaccaaaacataacaataaaacaggataaaataaatagttacactatagatgagagtttttttttcaacgtaattcataaaacataaaaagcacgataagcctctgaagatacctgaagcaacacaccaaaagactgaggtttcgtcaagaatgcacacttcaagaaacccacccacagcttggggtatttccaaatctgcaaaagcttatattgtaaaaaagatgaagaaagcctaaatattaaatgtgcagtaattaaattacttggcgtaaaatcttagtacctgtttgcttacaagtcgagataggatctccataacaaaatctacctgcacaagccaaaaaccatgagaacaagttaaaaataagaatagcaacaacaagggcatttaaaaacccctctgttgatcccctgagagaaggaaaaaaattgtcctgttaaaaaccactcatgctcttagactcttagttactggcttgttatacaccaataacagagttgactcccgtgttcgacagtaaatgggaaaaagaacttgctgcttcttaaattcttaccagtgcaggaaaagcccctatggcttgtaacactgtacgcatgaacaagacaggaagaggaatctgctcaacctataaaaggacgaaagttggtcattgtaaatttagcttgaacactttggcaacaaaggataattccagtgatacaaaccaattgattcaacactttggcaagaacttgttgggtgaatttgtcgttgctcgaaacaagcgttgcaagcatctgtgacctgtgctcaaaaatatcatcaattatcccacatctcgctttgatttggtaagcttttaaaacagagggggattggagtttagaaaacatgccttcttcagagggatcccatctctttcaggatcaatcccgtgtatagcaattaagacctcagcaggagcaagcagtggaccagaatgtggtgagccctgtgaaagaatgataagttaatatagacagaaatcaactaacaataaaatgaataatacaaagtggatagtaggagaccctcggtacaaaaaaactgaatacttcttaatttactctgttccttagagtttattttattaaaatcagagaatcttatcctcaacatagcttatctaagctggttaaatccaaagatgataacaggggtactaagtatgattgtacagtgacaagaatagatttgatcatttatataaaatctgtgttgcataaaaattaggaattgtgccaagaatgcatcacaattcctcccttctcatgtggggattcctcccttctcatgtggggccaataaatacatgggaactgtactaaaaacctccaattgatctatatgtatcctaaatattggtccttacaattctacaaagaacaaaaaaatgataaaaggacacagtttttcaaggcccaataattttacaccaagtaggattctctaagaagttccatcaggatgataagtatttttcagaaaatggatatatagatacctgtagtatgcgaatgagagctgtttgaaacttttctggtggaagtttcacaactcgggaaaagttgagcaaaacctgccacaaagctaattaaatcagtaaaagaacagtacaaacataagacggacaacaaacaattctttcattggaaagcattcccaatatgctaaggcattcacaactataagaaagagagtccaatcagaatcttctgacaataaggatggcattcatagttattcaacaaaaaagggtgagatgaattgagcacggacaaataaatattggaagactgaacatgtatttaaaaaaaaacaaaccatatcgcatcaattgtatagacaagtagctttataaaatcttaattgtgtaaataaagtttattaaaccttttactctcatacatcagttaactcagtgaaaatcacgtaataatagttctatgccattcttactttttttttttctaaaaataaccttggaaagaagagccaagtgttaaaaacataatagtgcagctaggttcttaatatccatagactgtactaatgtcaacacattgttttagtatatttcttatataaacacaaaaaaactggtaaacctttaaagcaaccaaccaataaccatattttagaattataatatatacagactgggaaagaaaaaaataaataaatagggaaaaaagaagaaggaaaaacctcatctttagaaagaaagggtaatattggaataagaatctctatatcctgcaaaaattacaatcaaacataatatcatcatatttttcacaagacatacattaactactatcttatttttctatgattaacaaagtaattttgaataatctacctttagttttgaattatatagcttcttaattgtatttatcaattcttgagaaggaactgctccatctgtcagagtatgcaaaacctgcattgtccaaaagaaaaagtggaccaaattacaaacatctccttgaaaggtgtttgaccaaattcagtaacagaaaaacaaacaaaacctgcactaaaaggttctcgcttccaacgggaggatccgaaataatttctagaagtgctggtgatgggcccatagtgcggactagtattggaatatgacgatcaactgcctgaatcaaatagtgaatcagaagcaggcccatagaggaaaacaaacatcaagtaatttcaagagatgacagaaactatatagggacagccaaaacatagttattatacctgcttaactgccgcagatgcacttctataaacaacaaaaatttgcccgaagagggaatgtttctgccaagtaaatcataaaaattacatgtctaattctgtttacaatgcgataaaagaaaaatttgtgaaattgagagataaatatcacatcaaaattgatgaaatacctttgtacacaaagcaaaatatagtgacatacaccgttgggcttcagagaccataagagatgaagcaccttgggaagtggaggattgatgagtatcagagggcatatctttactgttggtactcattgattgaagttcatttaaaggcctttctggatcaggatcctgaaaaagtaggatttaaagatcaaacaaaaatctagcatgcatatattatctaactgttgaagttaagtgaaacagtcagttcagaaaggagtattacctttctgcgttcagtaattggtccttcagcatccaatttatctgaggaatcactatttattacagaaagcagcatttctctagcaaaatcttctatgctttgagcaatggatgacacaggataaagcttgttggctacctgtcaaatgaaaaaatactaatatagttaacttaaaaacaataaaaataagttagataaacaattacattacttgcaagaagcaaataaagtaccagtcgaatagccttcatacgaacttcctccagatgatgaactgcactcttttatatggtaaaagaaaatgtcaattaataggagcaaaatggaaaaaatatgttgcttatcataagttcttccaataaaaattgcacggaaaagaaagaacaaaacaaaattatagtattatcatataaaaaattgtatattgaacataatgagcctgacaatgtcacaactgacgatgttaaacatgcataaatttgaaccttagaaacaaagcaataacaggaaaagagttgttttcagtaactcctgctagaaacattaaaaggatacgaaaacaccatatacaaacataattctcattataagaaacaaatttagattttcactcgaggggtttgagaaatgtaagacacccagatgtaatgaagtaaaagaagagaaaaacctttaaagcaattttcaagcaggcatctctgaaagggggccttagtaaaatcaagctccatactgtgctcaagccttgagtcactcgatcaccactttgaatttctttttcagtcttgtccaagatttctggcgaacacaagcactccaataactttaaaactgtatttggtaaatacggaacatcaccaagcaatctgcttaatgatttgtcagagggtggaaatgaatctctaagtgtttcgacctgcataaaaataaaaactataaattaatattttgaaagaaatgcaaagttgtcttttgaaaggaccaacaaaatacataccacagtaaaaaggaacatttcgtatacagaagtagcagttgtagacgatacaaagtcacggtcctcttctgcttcaccaaataacctgtacaggacacgcagtgtcaactcgtgtccctgaagaaattcactaattacagtcagctggacagataatagaaattaataataaaatagcacataactctgagaaccattaactctacagcaaccaacaacgcacttcaaagcaatcatattgtagaaagtttgaaactaagagcaagtacacagcgattggatagttaacatttttcatctacttcattcattaatgtatctgtaagctaaaccttatatcaacttggtgtacaaagtagcacccgggatcaaaaattccatggaaaaaggttatcgtcattttcttatatcaaagaaataaaggtgcaataaccaaaaaaaaaatacaaaaccagggaatgagtgtctccattaagttacacaaggtggaaaatcatttagcaaacataagaaaacaaaaccaagagtttacttgcctcgtgatttacataatctgccaaaatatgcttctgtatcagcttccagggttctaactcagagggaaactgaaaaaatacagtaaaaatagattagaacttcacaccatgaaagtttacaagtgctacataattgattggtgaacttgattttggaggataacgaaatcaacaaaacctaagaaaacgatcatcagtgtctaactaaattatcagtatgtttgaacactagaaagaagccggcaaattttgaaggaatgactagtttgaagaagacagagaccacagaagattttcctatatcctttccacaagacatttgcttaaaataaaacagttccatagaaaagataaaaaatcattgattgacagctctacccgtaaatactagaaatatatagtctcccacaagctgtgaagataataacatcttcaagaacctagaattattacctcaattcccaagcttgcaagcaacgaagatcgaatttgtaaatctcccgcaactgataattgcttataagcctcaacaatacgattgagggctgatttctgcatatcatctttctcgtcatcagcaaggctga

SEQ ID NO: 187937 - DNA, 3600 bp, Cannabis indica
aaaaaaaaaaagaaaaatattaccttcaggtgtattgttgtcagcctccagaaaccacaggtcctacaagaaacattatagctaattttaaattctatcacaattcatgctcaattaggtccacaacactataatttggtaaagaaaaaacattattataaatgatgtgttacatgaacccaatgctattgatttttaaaccaagttagctacttatagtatagagaagataattaaggtaaccaaaattatacaatacatatttacatgttttggatagaaaattgaagaagcgcgaataacttacttctgcttctgcagtatttggttcgggaatagtagagagattagtacgatccctcgtatattcatcaagtgtctccaaatcagactcgtcacgtctggatggaaccgaaaatctggcgttggaaattcatgtcttccagtttccatctctgggaatggagtagattttgcagtttcagatggtgaaacatctctaggcgaaggaataatattgtcatggtctgtaacatgtgtagaaccttcaaattccggtatattttcgttaataggagtttgaaactctgcattttcattttgtggtgaagcatcagttgcagttgcagttgtaggaatatgagcaggagacccgggaagcccaggctcggggaaagtatcaggtgcagaaccaggagatggaaccgcagaatctggacaagccacctctaaatgctgaagctttgaggacatgtagttcttgtcaaaaatattacaaagatcagaacataatcctgcaaaaacagattcaaaagaattaagaaataaacaagaacaaaagaagacatggaactaaacacaatgccaacatcactcaccagtaatggatgactcaaaaaaaacctgttcctttctcaaattaacttttaacttccatatacccaacacagtggatgggattttcctccttttgcgcaataaattactaggatcttcaagtgccttcttcataaacctgcaaatatcataacccacttgtaagtaaaccaacactagaagagatattaatcttaaattgacaaaaccaaacttacttatttgtcaatactggggcttcatcataaagttgttttctttttcttgctctaacttttggtttctgagctgatggtgatggttgcattgctgcacataattggtccaaaatcgttcgacaatcaatgcataacttcgatcatatgatagggaaaacaaaatgagcactcataaacatactcaccatatgaaacagatcctattaggtcctctcctaaggaagcaaccgatgctcgtggtcctgaactttgctgcaatggtgaaacttgccctccaagacccaaattatcatcagtaacaggaggaatagcatctgtctccttcatttctacaaatgctggtggctcaggagtgtcaccagtaacactagtaaacattgttgggattcccgggctatcatgtacatcatctcgcatccgttcaagtggaacatcagcagaattgtcaccactatgcactggaatttctgcatgatgacttgagccaggatcttggacaacatcatctggaacgttgtggctagtaaagttaaaagggatttcatcatcattccctatgtctggttggactggatggacaacactgttaacataaaacaaagtaaaatggctgcacagatttctcacacaacaaactagagaatcatggactagtagcatactacttaaaacttactcttccatatctttttcatttgaaggaggattctccactgggtgtgaagtatcatacatatcctgaaaagaaccaagttttagtaaaagaagaagaaagtagcatcaatacaaataccacagatataactatggaatataaaaaacaaccaagtgttatacaaatacctcatgtaaatttaaagagaataaaaccgtttccattggaatttgatctgcaatgtaataatatgaaaacgttagagactaaaatttaataaaaacgggagatataaacaataacaatgaaaacaaaatcccacttgtataatctgtcattgtgatatcttcataactcttgagatgttggtcaaatgccctgaaaggaaaacacatgcagaaaccgcagtcatgaaacgtgtgattaaatcaacaaatgaatcaaagaagaagatggggcacaagacttacccatcaagattaacatcaaaatccaaatccatggcatcgagctcgaatatgattggcaaagtgacatcttgaacaggtgcgtgccttttatcatctggcaaagtaaggtctagagaagaagaaggagcaaaggccttcatcaagctagtaaaaatagcagtacaatcctcgtgaagataatggactttcttcgagtatattcgaacaatacccaataagagatggcctgacattcttagtgcaagaggaacctcaggaaacatgattcgttctaaaacaaacattaaaaatcgaaagtcattacaaatacccaaaaagatctttgctttagttaagaaaacaaacaaatctacaaccataatcaccaattcgaaaacaaaaatctcaaagattaaaaatttattagaaaaatacaaaccaacagtagaggggatatcagtggagatatagtgggatttcttgagcttgttctgcaaatgggcagcgaaccacactgttcccaagggtcccttccgagccagaaaagtatgagagtagaacatcctctcgttcttgtgtctcttcaactactcaaactctacagaaagagagacgagaaatggcggttatgattagggttaaggttaataaggaataaagatgggttttttcttcttcttcttgtttgtttgtatggtaaaggtgggatttttgtagtctactggtatgtcttctccatttttattgaggagcaaagcaaagcctgtggaaaccataaactagagaagagaagattacagaggaagctagagttatatttaattagtttgggaataatagtttggcgggaaacttaagaggatttacccgggttttcttttttggttccctctcagaaataataataataataataataatattaaggagaatatgcggtgggcccatatactcctttacacctcttccacgtatccctttccttgtttttctattttataggcttccactacacacttctttaccaagaagtacaacgttttagaaggggaaaaagacaaccttattaacaccaacaaagattagatgcacaaattgcccattatttggcaaaacaaaatattggaattgtttcacaaataaaaaaaaaacttataagaatataattttacggaattttaaatatattttataattttttaatttatttataaaagtaagggttttattttgtacacttattgttgttttgaaatttttttgttgttttatgaaaatattaaaaatataaaaataataaatgtaaaaatataatttattttttacgaaaaaatatattccaaaaatatatattttgtaatatatttacaataatgaagatgaattatttttattaaaagta

SEQ ID NO: 187938 - DNA, 4328 bp, Cannabis indica
ttttttaaaaaaaaaaatcatatgcactttagattttatttcattccataactatttctgtgcttttattcctcccagtcaaacataccctaagagcctgagaagatgaataaaaattaccaactctatataattaaagaaatttacttttttttacaattagcattttttgggggacaaaattagcctaggaaaacaccacttaagagcaggaaactcaagagggccgggagctagagatattgttaagtactggcatcaaccaaaaaaaggtgatggatacaatcacgataacgcgaccaccaaacagtactagtggtagcagttaaagcaaatttagctatagactatgtgctacctcattaactattctagatacgagtagcatttttcatgacctaaactcaactaataataatatatgatcatctatttcttgaaacaaattagagacagaattaatcttcgaattaagtttcttagcagtttgtatttggaaggacttagtaattcgaccaagcaacaaacaactacatgggaataaccattattcccgtcaggcaaggaaacacttcatgggtataaacattgatcccctgggcttgctgaaacataaagtctcatctggaagatgttttctactgaaagcaatatgagcagacataatgctaacattggccaagaaaaggacattgagataaatatttatacaggttcttttgatcaaaagattaaaactcacattttaacaataaaatactcaatcactgaaaatcaaaataatttgaagcagcataatataagaaatttaaaagccaccaaaccttgtccattggatcattcattgtatcatcaacagatgataatcttctggcaacagattcatctgggagacccctttctcgaagctccctttgaagctcaaactctctgaaaatggttatatttacatattaataaaaacaaaaaaatatatattcacaaactgaaattatatcaagcaataagcataaataaagctagctagatgtaaatacagcacctgaaacccgttttagatgttaacagctgtaccgtgacctgacatcgggaaaaggaatgaaaaaagaaaaacacttagtgggaatttgaatcactagacaagaagcatacaagattaattacaaccaaatgagaaaaaaaaatacatccagtgatgtaaaataatataaaaccctgaaatgaaagagcatttctaaagataataaaatcatctgaagaggcaatcctcacatgtagaatggttccagaatcgcatccctgaagaggcagtgcaacagaggagggctttgatgcatcagcgtaatcagcaaggttgatgttagcctcaccaaggacactagaccgagatgaaccctgaaagccaaaccaaaattcgttaagttaaaacagataatggctagaacaaaaaaaaatatttattaaagcattcatagaaaggaccctatgttgcattgcagaaactattatttaaaataagaattctgagggaataatacaactactagtacctaccatcgccaccacaagtttatagaacttatcatcgtattgctttgtcttaatatcatggagaagtcttgtggtttcgtagattgggtctccccatttacaggtgccactcctcacatttgctttggttgtcttagctgttgcctttgcagaatcagcaggaatgaatgaaataaacaacttatcccatccagtttgaggaatctgaatcacaagagaaaaacgttaaattcaggccttgcaaaattatcaatgtcaaatacagacaatactctcttctccagctataagaagaagggagaagagggaaaaaaaagttcttaagtcatcaaaagaagcttaaaacagaattatataaaagatccatataagcttatatacatttcttgttcaccacattcaaattttcataacatgtatcattactggctacacggtgccctactttcctctttgtttctgttttttttttagatttttttatttttacacttcaaaacattattttttatatttttacagaattctacataaaaacccgtattgcaactagcgctgcaacctaaattgcaacaaaaaatcgtatagaaacccctactgcaactagcgctgcaactactttagaaacccaaaccgtaaatttgaaaaaaaaaaagttcaaaaaatagtatatggagtaattccccttctttttccctctttgggctaaaagaagaaagaagtgtgggcacagacaatctagaactacatttttataaaatacaaagagtagaactatgaaatacaatgcatatcaactgtacacagacttaaagaagttttccagaaacttacatgtgtagcatggaattgtagcctgaaaaccactttgacttttgttttctcaactttccatctagtgacccttgacattgctgtttaatttgtccagtgattgatcaatgtcccatttccataccctgcaccattcaaccttaatcagaggaagaaaattgtagttatatattatataatgtaccagtaacaaatactaaatctggatgaaaaggacaaatactttcatattcaaaattttggtacatcaaagcatgataaaactatgcttcttgtggtaaagttctccagaacacttctctagacaccacaacaacatatgttttaccaagtatgtattaactaacatatacaaacagatgatctgtgacttaaaactatacaaagaacttctacagttaattatttcccagtccaaaggaaaacaatgaggataacaatagagcatttagagcaagaataaatggcgttagagattaatttaaacagtataggcaaaaactcctactaggttgatcctacaattccctcgactagatggaaccatttcatgacttgaaacggactagagtcaaagactacagttaaatcagcaataaattgagcacgattaagaaagatgtcagggttttacactagctctaaactaagatggcacactatactggaaactgaatgattctttttcaatctcgttcttctatgtctccaaaactgaatcttcatttcaatgagcatttcaaaattagttgctagtttccacaagacccagaaaaaaaaactaaaatccaacattttctcagcgaccaagcaagaaggaaaagtgcaaagtacatatagaaaacgaagctcgattggaaaggtaccttgttccttaaaaggaggtttagaacccgtaaaatccaaaaccagggacaagttcagaaacccatttgcaacaaaaaaggaaataaaaaatccatcggatccaaaagtcccaagagaaccgccgtgcgttcagatgctcacatccataaaccgacgaaataaaaaatatacccagaagaagaacctcaaagcaatgccagagttaaccaggccagtaaatatacactgaacccgaaaactgacaaaaatagcagagagtgaagaaagagaatccgagactcaaatgtgaaaatgcttagctaaatgtggaaaaaagagtaccctaaaagaaatgttattttatctctgcaaccaaaaaaaaacactgtatttgattgaggaaaacgtcaaaaaccagatttgacgcaatgaagaaaaactcaaaaaaaaaaaaatgttaaaattcgaagctaaaattattagaaacgccaaaaaagaaagactaccgaaaatgctatgcagggtacaatggtgaccagtaggaaaagtcgacgctaaaaaaataataataaaaatggtttatattattgaataatgtttagtatttctccattagaaaaatgctaagtgtgcagtgagggttggtacctcggctccggatctgcaggtgcttaagatgtaaggcaaagtagggaatctttactgggaagcttctgacttctccactgatacagaaccagagagagagagagggagagatttgagaggaagagtatttgggttttggttgttaggatataatttgaagattaagatctaaaatggagtaaataacaaggttaattgtttaacgccattaatgaggtgaaatggagcttagtgttttagctcagatatcaacttcagaaacccgccaaaagcctctacatttctctcttaattcaataatttattttcttaatttaattctctttttttttcttaaatggacttcttgttttattactttgcatacccctttgtttctttttttttttcttttgatcacaatacttttttatattttaattttaaacacttattaagtctcccttttt

SEQ ID NO: 187939 - DNA, 4185 bp, Cannabis indica
gcttcccagtgcacatgagtgggagcgtgaatgaactgagataatttgtttatgatgtatgcaacatcaggtctcgttagtgttaagtactggagtgcacctaaagtactccgatataaggtaatatcttcaaaaggagtaccttcatgcaaggataacttgtaggcagtagatgtaggacttgcacaactctttgctccttctagatgcactttgagtaatagatcagcaatatattttgtttgggacagatataaaccttcatcattcctgtgaatttccacacctaaaaaataatgaacttggccaagatcctttaaagaaaactgatcattaagatcagagaccagcttgtgaattagggaagtatttggaccagtaacaagtatatcgtccacatatactaagagaataacaagattaaaaccagtaccatacacgaacaaagaagtatcagctttggatgcaacaaaaccccagccaagtaaagtggatttgagcttgtcattccatgctctaggggcttgtttcaagccatagagagccttatggagtttacaaacatgagtaggatgatgaggatcctcaaacccttgtggttgactcatgtaaaccgtctcttgaagagtaccattgaggaatgcattagccacatcaagttgcctaatttcccattgtgaggaaatggctaaagtaagcaccagtcgtacagtaaccggtttgaccaccggactaaatgtatcttcaaaatcaattcctggtttttgaagatatcctttggcaacaagtctagattttaatctgtcaagagtgccatttgcatttaacttcacccgatgcacccacttattcccaatgagatgcatatgaggctcaaaaggaacaagagtccaagtgccttgcgaaataagagccctgaattcagtgttcatagaggaaaaccaaccaggatgactaagagctgcttttaaagacttcggttcagtaggaagtagagattcaggcaacttgtgtcgagtagcaagataggccttcggtttgtagatacctctttgagatctagtaaccatagagtgagttcgaagaggtatttgagtattagatgcacaaggaacagatgtagaagccacagccgtggtagtattgtgcatatctgctacaggaacattagatgtgggagatgccactgtagtaggatcaagtgtactgccagagagaaaatcagcaccagcagtagaggcaggtgtattattgataacaccagtatgtggtatcgatgttgctggtatagagttggcaggagtgacttctgtagtgtttggatctggtgcttctgtggtgttttgatctggtacacaagcagtatgatgcacagcatcattgtgttcgggcaacataggtgatgaaacacaatgatgcatagagttagtagcagcagcatcatgatgagtagaaaactgagcagtaggaaaaatatgagtttcagaagttacctgagacatatttcgagctcgagttgctggataaacttgttcattgaacaccacgtttctggcaatgaacaatctgccactagaattctcacaaaggtagcccttgtgcttaggtgaataccccaaaaagacacactcttcagatctaaactcaagtttatgatgattgtaaggtcttaaatgaggaaaacatgcacagccaaaggattttaaaatggtgtaatcgggtggttgatgaaacaaacattcaaaaggactcatatgatttaggacaggtgtaggcattctattaatactataagtagcacattgaaaagcatgccaccaataggtcatatctagaccagattgagcaagaagagtgagtcccgtttcagttatgtgcctatgctttcgttccactcttccattttgttcatgagtgtgtggacaagaatgttgaaaccaaatgccttgatctctcaaaaacttgccaaacactcgatactcacccccaccatcagcctggactctctttataggaagattgaattgtttttcaaccaagctcttaaactgaataaacaattcaaaagattgagacttaacagacataggaaaagtccaagagaaccggctaaaatcatcaatgaaaacaatgtaatatttgtagttgtctttggaagagatgtgagatggcccccacacatctgtgtggatgagttcaagaggttgagttgctctattattggacaagggaaaaggaagtctatgacttttcccttgttgacaggcattgcaaagctgtaattgttttaaagaatgaggaatatgggcttgagtcaatattttggtaagtatagctggtgagggatgaccaagcttgcaatgccacagatttatatcatgagaaagcatagaattatagacagcagcattattaatagagcaagatgaactcagatttttattaacatcagtatgattacaggaatgacaatgttgaatacaagtagagatattacatttatgtggcacaagggcacactcagattcaactaagtgacactgaacagacgtgttggagagagtggagccatcatcaccaagaagataaagcccatctttaagtttccctttgactagaacagccccggtttgcttgtccttaacaaaacaacatgttttatgaaattcaagaaaaacatgattgtcattagtaagtttagagacactaattagatttttagtaatagatgggacttgtaagaccgaatttaagtttagagatgaagagtgtttagtaggtaagaaggctttaccaatgtgagaaattacaagtttcttaccatctcctacagcaacagcttcttggcccgagtaaggaatggtactgtcaagaggagcctcattgtaggagatgtgatgagtggcacccgtgtcaacgaaccaaccttggtcatctccaaagtcaggtacagaatttgcaacaaatgcagcagggtcatactccaagatttgttctgtgagattggcctggggctgagaattgccaacaaccgacttgggggttacccaatttttatcaaacctgtagtgacaggttggagccgtgtgcccatatcgcatgcatacttgacacaaaggtcgattcggatgaggaggccgattgtaaaattgagattggtacccacggtgaggaattcttgaagagggatctggtgcaaagccttttcctccattgttatgagtcctgaaatttccacttcttgagccaaaagtgaggttggcagccatctttgtagacaaatccatcatagttgtgtgtcgttcgagtctggtttcatgagctaatagtaaggcttgaacctcctcaagagacaaggagtcacttcgagaggttataccagacacaacggaatcgaattccggtccaagaccatttaacagatgaagaattaaatcaagatctgaaacagagtgaccagcaacagcaagagaatcgcagataattttgagtttgtcaatgtaatcagaaatggattgattacctttgtgtgcactagcaagttggctcttgagttgcagcaagcgagctttggattggctggaaaatttctgttcaagggctttccaaacagagttggaggtggtgtaactagccacggttccaagaattccctcagtcatggaagatcgaatccatgaaagaagaagctgatctttcttgcgccattgctggaatgatggatttggattgccattaacaagatactgaggtggagacagatcggtgagaagaatttcatctagttcgtgaccaataaccgtgggtagaacctgagatttccatgccaggaaattggttcgatcaagtttgatcgtaagagaagacgtcagagaatgcgagaagggattccacgagggattagaaacagtaggagcactaggagcagcaggagcagcaggatcggagatgcttgccggagacgagttgtcgccagacgacgccattgacgaaggtcaatggctctgataccatgaaagacaaagagaacagaggaaacagaacaaggcaaaatgccagaaaagcttgatcccagacttgggatgtttattgatatttatagaacagtacagctgaacaattacaagaaaaccgttacaacttaacaacagaattagttaaagaaaacaaactgttaacagaaaa

SEQ ID NO: 187940 - DNA, 2831 bp, Cannabis indica
tagtcttatttctagtttttgtttttgtttttttttttgtgatttttcccatcaacttttggtttttgagaccgcagattcattttagattgaaaagcattttcatcttcattttcattacgcctttctcgtctactatcatatgcttcaagagaatgcattagttcagttggtgacagagtttctaaatcttttgttttctctatcacaaaaattactgaatcatatttttcagtacaagaaattggtatcttctaaactattttcttgtcagaaattatttctccatttgatttattacttctttaatttcagagtagtaatcttttgcagtctcataatttttctttttaagatttttaaaatctcttcaaagctttttgtagtctaactatgtgtaccacgggtgctccttgaattcactttcagagctagagcgagccacaacatgttgcttcttggcagatcatgatacaagattccctctaaaaaacatgacatatccacctgtgctctttctatcatgaatacatgatgcccaatctgcatctgaatacccgtgaattgttaaagaagttgcaggagttaaatgcaacacatgtaaaattgttcctttgaggtatctcataaatcttttgcaagcttcccaatgtgttgaagtgggagcatgaatgaattgactaagtttgttaatgatgtatgcaacatcaggtctagtgagagtgagatactgtagtgctccaagtgtacttatgtacaaagttttgtcttcaaggggatcaccatctgtaagggacagttttgtgctggcactggttggattcgagcaagctttggccccctccattttcaacttgacaagaaggtcagtgatgtatttagtttgagacaggtacatcccagtggcatctctgaatatttctacctcgtaggaagtagtggacactgccaaggtctttaagggaaaatgactggtgtaggtcagagatgaacttattgatgagagtaacattggggcctatgacaagaaagtatcaacatataccaacaaaatgattagttcgctacctgaaccataaatgaatagagagttgtcaaacttggatggagagacaccccattgagtaagggtgcctttgagagtttgattccaggccctagaagcttgtttaaggccatatagagccttatgtaatagacacacatgattaggtttggaagggtcaacaaaaccttctagttgtaccataaacactctttcattcaatgttccattcaggaaggcattgcttatatccaattgtttagttgtccaattcaaagacactgcaagagtgagaataattcttacagttgctggttttaccactggagaaaatatctcttcatagtctatcccaagtgtttacaagtaacctttagccacaagtcaagatttaattctatttaagctaccatcaacatttaatttcaccttgtccagccacttgttgccaataacagtcattctagggatgtagggcacaagagaccaggttccagctttaaactcatgttgcatagttttgaaccactgaggatgtttaatggcagtagcagtcaatttggattcagagggaataagtgcttctgctagagggaatttagttgccaagtaagatttacgtttggtaatgccactttaacttcttgtcctcattccatgagtcttgatggttatattggtgtgtgattcaggggcaacttcagtaggtagagtatgctgagaggtgatgggaggttggtcagagatttgtggtagtggggggggggggggagaaggcatgggttaagaggtggtggaaggttgttcatttgtggttattagggttaatggcagggggaggatttgttggtaatacaggtggtaggtttggtaactggtttctgatgttgatgattgtagcttcaggttgttgtgtgggaggtgaggaaacctcagtgacctcaatatttggtgagggaaccacatcatgtagtggaatcacaaaaagtgaagcagtagtattagtatagagatcattattagatgtgtgaaaggtaaaagaaggagacggtgtagatacatgtacctgagagttttcaccagttggtgaagaggctggaaagtgtgtttcattgaatgaaacatctctcgagattatgaccctgccatctggatgttcacataaatatcctttgtggtgagaggagtatccaaaaaataggcatggttcagatctaagctccagttagtgggcattgtaaggtttgagatgtgggaaacaactgcatccaaaaggtttcaagatgttgtaatcaggttgtttcttgaatagaaattcataggggattatgtttccaataacaggagttagtagcctattaagagtgaatacagcagatgacattgcatactaccaatactccatgcttaagccaacgtgagccaaaaatgtaagaccagtttcagtgatatgtctgtgctttcgttcagcacggccattctgttcacttgtttttgggcaagggtgttggaaatggatcccatgatcagccaagaatcgagcaaaaggtcgatatccccctccccaatcagcttggacacttttaattggcatatcaaattgcttctccacaagacttttaaattttataaacacatcaaaagcttggtttctagtggatagtggaacgatccaacaatatcggctaaaatcaacaagaaagtgaacataatacttgaagccatacttagaggtaatgtgtgatgggccccaaaggtctgtgtgtattagagcaataggttgtgt

SEQ ID NO: 187941 - DNA, 2181 bp, Cannabis indica
acttgttgacatgttatatatatattatattatctttaatttctacgatgaacatgctttctccgctttgttattatatcatacttgtgtatgtatttgaattgaatatgtgtgcttaggaagaacaaaaacgaggctagaatatgtcattaactgttttggtaaagatatatttaccgggacttgagctgagagcactcaaccaccaaaccacttgacaaaaacgagactcgatagttggtttgttcgggaaattagaaatgccagaatgggaataacacttgatattatcagaaatgcccagaaagtatcatatttgtaaatgcggaaacaaagggaaaatttgagaaattttgttaatttgctttttgtctgattggattgtctgcagttttatgctttgttagcaaatttcttgtgaaatttttcaaccaatgtaaaattcaactatgttattttgtaggttttggctgatagtgtgactattccgtgccgactagttaaggggccgcaatatactggctccagtgatgtggctatgaattttgtaaagattaatggcggaaggtatttcgctcagacaaccatttgtttcttgatttgtaatgttttcttattcatatttgtcattatagtgttaatgtaaaatagcactgacatgatttattttgtatattgtttgaataatctgaatttcagggagtacattgttgatctaatgtcggatcccggcacactcattccatctgatgcagctggatcgcatatagaatacgacgattcttgcttctcggctagtcctttatccagagacattgattcatctcatgtagcttcttccagtagtggagttggaagttcatttgaggatcattcagatttcgggacatttgaaaacaaatctaggttaagaaatccgcattccacggggagggattctgatgacaaagaggaattaaccgctcattcacaactacccgtggaatctaaagttgaggaaacaaaagctgagggagaatcgaagattctctcggacgattttaaaaaaccacccaatgccgagaagggacttgtgtgggattttccgaacaaaagtagctaccctcatggtcatgggcatgcgagatctccttcttggactgaaggtgtcggttctcctgctgttcgtaaaaagaaagtgaaggatgtttcgaaatacatgatagatgcagccaaagaaaacccgaagttggctcaaaaacttcatgatgtgttgcttgaaagcggtgttattgctcccccgaatctgtttacagaaatctatcaagatcacttagatgcatcaacagctgaggctaatgcccaaaaagattacgcgggtgaaactaaagaaggctctggaagtggaaaccgagaaaatagaggccaagatgatattgctcggccttcctttcttcctcctttaccacaccacaaggtacacacgaaaacaaactctcctggtcaacaagagcttctaaaacttgttgaaggtttaggggtaaaccttggacgtgataatcgagaaataacaggacacgttatttcatcaccagccgaaataaatccagcgaaatatggtaaaaatgtccctgttgctgctgctgcagcagctgcagcagctgttgttgcatcttcgatggttgttgctgcagcaaagacaagtgctgattcaaatctcgaacttcctgtagcagcagcagccactgctacagctgcagctgtggttgcaacaactgcagctgtcagtaagcaatacgagcagggtatgcgaagtgatggtgacacagatagcggtggttatgaaccccgaggtagtggtgaccgtgacattgttgtgggaacaaattcagaaggtgagagagtatcggataagtcggtaggtaacgatagctcgagatctgactcaattgacgatgttgctgagtgtgagattccgtgggatgaaatcaccatgggtgagcgtatcggacttggtattgatcgacacattaagctatctttatcatgcaattcatttcaccaataaatctaatccctttaagttattacaagtcattgttcgattctcattgttgcaggatcctatggggaggtttaccgtggagagtggcatggaactgtaagtcttttcctcctcgaacctgaattctaagcttcttt

SEQ ID NO: 187942 - DNA, 4621 bp, Cannabis indica
cttcacttcatttaatttattgttagatatatttgtgacaaataataaaaaaaaaaatagcattttcttttcaaaggaaagaattaacatatttgaaatgcatataaaacaaaacaaaaataataattacaatagagataactaaaaggataacataatacaaattattattcttcttcataccacctattatatcatgagtgttttagccgaaataactttctatggttgcaaaaacagccatgaattatactgtacgaccaaaaacgattattatagtcacaaaacaactatagattcacactgtgcgaccatcatggtcgcatagagtaaattaagtgaagttattttataattttagtatttgaaatggtaagtttaacaaatttctcttgtattatcaccttcactacaataatacaatgcctattttttgagcttacatttaatattttatgtggcttgcttatcaattcactgttaagatattataaaagaagatgcaatgcaaatgaatgaatgggaagcatatatgacatatcataaatatggcgttttttacaaaaagcacaaattataataatgaaacaataatgtttttggttttctgtctgttgaagaggtggagccttttgtctaatccattccatgaacactgttttttgagtttttttcaagtctataaagttgcatacttatctaaaataatgaaacaattattcatttgcttacttagcttaaaaattattttttattgtttagaaaatgaaaaagaagactgacaatcattcatcatttgataaaaaaatgatagaactaaaaaggaaaggctagagtagtagaagtaggaggatatcatgtactagtactaccaatagctaacattttgtaagtaccttaaacacaagttgtaccagtccaaaatatttgaaggcatgtcgatgtatctcacggaagaaaatgacataactctaacaatgcagaaacatccaagcaagtaacccttctaactactgctttatcttctcctgaaaaaactgtttaaatcacatataattatgattgtaatataatagaagacaactgaaattccaagattagaggtaagggaaaagaaataaccttcatataataccatggattcatttagtacaaagtagggctatgtatagcatcactgttaatattgagaactaaaaatcattagaaaaactcctggccaaactagggaggacagagttatcttccatgagtttcaaccaaaaagaaaatcttctagtgttacgtacgtattacaacggtcacaattaatattcataaatccatacatattaaatattaattatgcaacaagctacaagtataggaccataagatttcaatgtggcataactgcataaattagaacattaccacaatgagtacccctctagataataaagggggtgatctccgcaacaaaagctcctaaaagtgcaaagtgaatctctattcatctcaaggtaagactactcttgccaagtgcattgaaaccagaaatttttacactgaataatgtaataatcacttctctgaaaagtagttttcaaattcactgcagttcacaactaaggatactaacattttagtgctcactgccaaaagtgggcatccaattaatgttaatgggaagcaagcaatcttctcaaacaaatcagtagagcttattctttgtttcatttactcattcaaactacaaggctttagcactgctatgcctcccccaccccagcgtcgtctacgaccccttcgtttcctcccatcatctttctccttcactttttcaatcaaatccctttctcctcgtctcttatacatcttaaaagtgatctgtctttcttcagccatcttcctcaccttctccgtaatttcagctgcaatttctctgttatatagtttccttaagccacgcattaacttagcaaaagtatctgcttgtggcattgcatccgcttctatcatgtccaaacagtaggaacaagcctccttcacatgcccatttttgtacagtgaatgaatccatattgtccaggcagaaacattaatctcacatcctttattcacaatggaactccatatatctttagccatttcaagcttgtcagctcgtagaagggtatttattagctccttcaacgtaccatattgtggggcagatagtaaacccctctcaaccatttctttgaagtattgacaagcttcaaccagaaagccttgcccaaggaagccatgaatcataatcacaaaggtgtcaagccctggacttaacccagttgcttcgatttcattccataatcgaacaccttctttaacttcccctagtttacatgccaaccggatcacagcattgtatatgatcaaatcaggaacagaaccaatcttttgcatctccaccatgagctccaagcattcctccagctcttccttcttctcgtgtgccaacataatctgcaaataggtattctgactaggagtatggccttgctggatcatactatccaaaatctcataacccttttcaatctttccccacttacaaaacccacttatcaaagtagtgtaagtcatagcatctgcatgacagccactcctttccatatcgataaaaatacgcatggcttcttccatcttctcatgtttgcagagagcctgaatcaaaatggtatacgatactgcagtaggaacacagcccttccctttcatctctttcagaagatcataagcgtccgccatttttccagcatgagaatacccaccaagcaaattgttataaaccacaatgtctggttcaaaacccgcttctctcatctgaatcagtacaacttttgcctccataagcttcccttctctacaccaaccatacaacaatgaagtaaaatgctttaaactaggcttaaactgaatcttcatgtcttcaaataaagaagctgcttccttaacactatcattcttgcacaaagcatctaacaaacaaccaaagacatactcatcgggttcgcagccgtacttgggcatttcatccaacacttcaattgcttttttaaccattctagctgaagcaaaccttctcatcagaacaataaacacttcagatgttatcaactgagggttctccttcctcatctcctcgagtagtgcccaaacagcaccaaattggcgcatcttccccaatgacttaatcatggctttgtaaacttcataactgggtctgtagccaggctgctttgacacccacacaaagaacctgtaccccaagttccctgcatcaccacatcgatttaagacgcgttcagccaagcctgaacgcacagtgattccagattcttgcaaggccagctctagcttcgggaccctagagtggaattttcttaagattttatagatcttttcaacatcagatgcaaattcatcattgcaataactctcatcctctgcaccgttgaattgattttgaaggccaaccatcccaaacccacttgcaccatcatacgttcgactgttggatttatgattcaagccatattggctggaatcagcagaaggtgtggaagatgattggctttgtacagttccaagtacccttaagtaagttttccatgaaaggaggctaaaacgggtgcccggtttgaaagaaagagagaaagggtatttggtacacacaagaagccttgttttctgatacagcctctgcataagctaattcgataaagttcgtgtatataatcagtcaccattaaagcctagctttaagcagaaagcaaaaattagagtacaatctcaatgcaaaagcttaccatggtgcgaacaatgtcgggaacagtcagggaccgctgcaaactagaagaccattatcaatattcaatcatcaacaaccaaagtctttggaaatcaagcaaattttacttctcatatgaaatcctaaaacgacaactattgtattaattatacaaatgtacccacatgttactaagtacacctagggtatttcgtatcccttaccttgaccattttcaccttcatgatatagtttcctattccaaaattcttacttggctctttcttagtagttactagggtattcatcactgtttagagtgacttcagaacaaagaacagatcaaaagaaaacccaagaatcaaagaacagaccactccttagattcaacaatcatacccaaaaatcaaaatcagatatgacagtcatgcttcaccgttatgaaagagtcaaaaaagatttttgagtagaaatacatcctaagctattgtccctttccttactcctccagaatccatagctaaaaatcagatgtatagctttgtctaatagtactttatatgcttatgtcttgtttgaataatgttcgttttggttgttttgtgctaaaactctgtaaccatggttttcctccgcaaaaagtgaggttttcaatacattttgggagaggggtcagtctatacaagtgacctctttctcctttcgaaaaaaataaaaacagactatttgagcaatacttgaatatcatttcaggttgatctactcgttctgtcataaaatgaacagtaaagacacttgaaagctatt

SEQ ID NO: 187943 - DNA, 1045 bp, Cannabis indica
acccctgctcaatttacagagcctgcagctcccgcagcaccctatgctgcggctgctgcttccgaagatagtaagccaatgggtgtggatgttgaaatgactagctgaagtaaaccactaaattcaatgttgcatcatcacatcagctatgccttttcatacagagaaaaaaatcaacattgtccagttttttatggtcaatttcttgagagcttgaaggagaaccttatcaatatcattacatttgtttcaagttgttatattaatttattcatgaagagaaagaagaaaagggaatattaacaaattaattgtataagagttgttattagattaggcctgatatgtaataccatatttttggttaaaatgatgtaaaagattttgattatttattgctgctgttaatccctttgctccacaattgtcttttcccaccctctcattcaaaaaggttgaaataaaatttacaagaacatgttccagttcccttgggctgtgttttgcacaatcttgttggttctggtttgaattctgcagcaaccattggcacggatttcagccgttggtttgagtcttcttcacaggggcggtcgggtttagtagaggagggtttaaaatgatcgcttggtccctttgcaaagcttgaaatgagttattatggaacggttaagttgggacagctgctgaaattgttgttagtgcacgttcagaccttgctcaatcgagttatgttcaagctcatatttttgagcccttgctgcagcctcctgaaatgcacagtaggggagagcattggtctaaacccgaaactaatacaatcaatgtaaatgtggatggcataatttttacgaatgacggtacgtacgatttctattaaattttgtcaagatctcgtctattttcaagggtttaagacctctattttattggatcgtgtgtaaaggtcatttctagtttttaatagtagtacccatttgtgaaatgtggcccgaacccatttcagaatattattagtttgacattaaatttggttaaaatggcc

SEQ ID NO: 187944 - DNA, 5036 bp, Cannabis indica
agtagaaatcggtaactcaagagacatgttttggagataaatttgtgggtcacttcactatcaattaattagcgaggtaagcccaaacaacaagaccactagctcatagagaccttcttgagtttggaaagtttgttttgaaataactttgagtcaaacatgtatgtgatggtatcatgatttgaattcaagttttgatatattgttcgtccaagtaattcacccaacaatttcttatttatgggtgtaacatcaactaccatctttcttttaattaacaataccaaactagtaaaaggcatattggataattttggtagcaagcatttcttgtactagaggttctacctcatccttttgatcgcgagggtataggttagacactaataggagaggttccatccttcatcactatcacgtgctccttcctctaaatggaggtattaaacacttcttcacattcctccaaaacaacttttatctttgtaggtaccatatgtttcttctccaacgatgcttggtcagcctcaattcaaccaaaaatgttgatcttcatgacttaagtgcccgaacattagagaaacaaatgtcttatttaatgtagactccccttgcaaactcactatatttgtgttgatattaaacttcatggtgtgagttttccaattaatatggataaccccaaaagactccaatgattagatgcctaacataaattattgctccccacgtctagaggcaaaaagcctatgtaatttccaattcttggataaagactagattccctgacaaatgtgtcgagtccttgtagctttagttgtaaagtacaagtccattatctccctgtggttcaatagtagaaactagtaactcaagagccatgatcaaagctttggataagttgtgggttcaggataacttgcttcaatgtggtcacaaatcctattgagaatgctaggttgtactattgttggagaatatgactgcagtaccaatgacctattttgaagctttcctcgaataaaaggatcttaacatgctttgagtctttctctggcacatctttatcttagtgcgaattaattggtataacttactagtttggctgtattgtgctccaaactcggtattcttttgcagctcttgtttcattaagctcaactcacctagcattgtagacccttaagttgattcaaccgttgcctccattctcgttgccatatgtctgtataatcgcccctcctgaattttatttctagcttcccctgctcctatgattttgttttggtttccctaaattggaaacttcctaactaggaatttccttttccacacatgatgtaggtatactgaatgagcagttgactttgttacttattgctcggtttgacataatatttatttcttggcttttgttaataagttttttgtcccacgaaggtaccctcctggccatggtgatgtattcccatccttgaaaaacagtggtaaacttgatgcattattgtcacaggtaagtactatattaggcatttatgattctcattatgtcagcttttccccacatttttatcggcccctgtgcttacctattttttaatatttctttcttacagggtaaggagtatgtattcattgcaaactcagataatttgggtgctgttgttgacatgagtatccttgttttctaaattccttcattttgccacctccaatgcttgctttcacttatttactgcttcttgtaatctctttaatacattatcaaatattgcatgtcatgcaattctgttatacagttattttccatgactagacgaaatagaaatcttaagccatttgatcaagaacaagaatgagtattgtatggaggtacaagagatacttcttgtgcttgggatttgatacatttatttgttcctacaattttttccccttgtttcgacaggtgacgccaaaaactttggctgatgtgaagggtggcacccttatctcatatgaaggcagggttcaggtataacatacttttgtgtaacgtcttgcaaattttatttatttatttgtatttttgtatttttaatattctcttgcttacttagtatgttatccattagtggatgcatgtatagattcaattttggcgctttttgaaatttatgttctcagggtgaattttctcattcaattgcatagatgtcattgagacgcaaatgtagtatttagtgttcctatataaaataaataatacatgtttcttttttgctaactaaataatacatgtttatgtgggaatgctgttgaaaatgctgtatgtaaaatatattctcatttttcattggccgtgtcaaattgtgtgtttgtttgagatttattgtaatatgccctgcaaaattataagggcctgcttctactcctttggctgaaatagtgaaatattgttgcaaaaaatatgtgtgcataaattactaatataaactccatcaactactcctaaatgatggaaaatcatgagattgaaaagtgacaggtgcattggtgaaaccaaatgacatcacaaggaactcatagtgtccgtcgtgagttctaaaagatatttttggtataagggttgccccccttgccatcttgtgggtaagggaagccgacaggtcccttttactttcctagaattgatctctcttgtaggcttacggttagcttccactttataacctaatcgacagctaaggattcctgtggaagccttacctaatccaattgctagggagcatttctgagcatttttgtttgtagggagacattttaactcgagtacaatccttgtaattgctcttgtttgtttggcccagaaaccatagacaaattattatcttgcgggtgtgtctatatttagcgttatatttatgtgaatactagttttccataatatatatttttgacttcatttttctatgtcggatgttgtgtttattccaacttaacatttgttcctttttctgtaagcaacacttaccaagacaatgataatgaaacactttgctgctttttatgtaatattttgcagctcctggaaatagctcaagttccggatgaacatgtaagccataattctaacaaactcttttgttctcataattcagtttatctctagtcactttaccaactttgcctaaaccttaatgtagatggtccaataatgtcagttttaatcactggaatttctactcattaccgtcttatgtttttactagtaaaaccatagaaattgttcagttatagatttcatatcatttctgccaccttttgtgctaaggcactctgtttgatattgttatcgtgatccttcaaaactttgctccttcatataagtgaggggagttgcagtactagtgcctagctttgctcaaaataaatggagctaaattgtcattataaattcctagacatgctttgtgcaagcttgtcatctaatacacaatgttctctttacaacaggttgatgaatttaagtctatcgagaagttcaaaatttttaacacaaataatttgtaagtcagattgttctctctcatttttattgttgattggtactttcgtttttcatttcggaaacaactccggttgccttaggttgtggctaaacatttagttgttgaagttctaatacattcattctcaggtgggtgaacttgaaggcaattaaaaggctggttgaagctgatggactcaaaatggaaattattcctaatccaaaggtacagatatttcattacagcaagtgatatatccttgacaaatttctgactttctattcttcattttgtttataggaagttgatggatttaaagttcttcagctagaaactgctgctggtgcagcaattaaggtcttcaaagcataaattctttgagacattttcataagtaaaatataatatatgtatgtatatatatttaagtttttaattgtaatgctctttgccccctaaaccagttctttgacaatgctattggtgtcaatgtgcctcgatcgcgatttcttcctgtaaaggccacttcagatttgcttcttgtgcaggtggttgcttttcttttcttttcttcttaattttatactgatcagtgttagtagttccaaatattttgctaatttattattatttttttcagtctgatctttacactctagacaatggttttgtaattcgaaatgtagacagaactaacccggctaatccctcaattgaattgggccctgaattcaagaaggtaaggatatcttttgattaagttctttatatcattctaaatctattatagtttcttgattacgatggtcacttttgtttttctatgtatcatacaggttggcagtttcttgagtcggttcaagtcaatccctagcattgtggaactagatagccttaaggtttctggcgatgtatggtttggctctggtatcattctaaaggtacagataaagtcctccattggttttggtctttcataatttcttgcactaacatcctttaatcagatagtaaatagagtcttgttcaagagaaatgatatcatattatagccatactattttgttaataacaattcttgtgacttttctatgtgtttctaatatctaatcttttcatgctgagtgcaaccgcatgtatcttactaatgttttaaacctattgtattttgtagtttgttagaaatttttgggaagtgtaaccttacaataatatgttcatatatgtgattaaatataggcttttctcgaaagttaccctgacctaattatcccgttgtttgataagtagagatccttagacaccattttcttggatttttcttcttgttattgccaagtaattttgtacccgttacacttttaatttataaaaggggcatgtaagcatcactgcaaaacctggggtgaagttggaaattcctgacggagctttgcttcaagacaaggtagttttctttctttcaaaagaattatttattattctaaatgttttgctggtgtgagt

SEQ ID NO: 187945 - DNA, 3762 bp, Cannabis indica
atcataataaattgtaatttttttgtgttaataattttagccacgaaccttttagtcataacatataggaatgataatttataattagtgaaagttttcattttcagtcataaattttactgtaacttaaactaaaaaaaattgtagtgtatatatataatatgagaggagttattttaaatataggccttattagctaaagtcatagctatagggttgtataatatatatagctaggcactaatatatgcaacatttcacacttatactttcatgaattaataaagtgagaatgcatgtgccttaacgtgaacagtcctatatatgtgtaattccacatgagttactaaacaattaattacaataatcatataatgcaaaaacgaatctctatcttattatctacactccctaccatccatattgcatcctacaaatgttgcccaccatatagaattctacattcggaaattcaatgaggaaaataagcataaactttaatgaatctatacactagtatatggcactaaaaaatcaaaagttatacaaagaactttcaagaaagtgtgtcccttcacttcatgcttttatgtggtgaatttgcttctcggaatagcatttctactttaggttgccctaactagtgtttttactgttggattacgtttataccacaatcaagaaatgtgataatacaaatagggttgtgccacacattcttcttgtaagtatgtgataatacaaataggggcatgccacacataccagtcccaagcttttgagaagcctaagacaaaatatcaaaatggaacagtttattaaaataaataaataaataatatcaaatatgtacctttatgttaagtaagtttttagttagttagttgagagtgttagttagggaagtatgtttctattacttagtcttttaactaattttgtaaactaagttttttgtataaatacttgttcatattaaattgatcaatacaattattatctccatttgataatcatttctctttctttctcctacttttatttatctctttcttctcttgtgttacactttcttcttcattaatggctcaaagattcaatatgatatcagagcatttttttgtcgctcactgcaaacatatggcaacaaccaatcttgacaagtactcaatctaaccaatgtaactgcaactgacattcaatccataaatcgtggaagtgatgacttttcaatctacttcaatcacaacctatcgatctagattattaatcactactttctttaatggaaacaataagttcttattgtaattcaaggtaatagagttcaaaagtatatttttgaaactcctatgcaattcctttgaaaagacaatcgtattcctctaattgtgaatcatgcctatcctgaatggaaagtttaaaattatttgctaatgtcttggatactatcctagatgagtgaaagtctcttggttcgaatggttggctgtgaaaatgcaagacagatctagaccactcttgaaaagcatttcactttgcaaatctctgaaaagatcttggtgtttagaattaaattatagaatctcaaaaaaggatctatgtccttgaatgattacttgttgaaagtcaagtaacatctcgattttcttgcttctgttggagaggttctcagcacaagggatcatgtagctactatctttaaaggactaccaagtgagtatgacacttttgtaatttccactaatacctgagttgaatcctacttagtttcaaaaatagaagctctcattactaaaagtatgtctatttttgtcagtttctaattgacatttaaattttttttgtcaattttataaattgacgtatatgttgcagacgcaaatttatattaattcgcgtcatttcttcaccgtcagtattgcaatatcgtgtcattttagaatagacagaaatgaagtaaaaatcaaatatttgattatatttttgtcagttttgtacagacacatactaaaaaataataataaaaaatcagatctagctcaattcaaatccctccacacatcagaacaccaatatacgtttttacaaaataacaaatcgaaaaccaccgaagatcctcgtcgttgccaaaaaaaattgtgcaaacaccactggagctcccgctatcgacattgggcctacaaaagaaataggaaaatatcaaatttacaagagagagatcctgagagaacgaaagatatagagagatccagagagaggaggagagagaacattacctctttgatttcgacggtggcttgaatgacgcgcggtcgttttagttcaacagtggcaaccaccgtataagagtggtgcgagagagcagtttagtggcctatggacagtaatagcccatgattggatgggatgcgacttagatgggcgtgcgagagagatcccgagagaagagaagagagacatgaaaaagaagagagagaaaagttgaatggggtgcggtttggatggagttgcgactttgaataaaaattttaggttaattattatatgtagtagggtttttatgttgttattgagcttgggcttttttttttttgttaatttgttgtgtaagtttggaaatgacgctgcatggcatctttttaaatctaatgcaaaattttcaaaatgacaaaaaatctcaatgtaatctttttgcatcggttttaggtattgatcgacacaaaaagacgattttgtagtagtgtctacttcttacatttaaaagtagaattgagacaaatgacagagaaattgatctcaatgccaatcttgttgtttatgattatgatccctacttccttgaggctaattactctagtattggaagaaattttccacctacttatcccaccctttcagatcttatgtgtagagatttcatgtcctaaataaaatttaattttattgtaattttatttagttttaataaaggtaagaaatcctatcttgatcttgtcataagctttgttcacatgtgttattacgtgattatatgtttaatatataaattttattaaatctcaaatatatagttattaacaattacagtgatatcatcacagttaaaagtaattgtaattatatgcttcaaattattcagtcccatgatttatcagtgcacaagatgtacacttacgtgataattagtgatgaggtttgcttacacttggataagtggagtgtcttttccaaagcaatattagtaaagtaaaccaagatcgtatgtattatctatacatcgagctgaaggaatattgacgatggaaaagatatcataaccttaccgttatattttttctaaattgatgtttaattgatcatagatcaattgatctcaattctgagatagttgagctctagcctaattgtattacataagttctttgacttgttcgtactagctaagccgtaggactagcccatacttacacttgggaactcagtagtgtaattgagtgagagtgttaatcatagatatagacatttataacttctatgtttattagaagtgaaacggtaattttctttgagcttagctaaaggcattaaatgatagaacattaatttcgataattatattaatttcctgaagtatcatttacacgtaactaagtattttaaggataaaattattgaatggtaaaaaagtaattttgctcctactcaatgtaaaccattcatagataatcaattattgtttttttgatcacgaagaagaaa

SEQ ID NO: 187946 - DNA, 859 bp, Cannabis indica
tgagctagcctcaagtggtttcaaagtgtttgagagtttaatatagattatgtagcaagtgtattaagatgttgagtaataataataatgaaagtgtaataagatattgtgacatttgataagtagtaattaaattattttttttcaataaaataaataaattttattaattaataagtgacgaaagaggtggcagccaccaccgtccaagacggcaagaccaaacagacccaccatggaaaggtgatggtccaccttattacaaaaggtctctaatatgattcacacaatctcaattctaattctcttttttcttttttttttttttttctttttttcagaatctaaatcgcaacaatttgttgctcttttatggttttatatggtagagaatctcaattcaaatagaaatattatgtcttgcctactttttaaacaaaatcttatacatttggtctatagattcacattattggtagcctttttcttcttcctccttggattatagctaactagcatcacacattattggagaaatatataattatttatacatacctaaaattgaaaatgtataattatttatacatataaaaaattattggaaagttagtagtactaatattgcactgcaaggaagcttttagatagaatgtcatgtgatttttaaaattttaaaattctaaattttgataaattaatgcataaaatattttaattgattagtttagttatatgaggatgcatgaaaatggaatcatcatttgtagccatgatttggggcacccttcaaaaacatacttttttaaaataacctttattagttatgaaattataaaaaaaaatataattctcatct

SEQ ID NO: 187947 - DNA, 2755 bp, Cannabis indica
atatatataacatgtcaacaagtaccttgaatagcaatgcccgatgacgagccaatccaattttcagagaaccaagcggcaaaaccatgctaccatgtgttgctttcaaattgtatgtaaggttttgccattctcgcaacatgttttcaggattcccaaccggcccacccatatagttggctactaaaacagcaagttttctcaccaaatcgctatttacaaaaaccaaagaatctgatctcgactttacagccatctctagtgccacctgctcaagcttcaataaatttgaatctgcagccttattaaccaaaactgcttcccaggcaactccctcggatacaggtgttccttgtagatcaatgagggaaggcattctttctgaggtggactcggtcaagattccatacaggtcatagaagccatccaagatcttgtcatcgtagctaagagcattgtaattctgtgaagcatgtataaatctacgatatgagataggttagaacggaataaaatgtatgacaaaagttgagaaaacaggtgaaattataggaataatctcttcggctctagaattatctccaacataaacagttaaaagttgatataagatcaatgtaaaactaatgaaacatataactacttagccattttgctttgtcaagattttaagtacaatatttatgtagctagctgaattatagtggcaatgaatgcccaactcttcggtcaatgtgatcatcgacaattatcatgatgttcgggaattttctaagttacatttacccacaatgaaaaggccagtttttaagaaaagaacagctgtaattcttccccttctcccgatacttcttgggtcattatgcataagttttgaggcatttctgttttcattctccatagtgtgttttattttatcctctctcggaaaaagggttagtaagggatcactttcttacagaaaccaaaattttaaaccgagataggaacaccgcctttgaataactcgatcatttctttcagtaaaagcaactgaatacccaaagacattgctgaatgtttctaaactttactcataaacataactctagactcagaacttcaaccactttcttctccatccatgtccaaatttgaaaccattcctgctttcaacaatgaaagcagtctataatccagcatagctgatatcgactttcaacaacatcaagtttctgcaatcgtgctctactaatttagtggtccgggttttccaacttttggttactggcaacaagagaaaaggagtgataaaggaaaggttcacatgagtcatgagactgacatggacacttcccctgattaatataattttcttaagcataacattagcttcatacttaattggagttaataaataaataaagtcagcatactattttcacttcctacatttatggaggacaacaaaagtcaaattttttttatatcccatgagcattttggcatttatatgacttgactgacataccacaaaaggtaagagttaagattgaaaagacaatccaaatcagatcatatatcaatgaaatattaaccacttgtgtactccatactaaatgccaataaaaatcacagatgacaagtcaaaccaaaaatttccaatcattgaggcaaagttaaaaatgaagaaaaaaaaacttacccaatatctgtaagcaacaacttcagctggagtattatccacagcacaagaacccaaactaatctgtttcacagcttcaatctgaactgcctctggatcttccctagcactcatttccaaagcaatttgtatttgatattcttcctcaacatcaggatctcttgagttactagaccctgaatcagccctcaatacatctgaagaactaacatctaaaccagacacaatactaacttcatcagatggtagttctgttctctcagttctaatatttgagctatgtctattagcaactgaattcaaccatccagagagacctgaaaaggggtttggttctcagaactatgatgagaccttggaactaaatgtctatcaggagaagaaccatcaataatggacttatattgctcctagatgaagtagatcctccttctacatcttctggttgatttgacatgatgtggagtttcttaagcaagttcttcatgttatttccttaagcttctgtactgaatgctaaaggaataaaaatctggccataaacatctccattgtcttggaccaagcatgaaatccaacccccaaaaacaaaaacaaaataacagaagaccctctcttctgactttctttgtctttatacagctaaaccccacaaaaggaccctaaatctaagtacaacccatcattgaaaacccacaaaagaaaacgatttcaagtagtaacagtgaagctttttcgattttaagaagacccagatgcttcaattgaaagttaccacctacccttttcagaaaaataaaaatctaatctttgaagaagatatatcacagaggcaaatactcaaacatatggcaaaccccaatagataaaaatattaaatttcactacttttgagaccctcttattcaccctccagaagcagaataatcagagtatacaattcccaaattgagagaaaaaggatctaactttctatacaaagtaacaactattgggactattgaaggagtttaaaacatttatgagagagaaagagaaagagaaagagagagagagagagagagagatgga

SEQ ID NO: 187948 - DNA, 3186 bp, Cannabis indica
taagaacaagtatactcttagctcatttaataaaataattaaaaagaaaaaggtatactcttaagttaacatgaagaaagattgaaggaagaacatatgataatgagaactggaaaacagtaatagcattcaggaagaagcaaaaatgaaaattgaaaaggttttaatctaattacaagagatatatctcaattacaacacaggcaaatcgtgagcaatgttccaattgatggttagctctctaaatgtaagggtctaaagagaaaaaggaaaatgctgtagcatattccttttccattgtcccaaatctcaaaacacccaaaagaaattatacaagcttgaaatactctcttcacacaacccattaaaccaagaagtgactaatctcgattcccaattctcaagttccaatatttgtttcatttgatgtatttgagccagtcaagagaagggatttttgactgactttttcatcttttttgctgctttccagtattccttggtgagtctcttatgcttttggattgagtgtatgtgatctgctgagttccatcagatttcttcttgcgtctcccttgctgagataaacgggagtgataagataagatagcaaggtcattgagatcaagcaatggagtaagaaccttcacaacttcatccatgctaggtcgcgatttagggtccctactgaggcagttgtaagctaactgagagaccttctgtacccctttaagggagtaattcagctccaaccgaggatccactagttggtaaagctttctcttttcagccaagtatggacgagcccatgccactaggttctgttccccactaggacgtttcttgtccattgatcttcttcctgttaaaatctcaagtagcactactccaaagctataaacatcacttttagatgtcaagtgtcctgacaaacaggaagagaggtcccattttatacaactagttagatctaagatttttaatgtaaggtaagcattggaatgttgagtaggaattccaataagatgatagtgagaattgtaatctgtaacaacataatgacaggttccacatagatggtttgtgcattgactttcaatgttatctctttaactagctagctaactatttaaaactggattcaacgttagctaataaggattactcataatgcagatttattatagatcaaaattgaattcaagtgctagctcttccaaaagggtaagggactagtcaaaactactactctctattaaaatataggagaatggtcccaatgaaccatggaccggctgcaatgattttcgtacctgtcataacatattctggagcagcataaccgtatgtcccaaccactctcgtggaaacatgtgttttgtctccttgtggcccagctttagctaaaccgaaatctgaaagctttgcattgtattcctataaaaggaaaccccattgtgtttaatgattcattaaagccaagaaatttatggtaataatgatgaaatgaacaaagttactatattttctactagttaataaacttatgagcacgtactgaatccagcaatatgttggatgtcttaaaatctctgtaaatgactggttctggaccattgtggaggaaggccaatccttttgctgctccaagtgctattttaatcctattgcaccatggaagaggtatattcccttcaaaatttgggaatatcaacattttattttagaaaacaatggagtactagtaggcaaacactaacaagcatcatagtatatatacatgaattgggaagataaggagaagagaacagtgaattaatggagttttcgggttgttgcatataatgtgaaaagaattattatcttcagaaatccaaactgccacacttaatgaacaaaaaagtaggaaaaactgtttttacttaatgaacaaaatatatctaatagaaagggacaagagaaaaagaagtcaagatattaggtacactcacttctaaaaagatgattttcaagactcccacgagtcatgaattcataaacaagcagtcgttgatcatcttcaatgcaatacccaataagcttaaccagattcggatggtgaagctgtccaaggaagtcaacttcagcctgcatcaaagaaagtattacaattcacatgttagcataatatgttttctttagtgcctcatggacagtccctttcagtatcaatcctactaacccaagtcagatatattcttactaaccacccattctctgtgaccttgtagaccatctggctttaagctcttaacagctactgtaactcccgagccaggtttcgccggtgccgtcccattttcctctatccatcctttgaagacaaatccaaatccaccctcaccaagtatgctatccggcctaaagttcccggttgcagattttagctcttggaaagagaattgaagcaactggcaattggatttctcatctgagggtggtggggtgggattatcagaagatagatgagcttcattaggtgggcatagctctcggttgcttgcgtttaggtaacgtgtctcagtggctgcaaatgagaataatctttcttagtgtaaagaaaagttgttaaatcagatttcctttcatgtatccagaaaacataatagagtctaatcacttactggtcctggcattttaagaagaaaataaaaatcataaaactgtttgcaacaaaagaagaagaagaagaaggagagatttttcaaacaaagctaaaacataaaaaaaaaataaaaaataaatcatcattgtcaattattaagaacaagataaagctgaaacagctactgagaggcatatagcattagaaaacaataaagtttttttaactttaagaatcatcagatgacagaattgcattttctgatgcttagagcactgaaactggtattggtaagagaaaccacaaattgcccagcttgagatctgtccttgaaattacaagaagtccagtgagtcagttatgaagatatgattgcagaccttttttccttgaaaacaaaggaatactgagccagaaggaatcacaatggattgaggatcacaacatcataaaagttgattaactttgattgaaaatttagaaacaaaagaaaaggatttattaacatttttctcagagtgtaagcaaaaaaaaaaaaaaaa

SEQ ID NO: 187949 - DNA, 1985 bp, Cannabis indica
attgtgttttggctaatcaatttagcgactcttgcacgatatatccaacccaacaaacaatggtggcgactaagcaaagagatgatcataaagaggaaagggataatttttttttaaaaaagaagaattgctttatcttcaagaaattcactaatacataaatatgtatatatatgtatgtgtttatttaaattcataatgtcattattcatgtggtgaagcagtttgcaggggtagaagtacgtagtactaaaagctaggagattcaagaattttgaggaattaaaagtttaaattaaaaattaatatacgagtcttgactctttagctgtagacaaattattaagaacactaataagacatgtcacctcttggagtgaagttgtacattgaagatgaccatgtacgtaattcattttcaagctaattaatcatatatctcatattagttagtatttattatattatgtctcttaattaattatgattttgttgactaagtgcaggtgatgatggataatgggatagtacaaattacattgtcaaacccagatggaatcgttactggaatacgatataatggcatagacaacttgcttgaagttcgtaatgaagaatccaatagagggtataacataaaattgtgtcaaatttatcaacaatattatttgctattttcaaaatgtatatgtacatttcattttcttatttatatttacttagttatattttttttattgatttattatttacgtgtatttgtataggtactgggacatggtctggaactcaccaaccactggtatcacaactggaatatttgatgtgtatgtcatctctatttttaattacctcttaaccataaggtccataaccatctatactcttcttactctcataaattagtaacagtttaaatttaattacttcagtgcagccattttttacctcacaaaaaaattgcaccttttcttttgcgtgtttgataatgatagagaatagtaatcacagactcagccttaatttatgatacggataagtcctcttaaaactcctcaaaccttatttatatttctaattttgtaccattttctttaccttttacttctttttaataaaagtatagagagtcagagttccttgatgaattttacttctttttattagagagtctcgtattatatatgtgaaaacttaatactcaattgtgatgttgtattaatattaagactgaatactataagtgcatacattattttaaactcatctccactagactaattgtgtcacatatagctcaactcaattatattttgcatcataatgcacaggataaaggggacgagtttgagtgtaattgtagaaaatgaggaacaagtggaaatttcctttacaagaacgtgggattcgtcaatgcagggcaagtttgcgcccttaaatattgacaagaggtctctaattataatttcacttggattaattacataatttctattgaataatattggatgattttataaattactttttgattatgcataggttcatactgcttcgaggttcatccggattttacacctatgccatttacgaacactcaaaggaatggccaggtttcaatcttggtgaaacaagagttgcattcaagctcagaaaagacaagtaagctcacttcacctcacctttcttagttacttcctttcttaaatatgtaaataaattgtcaaaagaaaatgttattttaagagtaaaagtaaaaataaagtagagtatttaatggtgacacaatattattcaatatatattttttttttggctaattagaatttttgtccataaattttgacatgtaccaaataatacccatgaacttttcaagctgttaaaaattcctcttaaactattgaaattgttagatttaagaaattctgtccatttttattcaattttgctattgtggcaattgtccatgtactaaattatgc

SEQ ID NO: 187950 - DNA, 2101 bp, Cannabis indica
agcttgtccttgaggtaatggaaggttgaatgatttagggacttagttaagatgtcggcaatttgctcttcggtgggaatgtatctgacctccacggttttgttcaggattttctcacgaatgaagtgaacgtcaatttcgatatgttttgttcttgagtggaaaacagggtttgaggcaagttgtcgggctcccgagttgtcgcaccagatgatggcagggctgttgtgtttgatgccaatttcggtgaataaagattgtaaccagatgacttcagtgcatgcttgagctagtgaacggtactcggcttcagtgcttgatcgagcgacagacttttgtttcaagagctccaactaattaagtttccaccaaagtatacacagcaccccgaagttgatttgcggtcatcaagagaacttgcccagtccgagtcacagtagctttctatggtaggattgacagccttggtgaattggatgccttcgcctattgttcctgctatgtagcgtaggatgcgtttacatgctagccaatgattttgagtaggagcttggaggaattgactcaatttgttgaccgggaaggcgatgtctggtctgcttagagtgaggtattggagagcgccaataacgctgcgatattgagtgatgtcttcaaatggtgggctgtctttgagatggagtttgttgctttggatcatcggtgtaggactcggtttggcatcaagcatgtgagttttttgtagtagatcaatagagtacttggtttgagacaagtgaagaccttcatgccccctagttgtctcaaagccaaggaaatatgttacggggccaagtttcttgagggcgaatttgttgctgagttgagatatgatattgagcactcgtcgagagttgttgcctgttaagagaatgtcgtcaacatagacgagaacatacattcgggcatccccttcagcaagataaaacagtgagttgtccgacacagagttttttaagccaagttggagaagagcattatgaagtgtgtcgaaccaggcgcgaggggcctgcttgaggccgtagatagcacggtttagtttgcaaactgcagttggatttgacgaatcaacataaccaaaaggttggttcatgtaaacatcttcatcgagcgttccattgaggaatgcgttgttgatgtctatttgttggacatcccaatcgtgagtgatagcaagagagagtattacccgaatagtggcaggtttgacaaccgggctataagtttcgaagaagtctatccctggttgttgttgaaagcctttggcgacgaggcgcgctttgtgtcgttggacagaaccatcggagttgaatttgatgcggaggagccatttgttgtcgacaacatgcatgtgaggttgtcttgggacaagatgccatgtgtgatttttaatgagagcatcatgttcggagtccatggcgtttttccacacaggaatggtgagggcaagggcagcagattcaggtatgtggagggagagggcagggagatggggattgtttaggatggaggagagaaatgtgcgtggcttgaagatgccagacttggagcgtgttaccattggatgggtgggtaatggtgcttgtgtaggtaacgggttgtgtatgggagagggaggtgtagggtctggggaagaatttggtggtgaaggtggtgcaatgggaaggtgtatagcaagaggtgtggttggagaggaacttacaggtgagtgactttgatgttgatgactgtgtggagtagaatccgtaggtgagtgtggagaaggagccacggggcttgaatagcaatcggatgtatcaacctcagcttgtggaacatcagtgggagttatgtgaggggtagacacaaatggtagccaatggtggtaattaatgacaggtgtgctgtgttcggcttgtgctgaggggggttggtgaagccagtagcaagggattccaattcattgaacgtgacacttgctgctatgtagatgcgaccactagaatgtagacatttataacctttgtggtttggactataggcctaggtaagacacgacttagatgatctgaaatcaagttgt

SEQ ID NO: 187951 - DNA, 1438 bp, Cannabis indica
caccaccaccagcatgtttaacaaactcagctggtgacaaaaagctcccatggcaaacacacacaattctcacttcttcacctttgctatatctatatagaaacccctctattcttttcccattgggtccaacccctgttgtagacacacaaggcatatcctccattacattcctccccatttctttacctccattattattactggtttgactacttggctttggccgagggattgccgccgcagccactaccggaggtggtttctgctccttctccgggaggggctgcacagcagtagcagcagcagagctcacaacttctgggcatttgttctttcctcctgtgttatataacttgttgttaatttattgaaaacatttatgaactaaatcaaaattaaagtttgttcattgtgatttgaagattggattaccttgaccagagagactagttgattcactaatccctgaagaaccactcccgtgagaaccacctgacccttgaaatgaaggttgaactggaagcttaggcccatccaagtctccattgacaacaacgccattgatgttatcaccactagttttgcctctaccaacccaagctggaatcgccatggatgatgataactcatcctcattcttcaagctctgttcttggttttgagttaccctatttacgccttttctatcttcctcactgccattctcctccgtcgttggtcggctccgatctctcgttgccttataaattctctgcttttcggaacgctttctttttgcttccatcctcctcaacatctgcaactccttcctcttacgccactcttcttctgtctccatcggaagagagcaagtcctcataagcggggccggacaaccctccggcggcgtcacttgccggtgcgtgccgtctactccggcaggctttggtgtgaaatccgatatagaagaggagcgtttgagtgagagcttgtttatggcttttgggtcaaccccaaatcgaccgtttaatgaaagcccaaggcttagctcaatctcgtctgaatccttatttgggtcttgggattcttccgaaaaatgattctttgaaacgagtctctgtaatagatctgtagaaaaattgctcattggaatggaaacgtactgttgttgctgacttgctatgttttgaccctcttctatttgcgccattgaaaagacactggagaactaaattcaaagaaacccggatatgagtttttcacgaggaagtgtagttggaaaaaattttcccgggaaaatgaaaagggaaaaaaatacaagtctcgggaatcagattattcagaacccaagaacaacagggcgaaaacaggaactcgcttgtcccaaatcgttcattgaaaaccaatctaattagcatcttttttacgccaaaggtaaagtaaaaaaaaaaaaaaa

SEQ ID NO: 187952 - DNA, 3397 bp, Cannabis indica
attttaatttggaaattttatgatttatcccaggctaaaatttgtaatagagacactgttaaaaacttgagctgttcttgcagcaacgaggagagctagctttcactgtttagagtgatagtcatttatacctaatagttaatatcatcccaatcttgttttatgtctaggggctaaaatcgtttcaggaacaaacaaatcacaatggtttttgacgtaggactataatattagattgaattttctacatgatacccttaacagggatttgaactatgcatactcactcactcaccaagattcactatggttgaaggtaagaattgtaaatattattaattattaattgtaattttgttcttaatacagtcttagaatatagtgtaaatatttggccatgctttcttcactctgaccctttgccttttttttcatacctgctaaacaaagaaatcgaatcttccttcacaacttcttagtaaggtctgttaactgttaattgtatcctatctgatttgatctgatttttattctttttagtatcatagtatgtttatgtggattaggactaaaataaattaatactttattggattttacagatttctttagtcattttcttgagattttcaattgaggtgaggttcaataaaaaataaattaaatatcctgaggtacctacagattccttagccctgaagtaactgagtatgaactcattattaattaacccctttctccaaagtaattaatgaacttaaaaaagccatgattggaactcctttctcttcttgctagattttcatgctcacaggctcacagctcttaagatatcacaagaaatatcattggctatgttatatagttggcctagtcagaagccagattagtttgaagtttgaactatgatattgttgaattaaaacgtcatctttttgctgtcaattttcacatggtttttttaattaatatcctatgaaagaacaggagccactaagtgacttacatttttttttgttcttgaatttgaagggtatctttcattgtgggtcagctttttcacaatcagggtgaccacattttggataattgtgtactattgatgggcttcatccaattggaggtgggccttcaatcttaactctttacaactctttctaccaattttttagacatgatctgagcacaccatttcactgtctatgatatttaattaatggattgatgctactctcatgtggcattttgcacaagtgtttgtgctgaaatggactaactaaatagggaaaatttgtttatccttgtggttgttatttgttaatcatatttttatcttttatgtgtgttagtgtcatgagaacttatcttcaaatctaacatcaaactttatgattaaatatataaacatttgcatgtgtcattatctttaatgggtttctattttacttaaaaattgcagtttaaagcatgtagaatgtcttaaaattgaatcttgtcattttccacagggtcaaccatgctattatcttctatataccccctctgaatctctgattgaatgcttgatcaggtgcatcaattccttttggttgaaaaacaagtcttcaaatggtatgcttttgcttatctagaatatgataaactcaatcattttgaatgagttggtctgtcttcatgaacaaggccaataaatcaagaaagaaagagatgggaagttcccatttgataatgtaaagccaaccacattattctttctcacttccttggctgaatgacttattttttttctttctttcaataagctgtctgtcggttgttatcacaccatgtgtctataatttagtgatataaatgtgcaagtttgactatatatcagttttatacaaactgtgtttttttgtgttcttatttattcatttatattttttttgaaagggtgctttttgtgtttatgtatatgctttatttatattttttaacattgtttaggataattcattgattgaaaatactagttttcaatcaaaggcaaactaataaaaataaaaagatcaaaggggatctctgtggtttggggacatgaatacaattataagtcctttaagggcctacaaggccattcatggaatatagattgaatagtttggtccccatagaccttgtgagataagatggtcctcctcctttattaccccaccttttacatcactgagcacaaaatgaaacacaattcatttctttagaatatctcatccccaagtgagaaaaaggaaaacatatcataaaacttgtacttgtgttttttagggtaaagttttccaacatgcactctagtaattttcgttttgattgtgatgatgaggtaatgaagtaataagacttttttggtgagaatagatttcaccatacaataaaacccttaaattatttgtttatgctatgttttggttttcaaattttaatgttcattgcaccttttccaccaaaagttatgttatagaacctgtttgtagaagccataaaacacctagagatataacatttggcaggaacacttgttgtccaaatgaaatagaattaattcccttcgtcattttattaatatttttatatatatttttaaggttagaaattttagtggatatacattgatacatgtatatctatatatggaccacctttcaaaataggagcactatactacatggtcctttatgtagctcttctataggctttgatagcatacgtttatttcactattgattatactcataagtgaaagataataaagttggacaaaatcatgtgcatccatctctcagtggacctacatcatgtaactaatgaaaatgaaagatatcaactattgttacctttccaaaaaaaaaaaaaaaaaaaaaaaaaaagaaaaaaatatcaacactatgtttttgttgggagattgaatacagaaaataatgtcatggtttattttagaatttaaaaacacttagcatatgggatttattaaaatacttaaattgattatttattttcttaaatgaaaattgtggctaaattttctttgtagtttcatctttacttttatagtagattttgttatagtttagtacttttataacactaggtaatatagtggctttttgtccggctattttaattttattttagtataataattaaaaaaaaattatttgtgaaaataataaataataacttaaaaattaatctataatataataatattaaaattatactgctgaattatttattaaaaataagaagtttgaaatttatatgaataatgtatatatagaattttatttttttttattaaaaaattattaatataaaataaaataagtaaggtagtatagtataaaattagagtattatt

SEQ ID NO: 187953 - DNA, 2213 bp, Cannabis indica
taatttgctttcatttctgatgggtatttatacgtaaattcgtgttttgttgtgatgtgtttgttttggttgaattttaggggttttcattcatgtagtatgaatctttttggtgatgtgttttcattaccacatttatatggctttcttgacagattttatacttgtatgttcttttctttatgtaaaaagttttgggtaatgagagtaaaagtgattatggcttactagatcaaagtttcagtgaaggtgatgtgtatttgttacttatgcaactttaattgttggggttcatcttccattgtcacttattgagtgagtgaatgcaatttctcactaaccttttcttatgtatctgccattgttttgttttttcagtctgcaaactacctgaacatcaagaatctgcttgacttgacatgccaaactgtggctgatatgatcaagggaaagaccccagaggagatcaggaagacattcaacatcaagaatgatttcactccagaggaagaggaagaggttcgcagggagaaccagtgggcttttgaatgacttttacatatatcaatagctattattttgaatggaacaatgtctgaaaatattttctagtggtggggggttcttagtttttaatttagtcttagttgggtagccttttgttctcactttaagtactactctcttcttctcttttaagtttctctctgttgttttgggccctccagttgtaaagaattgctgaatactggtattatggtggtggtttgtcatgcttatcaatttatgaatttatgttatgaaacctagttttttacatcggctgagttttcattcactttgaaatttatgttatgatcttgctgctcgttctttacatggggttcttgggtttttatgtctctaaacaaagatatacattagatttttaatcttgtaaatggcatcaagatcctgttgattcgattaggctagtccgataaaactgcacataatattctctataatggttattgcatcggttcgttcaaaactgaattggaatggcacaagttttcttgttttctttattatttaccaatgagataagcgggtgtgaataaataaaacgtctaacgtagctctaggctttcaattttgaaggaagaacttgtgtgcttgcaaaactggtcagagtaatattagctagtgtttaattatagtgtttccactctagagataaaccgggtgttcttaagtgactgtttgatattgaaatagttgtaataacaaatagtggtgcatgttgcatttttttttaaatagaaaagaaatttaatataatttataatatagaaagattcaaagtttcaattgtttatttctcactggtataaattaaaagacacatgcattaaaattatctggatattataaacaccaagagggtgcattgatacacgtacacccctttacatataattatacataaaatttccaaaagtcgttgatgtcaagtaataactatacatacattcctcaagccactagggttactttagtggtgagagaggaatgggataaaaggagaggtcatgtatttggaatcaatacctttaagctataaagttattaattgattttaaatacctacactaaaaaaaacctatacattccttaaaaataaaaataaaaaagtaataactatacataaattcttaatgctcatgtttgtcaaatggatattttgtgcaccagtggtgcttagcatcctcctatgtgtcaatattgctattagtccaattaagtatcgggtcccatataatttaatataatagcttttagagagtatcgctagccaatcgcaacgcgacatatcgagaaggtgctaggcaccactggtgcgtaatagcaatgctctttgtaattgcatctaattctcaagaccgactactcaatttcttcaaattatatgattatcgtgtaatcatttagttaaataaatacatcaaatttgataattacttcgaattacatttagtactaattaatgtgactttccaaacatattttttatcactaaataaaattacatattaaatagataaaaggacatggactaaagattgtgagggacgaagttattcgtcatttccaattttcttttctttgtcctgaagatggttttaggctctttgttttatttccaattattaggattgttagttcttcta

SEQ ID NO: 187954 - DNA, 2858 bp, Cannabis indica
aattaagggttgtttaaaaactttatataataatgtaagataaaaatatacatatattgataaaagcttactgtcaacaaaaaaaaaaaatatataaatgtatattttataatatctaattagcaggctattaattgtaggctagctttatactttttcttttttttttgaaagcactgccttggtagcttttacccatacacataactaaaaaaacgtagggattatggtgaagttaggtagagacagttgtggtatgcattcttcctttggtccgagataagtgccggtcgaaataacgatatcgctaaatccatacatattgctaaaatctataacaatatcccttgctccatctagctgtctctccctcttttatttatttttattgtacgtatttgtatataattaacatacctatcacacgcgttttggttttttcttctcaacagattatacatacatattcacacgcctacactactcattccatattgtagttctacatagactaggtttccagtgcgcatgactacatgcacccatcaattatgtctagatatatctatatttaacaatattctctaccaaaagataaatttcaacaaaaactacaagtaacaaattatgcaaaattttagttgtgctagaggttcaaaaaattatcaaaaacatcaatgagagtcgattcttccttctattgggctttttaattataggatttatagatataagtatataacatttggcacgtagtttaacattttggaaagggatcggaaatgaaagtgacttgacatcaaaagcaccattatatttaaattccaagaaattgaaaatctttctgtgccaaattaattaaaagttacgtacgttagtgctggggacatttcagtctcttgccactcgatcgagattaataacacgcatcacgtgactcacgtttaattaggcacaacatgccaacacaaacagatgtataaactaattaagtgctatataataatccttaatttaattttatttttgtggtttgcatgccattataattttagttgttgtaattatacttattattaattagtcaataatttatattgagagaggttcatagaaatttgtgacctccggccccgtgttaaaccccaccactaaaattgggtctgatgaccagactggctcatagaaatttctcatttaaacaaaggcaatgacttttattttcgtttaaaggagcgcgcgcgcggtagctttcttttataaggaagtgtctagtaatagacatgagttactgttatcataaatgaagacgaagcagcacgtccgtactatctgatttttccttttccttattaattcatcactacatatgtgtgtgaattttactaattatccaaatgggccccctatagctagtttctgattacacgaagttaaaaacaaattaaaaccaaaaccttatctttgaaaaattagatcgttataattcacacacagctctgattaaaaacaaactatagtcatgataatttgttagggaattagaataaatattatatatataaaaaaaaattaacataattttacagaaagttttattagcaaaaaagtcttgcatagtcgtagaaacgaccatatgcgaccataaaggattataaatttatattatgcgtgatcactatagtcacatataataaattaagtgaagtcatttcataaattttcttaagttattatattttttaataagcgcgcgccaatagctacctacctatatttccttatatattgttttatccaatagttgattcacaccgatatggtccaatacatgtatacgtgtatatacatataaacacacatagatccaaaggttgtggaatatccgtacagaaactgtggtagatcgatccgatgagaggtacaaattaatttatgtaataagctaactgcggctgtacgtacataaattttgtttcatcctttttgatcaatcaataatgtacactaaaattagtgagcatgtgaagaatattactgaaaagaaccaagcaatactacgacgctctcgctaggtgctctcacaacgacaagtaaattataatataaaagtaaatgcatggaagcagtactatcatatacataatttatatatattatgaaccattactaatatttcatgaagccacatttattttttgatgtatatatgcatgtgttctagaaaaagatcctaaacacactataaaataataaatgtatatatcccaatttgaatatattacaaaaaattgccagcgcatgcgcggtagaaaaaggttaaaattttatcaatgaataaatggaattttttcaaacgcaactgatcacatttgtattggcaaaacaaatatttacaagctagttatttatatatacaagaaatttgtgattaatggtatgtatacattatacgtagttatttaaattaatacagttaactaaattaattgtttaatattttggtataattaacttatgattattcttgaaattatatgctagttgcagtaggaatcaagatctctctaaactaatttaagttttacactttaattaattgattttttatttattaaaaaattaaatatttaattgagtcaacaaaaataattaatatatttaatataaattaaattaattaacttgtcaaaattaaattaatttaatatatactatattacactactttttaacatgggatcttaatctctaagagattttagttagtaattattaattgcatataattgaccctagctttatatgtgacacgctgcaccacgtgtacatatatacatagctttggttcctatata

SEQ ID NO: 187955 - DNA, 5927 bp, Cannabis indica
ccaaggaagtccaatgttgagatctaattctcttggcttccatgctgatactcgccaacaagaacatatgcttagcttctcttcaaacaaatcacaagtttcttttctcaataaagatgctgcattagtggaaagaacctctcagaactctgcttttcctttctaccaaagaccccccacttcttactctaggaatacaggtactgtgtgctttcatttatgtgttttttcttattatatattttcttttaaggtaaagaaatgttggtacgggtcgtcgtcagaattaatatctagattttggtaggaaggggatgtgggggattgagaggattaagctgaggctgaatcacattttataaagattaatgggtttgctttaattgccatctgggttatctcaatgttgtggtaagagtagttgttaaggagttagcaaaaaagagagtagctgttgaggactagcagatgtttcagatcttgagttttgacaagtaaaaaagaaaaagaaaagctgaacctcttttctcatatgaatctggtgtttagtatttggtaaatttatcacttcaagatagatacaaagttaaaaaactgtgaaaagggtgtgaaaataaatgggaatggcagagaagagttgttcagtttctgggtgtttcttcactttatttattcccctgcagaaatgattgtagatttttttttctggtttcaggttatggttctggaagcttgaatgcaggcatgcatgcgacttttactgggatcagagcaccatttactccatcccagtggatagagctagagcaccaagccttgatctacaagtacatcacttcaaatgtggctgtaccatccaatttacttatgcccctcaagaaatccctcaatccatatggcttggcgggttcctctgccgtttccttgcctcataattcatgtaagcattgttccaatcttaaatctttaagaattaaaaaaaaaagaagggtaaatccctgccttcttgacatagtactgtacatttaattcgggacagttggtatatgtgatgtccttttttctttctttgaatttttaattttttctcagtatgccttatcttgtgtaaggtatccctttattgctgttataagttccatagcatctgcaataatcttaaagtctctttgtttgtctttccaataataaagcctttcattttcacaactaaaaagcaaatattaaatttgaaatttgtctgatatgatttgtttatggtgttccttttctcttttttcccatttttgaatttcttatgcagtagggtggggatctttccatctgggttttgctgacaataccgaccccgagccggggaggtgtcgccggacagatgggaagaaatggcgttgctccagagatgctgttgccgatcagaagtactgtgaaaggcacattaacaggggccgccatcgttcaagaaagcctgtggaaggccagactggccaagctgcctctgggaccactaactcaaaggtggcgcagatagcgacccccgtgtcgacatctgtgatgcctggtggaggaggcagtgcgtccaacaacctcgccataacacagcaccagttcaagggcttgcagtctggtgctgctgttgctacaaatccttctacagatactcttgtgaacaggtgaaatatttaaggtttctgggttagatctaatttaatctatttttgttttttattaagcacttgtgaacgttacttaagataacaatggtgtcaaaaacggtttgtacctattgtttttactttccttttactttatggtgtcctgtagaccccatcatttcgtcttttactttggtgaaagtgactagtcttaacagctggacttgggattcctttctctaagaggctgttatccattttcatgagaagttggatatagtctttgtaggcgtcttaattaatgtcttttggtttgaattatatggcaattattgagactggaaatctaaatttaattcttgttgatcctggtgattgttttaagtttcaatgatatgtttctgtttttcaagctttgcaataggcattttctaagttaaaggggaatatgtctctcgcagaatgcaagaccttagaggggcccagtccgtgatgtcttcttcaaatgttaatcagaaatcaaatcaaaccacttttaacgttccaaaacaagtcccagctggaggatcctctcagtcagagtttgggcttgtttctactgattctctccttaatccctctcaagaaaatgcttacataaactccaaaaactatgcctctttccttgatttcagtggccaagaggctcaagatcagcatcatcctcttcgtcatttcattgacgactggcccaaggaccaatccaatcgatctgtcatcacatggccggaagaaatgaagtctgactggacccaactctcgatgtcgatccctgtgacatcttctgagttctcatcatccacaaactcacctaccagacaagaaaaactggctctttcgccactgaggctatctcgtgagttcgaaccaatgcagatgaatcttggggtgaacaatgaccactttagtgaagcaactcataaacaaactaattgggttcctaaatcttggggtagctcaatggggggtcctcttggagaggtcttgaccaacacagctggaagtgttaaggcatgtaaaaacccttcttcccttaatctcttgacagaagggtgggatgggagtcctcaattgggttcttccccaactggtgtactacaaaagtcaactttctgttctctctcaaatagcagctcaggaagcagtcctagagctgacaataaaaggaacattgatggggctagtgtatttgatgacgttcttggttcaacactggctagttcttctgttccatctctgtaatcttgtttgtactaatccaggcaaaagagttttgacttgctctaaagacaactcaacaagcttggacttaacattctgttctcattttaattattcccttttatgtttttcttttaatcattgctttcttcatggatttcttaaacaatgacatggctgatcctcatttgaacgggtactagccagtttgactaatgtcatctatgcaaacaatgtatttttttctttcattttttttttcagttttatgagcataatgtaatctaggctgtcataatctgtcgaattataaaatatctcatctgggttttcttggcttctttctgaactgttttatcactattaccactgaatgattttcttgaaagtagattcttaacagaaacttggtaaaaaaaaaataaaattacacagtactataagcacgagctatgtaaactacaagaatgatgagattatgcttcaggttatctcctcaaacagtaaggacaaagcacaaagcaagtcaatgatatagtagggaaactttaatgatcatgaccctatataggctataatattaatatacatagtatacaaacataaatatctatatttatatataaaattggagattgattattgagataagaccactgtgaagggccatcctcacactgcagatccttatcaaaacaccctttcaattggtctacaaaccagaggacatatcagtatggatgatttgatcacattatggtaataatcccttttataaattttgtattttgttttttattacatatatagcattttatattcaattattggtatgtagatacataagaaagtagtgtagtgcaaggatttttgggagttccccggattgagacaggaggcacccttgtggggtggctacccggcaggcaaccgcattgagttaatgggaatgggccagccaaggtgcgtgaccgtgagagtgagactggaccaaccattggacgtgactcgagccacctttactcctctctttttttctttctctgacttgttctgatagagcctttttcttttaaagctcctccgaccccgccaccccaaacaatgttaaatgttgtgctgagtttggggcccactcacaaatcggataaattagagtactattgcttctactactatatctcactctattcatgtgtttggatattttgattttgtactattactactattattactaataatgatgccaacaatatatactatattgattgtatttcagctgtggttttagttgggaaatattccagttatatatataaaaaattacaacgttttaatttataaaggaacttaacttactttctatatctagaaggtacattttcacctactgatgatattgtaatgtaatgaatcattgtttagtttttgtttttaggttagaggtattaatttgtgtaaatgcttatcctctccttgttctatcttattaagtaataccaaacaatctaacattcacacaacataagacaacaaacctttattaattcaataaatggggtaaaattatgcattttccctttaaatttttaagttaaaacccaagggcaaaaccacataaactttacatgggccataacccccctttataatatatatacaccattattttaaatatatacatatgcatatacatttgttgctacacaaaaattgaattctttctttttcttttccctaaaatttttaccactatgaaatcttatgaattggtccaatggggattagaattttcttttagtctagttctagtgatgtagggccatttggttttggtctaaaaaatttcatttatgttaattttttttttttttttttttttatttttttttttttattaaaaaaagattatctttctcataaaataaagaataaaaaatttattactatgatgagaaaattctatggtaggatcatcattatttttatctttattaggctttcggtatatagagaatcccaattataattcaaatttttataaaacaatgtatattataattacagtatttatcttgacagttcttaaaaaatttaaaagctttcgatgttgaaaataacatttaaataatcaatgcttataatttttttattattatttacaaaatatttatatcaagaacaaaattgatttccctattataatgttatcctatataattaagaaaatcttcacacttcggctctcctaaaattaggagctggttaaaaccccataaaatgagcctattttcacaaaattcaaacacatacacacacaactaatgtgctttgtactgagaacttggagtgtgtaatctgaagtattaagctagtggattggattagagatttggagtagtctgaatcaagtaacttattaacttgttcttgtgtgtttgagatttattgttgactttaagattccactagacttctgaatagttacactatccctatgttttatagctacatgtatttatgttattatgaaaggaatatattcaaaatttattcctttacctttatttatttatttatttatttatttttggactcaaataatgaacacttagtaggggttggtctaagtctgttcagactgtctcctatatgcaatcaacaaactttctacattttacagtttgctcatttattaagggaagcccacacctcccaccaacatatctaactcaacccaactaaccctaataatcaaatatctcattcatttcctcttacttttaactttttaattttgatccaaaaataaaactaaaaaaaattacaaatgaactcaaaccccatatgtgcaaatcactagaaaattattactcattttataggctcagtcattaaatagcacagtacgcatacatttaggggtgttacataaaatagccgaatccaatccaatccgcacgactccaatccaatcccaatctaatactataaattgcggatattcgc

SEQ ID NO: 187956 - DNA, 2882 bp, Cannabis indica
catgcagatagtttgatattgagttggttcagattattacattgctgagaaatcttggacttcgagaagattccacaaagcactggctttatgaattaggggttttcagtttgtgctaaaatttgatgctaaccacagtgctatagttgctacatttgtgggaggatgggttattattttgcaaggaatttgatcaaatatgtgttcttcatcttgtgtggagagtccatgcactcctttcttaacaaactctatcatctgtagaattagggtaatagtgctattaattttcagtgctttgaacattttgcatttatttccaagtggtagaaatgaaaaattgagggagcatttttggtttgaaataggtttaagtagactatattaggattttataagttttccaagttattgacagtattttattcctcatcttctcagctcatatgggcagaatttggcgacaagtacatttataggagagacgttatttgccattctcattgccattttgggtcttgtattgttttcccatttgatcgggaatatgcaggtagtgggaaaagctttgctattgattctttccattcaatttctcttttatttaataaagtttttatgttattatattttcatatgtttcttgttcactgatcctataattctcttggatgactgtatttggaccttttcaatttctcaattcgtcagtaaattgtatctagaagtttaagtactctggttgaaactgtttgcactaagattttctctagctcaaactgggttggacggctttgtatgtttctgctaaacatttattatcaaggaacattttgaaaatatttttgtactactgcattttgtatgtgtgggagtatttagtacgttgtttgtttgtcaccgttggtggacgaaatgataatctttactatttcaagtgtactatctgctctctaataatgttgggctatgaaatctattacttttgtgactattttagacgaactgtagggatgggagtaacttacagtttttgccagtttgtttgttctctcatgataatatattcttgctagtttgatattgaacagtctgagttgtttcttaatgcagacctatctgcaatcgatcactgtgaggctcgaggagtggaggcttaaacgaagagacactgaggaatggatgaggcatcgtcaactccccgaagatttaagacggcgtgttaggcgttttgttcaatacaagtggcttgcaactcgtggggttgatgaagaatccatccttcgcggattacctgctgatcttagtcgggatattcaacgtcatctgtgcttagatttagttcgacgggtaagatatttcctgatattcaatgtgacattgtttactaccaaatattctcatcactactatgattcatttgctgttaactacatttttttatcattctacaggtacctttcttttcacagatggatgatcaattgctcgatgcaatctgtgaacgactagtatcctccctaagcactgctggaacctacattgttcgtgagggtgaccctgttaccgagatgcttttcatcattagaggtacactggatagttctactaccaatggaggtcgaaccggtttcttcaattcaatcacattgagaccaggggatttttgtggagaggaattactgtcatgggctttgcttcctaaatctaccttaaacttgccttcttcaactagaacagtcaaagcactgaatgaagttgaagcttttgcattacgagctgaagatctcaaattcgttgccaaccaatttaggcgcctacatagcaagaagcttcagcacaccttccgattttactcccaccattggagaacatgggctgcttgctttatccaggctgcttggcgtcggtacaagaaaaggaagcttacaaaggatctaagcatgaaggaatcatttgctagggaagagcaagtaacctatgagagtgaacaagaagaagaagaacgagaaggagaagaagaagaaggagaggaagaatattctagacgtgcaaatacttcaaagacgaaaatgaatcttggtgttacgatattggcctcaaggtttgctgctaacaccagaagaggagctcaaaaggtaaaggatgagatgccaaagttacgaaaacctgaagaaccagacttttcgactgaacctgatgacgagtagttgtctgaagtgggctacatactatatatttgctaagaaacacattgcgtgacacgccagagctcgttcatggctgtctggtgtgcacaagtctcaacgaaatgactcacaatcggattggcgaacaaaacaaacgagatcattataggaatgtgtaattggattaggttgtcttgtttgatacatcttattttccttttttttttccacagttgactgaatagggcatggctaatggggtttagaattcatcaatttggatattgagcttcagagaaaagctaacttggggatggtgggttttctcttgaacagatggagactaattctttaatattgtctcttatcttaatttgtaaatgtcaagtatatgagagagtgtaccttataccatatcaaatgtagatcaaacattattattgactgacttgtgtccctcttatttggtatgaggtttaaactttgatggcaatgagaatgtcaaacttaaattaaattttaaagaagaaagagtttgtattttcaagtgagtctcacttcttaaattaaaatagtggtaatttcttctaacacttggtttcatctttttttcaagtttattctctctaacttaatcttacataacaaacatcccattaagcggcattttgttggaatgaatgaaaatataat

SEQ ID NO: 187957 - DNA, 2157 bp, Cannabis indica
tatttagagtcattttgagtagctttagtacattttgatggagacggtcaaagccggagagctcgatcggtttcacaagtcataactttttggtaaattttgacgttttttcagttagaattagacttggatcgttaaaaataaaagttgtagactttattcacagctttccaaaagtgttggaccattcaattttgaattatttcgacacgaacaccctatttattaccaagcaaggatattatgtcatttcgtataacaacagttttaaactttactttcttttagaagactatattttgtccgttgactactcatttttatttaaaaatagaaaattataatcattatcttaatttactaataatatctagtaccctttatctctcttaatctcatgcaaaaatatgagattttgccgattaaaaataaagaaaaactccaaccttacgtgcgaatcaatgtattaaaaagaaaaaaacagagcaccaaaataaggctctcctaaaatctctctctcccacaaaattcacaaccttatttcctttcaattccaactctttttacttcattttctctaactaattatttcttacgtttctctttttcattttcaacacaaattctttttccaaacagtataaggctacctagctagtaattagacctcctttgaggaaattattacgaccaagctaggaggtgtaggcctcaaactccccacaattcgatcttgaacccctcttcccatagccatggtgtttcctcctcttctcctaatcctccttctctccattattaatcctttcgtctacgtcgaatcgaaactctctcttggctattacaacaaaacatgtcctgattttgagaagatcataagggagacagtcacagcaaaacagatatcaaatcccaccacggcggcaggcactcttcgcctcttcttccatgattgcatggtggagggttgcgacgcctctgtgttaatctcttcaaatcatgccaaggacaccgaacgtgatgccgaccttaacctctccctctccggtgatgcgtttgatgttattgttcgtgctaagacagctcttgagctttcttgccccggcattgtctcttgttctgacatcctcgctcaaaccactcgggacctcatcatcatggttggtggcccattttataaggtatatactatcacacaagctagccattttggtgcataatagtaatttttatttttaacaatgattatatctttacacgtatgtaggttcgacttggacgcaaagatggcatggtgtccaaagcttctcttgtagaaggaaacattccaagggtcaatgacaccgtggaccagatgatcaaactctttgaaagcaatggctttactgtccaagaaatggtggcgttaactggtgcccacaccatcggattctctcattgcaaagagttcgccgaccggttattccatttcagcaaaaccaacagtactgacccagatatccaccccttgtttgcagctgcattgaagattacctgtgaaaactacacaagagatcatggcatgtcagcctttaatgatgttatgacaccaggaaagtttgataacatgtactacaagaacttgaagaaaggtttgggacttttgtcttcagacaacgctatgctcaaggaccctagaacaaaaccaattgttgaattgtatgcaacagatcagaagcgattcttcgatgcattttctcacgccatggagaaattagctgtccataaagtcaagactggacgaaagggagaggtcaggagaaagtgtgatgcttttaactaaatctcaaaacctttagaaagaaaatgaccttgtattcatatattgagaagaaagaaaatgagtagttattgatattagaaagaaatggaggtctggtctggtgtgagtgattttatgcatgagtggattccaaattttaattttctctgtgcttatataatatataaattcgtgtatagatatgttttataccataaacatttgatgacttgagatatttattgtgaattctaaaagaaattttcaaccttttctctttcatctttaagagcaaaaactatctttctccattcatgtttgataaaggtagatctatatatcatcttaatttgcaa

SEQ ID NO: 187958 - DNA, 3987 bp, Cannabis indica
aaaaaaattattaactaatttttagactaggaatataatgataataattctagtaccaaaaaaaattattaacaatatatatatatagataaatataaaatttattattcggttatatgcaattaaaagaaataaaatatttagttagctatacattttaaattttattactaaaaacttaaattattttaaaaaaaaattacaaaaccgcgaattgcctagtattcgtataactgacgtttattttccctttttgaaaatgaatagatttttggctcaatttgaatacgatatgtgttacattataatgatttttgcttttttttatattgagttttgtatataattaatgagcaaggatttctaatttcatagtgttttaatgtaggctaattaatgcatttaatgagaacaatatatatttttgaaagttgtatgctaattgtatgcaattatattttttttttggcatatactagtaaattactagtatactaataaaagtttcctttttttatttcgtgtctaggttacttaatttggacctgcatctaattttctttctccatcctaaagaaaaaaatttatgtcgttttggtaataatatggccgtctggaaacccgttctcccacccaatttgagagtgagcgtacgaaattttgacttattaatattacacagcatatttaagataaattgaattaaatacaataaattatgcaatgacaaatggaaattgggtggagtagggtaatatagagatgaaatacaggtgttgagtcaaaattatgcttaaaataactttgcatttaggctctatagagttggatgaacaccctccatatatagcttgctttaaccctatatatgctattacattatttatatgcaacaaactacaaagttgtaattaatcttctctctcctccattccataattacggaactcccaattttatttatatatatagatcagttgattgatccatcttgattctcgatctccaatcattcctacccaataaacctcctcaaatgtccactcaattatctccctcatttttctccacgaactctaaggaaaactctctcatttccttgcaccaaaacaataatggtctcattctctctccttaaccattttcttcttcccctcattctggttcctaaaagctttacccacccgtggggtcccttcaatacaccttgggggacccttcgttaatgggattttctgaactcaaaaactaaattgcttgtaaactaattaataaattaatatattttctgtgtcttaaaagagaaagaaaaaataaaaggggtcgtagaaatgagttgttttccgtgtttcacatcccagaggagtaagaaatcgaattctagaaatgagaatggtgaatcacgtgaagttagaggtgaaaaatcacctggtaagctctctcctaattaaattgtattaattaattaacaacgcacgcaatctttgcatgcatgcatatggtagataatactggcctggacttaattaatattttgcttgtatatatgcttaattgtttttttgttaataacagagaacaagaaagaagaagaagataaatatatcaatgcaaagaattttacattccgtgagttggcaactgcgacaaagaactttcggcaagaatgtcttttaggcgaaggagggtttggaagagtttataagggcacaattcaagctaccggacaggttttaataattcaactttttataaagttaataaattgcaaaaaaaatttatattatataaaaaaaaaaggtcattttgcaatataaaattaacgaattacattttgtataggttgtggctgttaagcaactcgataggaatggagtacaagggaacaaggattttctatcagaagtttcaactctaagtctcatacatcatccaaatttagtcaatcttattgggtattgtgctgatggagatcaaagacttttggtgtatgaatacgtctctgggagatgtttaaacaatcatcttcttggtacccttcttttgctatagaatcagtattttaatttcttctctttgtgtgtacatacatatgattagtttatttgaattagtattgacctcagcttctgtggttttggcagatagggaaccaaatcagaaagtattagattggtttacaaggattaaaattggttatggaatagcaacagggttggagtacttgcatgagaaagctaatcctccagttatataccgtgatttaaaatccgcaaatgtgttgttagatgatgacttgaaccccaagctttctgattttggattggccaatcttggaggtggtggtgatacgcatatatcatctagggttatgggtacatatggctactctgccccagagtatactagaggtggtcagctcacactgcactctgatatatacagttttggagttgtttttcttgagctcattactggaagaagagctattgatactacaagaccaaacgatgagcaaaatctagtttcatgggtaactataccatttcatattctctctgttcactattctaaatttacagtgtttgacaaaaccatatcttttaaagtcacttttgcacattctttgcaaaatagcttccaaacacacttgacaccttatattgaaggtcattttgcgaaatgtcaaaaaagaaaggaaaagaaaattttgttttcacatattatttatcatgttttataggtatacaaattttatgtcattcatgtgtgtttttgagcaggcgcaacccttcttccgcgatcctaagaagttcccagcaatggcagatccacttcttgatgggaaattcccagaaaggacttgaatcaagctgttgcagtagctgcaatgtgcctgcaagaggaaccatcagctcgtcctctcattagtgatgttgtaacaactctaagtttcctttctacaacacctgttgagtgtagccctgctcttattcctactcctcctgaagaagcttacgaaattttagacactgaaacgagttcaaagcctcaggtaacatgtaatgaaaagggtcacgagactaataattcagattatcgtgagaatggtgatcagagttcagaaagtgaagacaatgacagctcagaatatgaggatgagtgtggagatcatggcaaagaaactgttaaacaagttgaacaattctctcagtcatacagatcacctcacacaagaagtgcttcatcaagctcaaaaagcagctctggatcaaatgagggaagtgtttgttcaagttacaaaagcagcaaaagatcatcatcaagtcgcagcagaagcagcagcagcagcggatccaatcgcgtttcttcttctgcttcaagcagtagaaaatcaagtgaagaaagtatttcttttgacctaaaagaaaacatggaatccttaacgagaagcaacacaaagggatcaaggaatggaagttttactgctgatcagagtgaacacttctcgttttaggcgcaatgacagcattgacagtgtgggatcacatggtagaagtgagtgtctagagcaatgctacagcataggatcatcacaagatggaataatttcttcacactcataacaaacaaaatattatatatctccatgaagtcatcatagttggacttggtattttctactaagcccatgtcagatcttttaccttcactaaaagaaaatcaacacacattctttatttaagaaaaacaattaaaaatggttggttggtacgtacctctttgagctactttggtcgagggagaaggcttcatgatgaggttctcttctagtattcattttgatgttttttgaatccatggatttttgtatgttcttttattgaaagaaagagaaaaattataagcttagaaagcagaacttatatatttttttaattccttgtaatcataagagtttgtatgactactaccctaagaactatg

SEQ ID NO: 187959 - DNA, 2773 bp, Cannabis indica
aaaaatattaaacaaagtctagtgtcttgagatttaaaagaaaacaccctagacactttacattgtttaatatttcttcatttatttataattattttagtcatagtttcaagaaatagaaaggtgtaacaaattcattaaaactttaataatacttgtaatactaaaaaaaaacacgttgaccctgttacattttatttatggtatttttttcattattattatgaagtttcattgttgccaacaaaaaataaaaaaggaaatatttgaccaatttaagtgggggttaattttagcaaattttgtaaattcaaaatttgagtcacttaagattttagtgatttttttatttatttataggaaagggaaagttatcatatcaaggattaaactagagacacgtttagatgggaagtctcctacggacataactaaaaggaattactacagacagaatgaatctccataaaactctaaaaaagaaccagccttaacatctatcattttgtaaccatcgacttatcttgagtttttttttggcaaccatagacataacttattccattgcatgtatttagatttctatttttcttactagttgttaatatatctttgcttttgtgtttgtcttttttaataatgttccagtgcaaagagaggagtacatcgcccaatcatgaatcttcatgaaagaagccttagtgttttagcatgccgctatgtggatgaggtgataattggtgctccatgggaagtgtctagagacatggtgagagttgtttgttattagtattcatatttttttattcttatattctcttgtgtatttgatctcattcttttgtctgtagtgctccttttctccaaaggacattgttatctcttgattcattattttcccccactgttttactgtctggttaatgcctaaatgaaagttgaggttttcactattataaagcttttatgagaagttttccctcaaaaaaaaaaaaaagcttttatgagaagtttatgagcattagagagtattatattactaaattatgtgtattaattgtgtgattctgtgaaatttttgcaagtgcagatcaccacctttaacatttcactagttgtgcatggaacggttgctgagaatgatgattttcagaaggtaaactagaacatcttgctgctctgcttatatgaaatgtcaagatgcgctatgttctgatatttaatttatttattttcagtgacaaatattttctggtttatttcattttacaggaaagtggtaatccatacgatgtaccgatcagtatgggtatctttaaagttctggacagccctttggatataaccacaaccacaataattaagaggattgtggccaatcacgaggcataccaggtctgtcttcacaaaattatctaatatgttctttacgctcaatcataaactatagtggaaacacaatcagaaatttgtttatgataaaacacaagagaatgcactgttagttcatatctgatttaatatgccaaattaactatcatgatgttggcaaccgttttacaacagtaactttgagttgtgctttttcttgtagcatactatgttgtcttattaattagtatcattttggtgtctcttaagcagaaacgcaacgaaaagaaggcagcaagtgagaaacggtattacgagggtaagtcattcgttaccggtgattgatccgtgtcagaatcagatcttctgagacatttctgtagctgcctttggttgcaaagtttctgtatcagttacctaagtggctgtttttctttttcctttttgttagtttcatctttatttattagtatttgattgctaacttagtcctgttatcatctattatcgtttgcgtgttttagatcattgttgagaattgaatgcataacggtaaattttaggatatatagatgtccaagagaaatgtggttcataccattttagagttgtaaaaggggcatgtgccaatttttgacgatgacacaaatatagtgattcttgttttccaactcatacgaaggtaatttatgtaccaatgaaatttcttagtctcccctaaagatgtacttagcatcattcattattttttttggaagctgaattcccttggcatcattcatttagattatcattatcattcaatgactcggtcgagtggggctttgaaaagagtgccgtatgcctaaattttcagatctgcactatatctttaaacggtagatagtgtataatatatacggaagttgataatatgatttttttttcacatgccacttctgcatcattaacaatatctggacttttcccttttgtatcttgtggataatactaatagcatgtcaagaacatgtcttggtaagtaaatttgggttacatttacaagagtattatactggagttattcacaagatacattttaatttggttaaaattgatgataccctaatgagtaggtgtaatttaaatgtcttctagcacacttgagaatcgttataaaagcgttagcaaaaaagagaatcgttataaaaatatttcacagacagcaaatattttcacacaaaaacagtaaaataacagcaacaattcacagatcaagcatcaaagcaacattcgaaacttaatataacaacaacaaacaagataaaaaaaaaattaattacccattgatgctttgtatataagagcttgtactgttgaagattgtagttgtagtgttatagtttagtgtagcaactagtag

SEQ ID NO: 187960 - DNA, 1779 bp, Cannabis indica
agatcaagtctcaacccatgagaagtaagaaggagaaagtaggttttaataggcttgagcgctattccaagagtctctccaatccaactagctccagaaagtacacacgcgattccaggactattacttttacacctttggtttcctattgaagagggtttccaccctcagtttagacttcaatatagcaagtaagtgttacttcattgcttgaactttagaatttcattttcctcctacttgctgtactctaatatatcttttatatctattagattgtcttcctcaatcgcccttgacaccagagttggaagacagagataaccttctacaattttttgtccaaggaattacaagtggaaaaacttgtaaccacaaaaaacctttgagaactaggcctcatcacttcccactaggacgtggaacatctttccatgaaggaaaacatccaggagtctctttgaggggatccaaaagaggttcaagaggctaaatcataaatgcagaggaggccctaaaagcagtaaaggccgatgagcaatagctagcggattggagtagataattaccaaaaaacttgagtgaggctgatgagctcactatctgattctaggaagtagctcaaaatgtgggtgctctaggagcgagcactttcagtattggtgagactccctttcatataattaggactcccaccttagctaatttagaaagtattaatcgaggaggatttgatccatacttcttgagtttagaccagagtaggtattcgcagagtaggtacatagataaggtagattacatcataaggagtcccaaccattttgttctgccagcgcaccatcatgttagagtggacgtgcttagtaagatttactttccaagattcttcgagcatgagaataaattagatcgagaagacattgctcttttttctagggggaagtcaattatgctaaaataaacagtttggctccttctaatttattatttgatagcttgttaccataatcacattcagacatgattttggctaatatattgattgtttattctttgcagactagccaggtacattacagatgggtctactcaataagttcttaggcaaaattcactccagatctgagaatgtccgtgagattgctagggaaggcaaggacaaaggtaggaaaggccaagcttctcggagtggatcttaaaaggaaacacttttggcttcaaaccgagaggctgctcctaaggctctaaacacgaaagacatctcttcttccattattgatctgaatgagcctgttgtgaacatggaacccttgcagtaggttcctatagcgaacaccgaaggggacaactctgattacgataggccagtgtgattcccaaaaaatggcaaggctctttagatggcagaccaacaagaaggtaagggtagaaaccaaggagaagctcttatagttgatagattcgaggaggtaggccgtggaagtcgggccccagaaggggtctgatgcctctgttagtggaaagccgcccaaaaggaggaccagaactaccaaggacaatgagaatccacctccatcacccctagtgcctaagataattcctgctactgccacccaattatccagggaaaatatagctatgcccccattgcctcctccccacttcacccttcctatcaggtcagctttagtgattgaggaggacaaggcacatttaaaggctatggattagtttttctaaaaggcgcatagtagcaaacatgatgagatgagaaag

SEQ ID NO: 187961 - DNA, 2084 bp, Cannabis indica
ctggtcagcaacactaccactggtggagcaccgagtttgccaactacgacaagtgggacgagccttttcctaaccttatcaatagggctgagatgacagaaaagctttgccctcaagttggaacagacgtggctcaattcttggctgacttgctagatcagagcgcaaccacaatttgcaaacttggggctaacaggtttgccatgatgatgggtggggatcctgtcaacatggaagagattatgaggaccaaagccaatgttgtaagttgaattcattttgacttctttaaggtaagaaataatcctcttttagttttctaactcttttgtaatttcctttctacaagtgagcttcatggctgaaagaaactactctatgcccacaaagttggcctatgaatttgagttgctgaaggtagagtgttccaatgctgagtagaggagagaggaggctgctaaagctttagctgaggccaatgctaaaatggaggccatcattaagcaagggtgaatgactccttggactattctataacccatgaacggagggccacaaagactgagacagagcacagagatagatataaagatcaatatcccaacgcccttactcagatcaaggacctagaagcgaacttgaagcaagcaaagctggatctccaacaatctgagaaaaaactcatcaccttatatctagaataagaaaagaaaatggggatcataaatgaccaaattgtcaatgaggcgactcttgagaggaatgtgaagcatcatatggagctgcaacaacaagcagaggaagatgagaagaaagtcatccaaaggggtaaaaacatcgcaactaaattgagttcttctaaaaaagctcagaaagagtcctagaagaagattatcgagctagaagaggaaacttcagggctaaaggagtatcttcaacaggaaattcaagagaagtaggattaggaggctaaaataatagaagccttggaatagggctttgtgtactttatatacactatctggcagcaccacaagtccgtgatggatctcttagatgctgaagataggtatttttttattccccaaatccttgcattggtagaagcagataaggctaaggaagtagctcaaactatagaagtggtcgatcctagaactaccctcctaaagggtgagaacttatatgacacgactcgtccagcttccgttgtttcttctgtgactagttatgcaatctcggaggtctatcttgatgttcaaactgatggtactcaggtaccataggacttaacccagaagtagccgtatctatccaaccttgtcttacttgaatacttttatactttttgtgttatttgggtgataaatgtccccctttttacatgtgcagagataatattttataccctcttaccgtggggtttttaagtatgtagtaatacttgattgactctttggatattttcattttaatatatagagtttgcaaggttttaatgtttccagccttgtgaggttatagttccaaaggcctgaacctttagatttttaattaaatacttagacttaaatacttttctttttaacaagttgtatgtatgccttagaatatgcttccaatggcctgaaccttggtaccttaataacttgtcttgaagaaaaatatttgtaagtgatatttacttaaagattttgaaacttaaataactaattaacctgagttaattatttattttaaaattagacatttcttggtaaatattacttatttttaggacttctttaaactttaatatttaattaacctgaattaattactctatttaagatacataaatgctttggattaagttaacttgagctaaccatgaactctgaacttctatcttaagttatcctcagttaactgcgtagtatattagattaatttcaagtataataaggtaatgacttacttccaattccccgaggttctggttttaagtgatatttcctacacttatacttaattaaatgcaaaattatttttaaaataattagcatttttacccctgaactagcactacctgattttgtccccta

SEQ ID NO: 187962 - DNA, 2445 bp, Cannabis indica
cataagtgacaggtggcttatcaggagggagggagggagggatttttcttatttctgctaacttggtttttatttagacaaaagtaaagacccttgtgcgtgcaatttaagttgatagctcaatattgtttcattgcatattcttgatcagaatgtagctagttttgtgatagtttgtctgccatctatactgatattagattagttacagtagtgaaaaaataacttgattttactggtgtgaatttacattcaacttctgtaatgtgtctttgatttaatgttattggttatgcagttttaacgagtcatttgaagatgttgtctatccaaaaggggactcagatgctgtttccattagtaagagagatgtcgatttattacagccggatacatacgttaatgatacgatcattgacttctacatccagtaagtcaatgcatgtgtttagttgtcttctttatattttatggtgttaaccactttggggtagaaaacaattgtctccatatttttcatccccatattaggctgcatacagattagatttcttgtttattgtgttcattcgatatgaacatcaagtacttgaagagtcagattacattaaaaactgtatttatcaccaggtacttaaagagtcagattcaacatggggaaagacatagattccacttcttcaacagttttttcttccgaaagttagctgacctggacaaagatccttcaagtgcttctgatggcaaggctgcttttcaacgagttcgcaaatggacaaggagagttcatttatttgaaaaggattttgtttttatccctgtaaacttcaggtaagactgtttgaataaagcttccttcttgtagtagccagtaggctctaaacatgggtgctgatttattctgtgtatacattgcaatgtcagtctacattggagtctcatagtcatatgtcatcctggtgaagtggctaaatctaagggtgagttttagttggactatgatattgcattttcttcatatgaagtggctaaatttatggtgaattatagttggattgttaaattacatttccttattttcctattcatgtctttgttttatttcagatgaaaacttagacaagtcattgaaagtaccttgtatactgcatatggattcaattaaaggaaatcatgctggcctcaaaaatcttattcaaaggtatcgtaaaattctgaatttcatggtattctttatttttaggtgcatagatctgtgttaatgaaaattagtaagaaagatatttttattttgtattataaatttttttagttttcattattgttttaagagcaatatccgactctttaaaatcacacttcggtaccttttatttttcttttgctctttattagttgtatattgataacaacaacattaaaactttaattattttttttgtgcatttatgatgaattgtttatttgaaatggattttattttttattttcaaatttcctgtatcttaaggcctcgtatttaaccttgaattctagctatttgtgggaagagtggaaagagaggcaaaaggaaacgtccgatgaagtttcatcaaggttcctcaatctgcggtttgtctcactagaggtatcaattcccctccctcttgtctaacattttaacatgtatacaagtggaaggtagagattcacctaatagcgtgttcttttagaatgattttgtttgtaatgttcaagttttagtattgaaggctctctgttagaatccttttgttggttttgtttcagatattaaggagtactaaaggtttttttgttcacttttttgaaaaaagggtttttgtttgctctacgtcattgcatgagcttgactttgtaacatataatgtctttcaaattttctgttcacgcaccatatgtgaataattgtgaatttggcatgaaatagacagtcaatggatcaatcatatttacaggcatttggcaaattgttatccctaatgcattcttcttgtgaagagtgaactattatctactttgttcactagatctggttagtatcagtggaaatcctaaagatcagccctttaatcttagacagtgcaaatatgtcactgtttctagtctaacttaaaatagggagttattgaagtcattctgttttagtaacctggatattgattgtaaaatttacaatcaatgcccattttagtcaaacgaattgacttcatttctagtttggatattgattgtatcgattgaaaatgttttgatgttgactcttgtgtactccagttgccgcaacaggaaaattcattcgattgtggcctgtttttgctccactatttagagctttttttagcagaagttccagataatttcagtccatttaaaataacaaaggcctccaactttgtaagtaatatttgctctctctctctctct

SEQ ID NO: 187963 - DNA, 3788 bp, Cannabis indica
gttttcatcattttcccttcaaattacttcatctcattgtttataacggacccttaatatttattttctataaatatattaattaatttttgttgaattgtttaatataaaaaaataaaaatctattttgtgttctcatttttttaaaacacaattttgaaaacaaaagcaatgccaaataggctcttagtatttagtggttcacaaaatgaaaaaaaaaagtgcagtatgttcaaagttcagcagtaccttcatccaggatgagcacactcctttgtgaattctgccagtgggacttggaccataaaccaaagcacatgtaacatggacacgatgaggggaaaacctgcatcacaaaggcgattaatttttagacgtttacatttcttgaaaaattattttggaatgcaaaggaagcaaagttgtcaccgtggtgaagaagaaattgagtagtaacgaggttgtaagcgaggggcaactgcagcaaaaaatacaccaagtggaggctttgctgatgggaattcagccattacctcaagaagagttctctgacttccaacaacccattttgagtactcgtcctggacattagaagcaagagccgatataaacaagacaagtaaaaggaaaaacagttcagaggaaacaagaagaaaatctgagacagggctgcatgtacaaccttcccctgaggtgacgatagaaacttcagcttttctgcttcacttggttcagttgcgtgtgaagccaaagcaattaaggccgcctgttggagaaagtaataatgaagtgataaatattctttaaagataataatcataacagaaaggaaccacataaaaggaaactgcttaaacatacttttcgtggtggggttaacaaatcagcatatcgagccagtgcactgcgaagtgtgcaaggtccaggaaatggaggaggtaaagagctttcaaggggagaaccatcctcattgtctgtgtggacagagaacagcaaatctagaggttgacctagcaagtttccagcttcttcacctatttcatcaaggttctctgcataaacacccacatggtctccagtttcatacctgaggacatggaagggagttaatcatcatctaatcacaaaataactaatacagaataagaaaaacttatagcaatttgatttactttttacgggatgtaagttaaaattgttttgtattcacaacaaagctcaaataaaaccttcacttctagaactatcttttacaaagtccaagctaaatgacaagccattcaatatggcaaaataaagactaacatattagtcgataagacattataatgaattagatttttccaattacattaactcctttcacatttctccccgtatgtgagcagcagttacatagtgcataaatggaacagggaaatgtccaaaaatacaaagctcaactcaagtaaaaccttcacttctagagctatcttttacaatgtccaagctaaatgacaagccattcaatatggcaaaataaagacttaacatattagtcgataagacattataatgaattacgttttgccaattacattaaactcctttcacatttctccccatatatgtgagtggtagtagttacatagtgcgtaaatggaaaagggaaatgtccgaatggaagaagtaacgtagcatttaaattgatgcatgaagagatattaaaattgaattatgcaaatcagcaaaacttaaagattgctgaccatcggctaaagaagtattcaaacaaacaccctttatacaaaatacttcttctataacgtaaaagggggcttgtataaatgcacttactgtattaaaaatgcaatagacccttttgaagtaacctgatatgttgacattaaaggtattttggtacattgttctaggtggttagcggtgtatgggtatatataaagtgggagggacagtaagttcattgaatacctgccattatggggagttagcagtatatcgaataccggccattttcttactgtatattcttgccatttctttaataaaactcgatgaggtttcatcatcttctttatctttcttgctggtttgttcttatattttctgtataagtttagtgatttctattaatatcttttaacagaagcattgaatatagatatgaacttacgttataccagttccaaatatatcaaactccagatgtatgcaggatctatcagactcaggcttgtgaagctccttttgtgaagcaacattaactctgcagaaaaaaatattgcgcttgaaacttagtgatggaaatattcatacaataaaaaggtaatatactagtaataaagaaaatatgtttgaaaagaaccaaaaaagttcacgtcactccttacatgcacggatgatgaatgtcaaaagtagcattcccatttgccgtattcaagtagttatcctcaaaagaggtaacattaggatcatgaatcacaaccctgtattcaggaactgtagctgtatatggtgtagatacagtagctgtatcatcttcgtctcgaagtaatagatccaattcaggccacaacgattctttcctacataatagcgaacattcaaatcatgatgccaaaactcaatcttcctagctagtacatctaaggaaaaacagaagaagctatcatcataggaataacgcacataccaagcagaaaaatcaatcctcaatacattgatcatcatcaccaaggccggcaggaatgagacgctttgctcctgcataaaaccagatagcaatttttgataaatattaaatactagcaaattcagttgttactaagaaaataaataactatgaacaactcagcttataatcatatacagttgatgacaataaacaaactaagagatgccaaaaaggttcactataaagttgtcaatgtcattccatcaacttcagtgcaacagaaagtatgtcagaggaaagcttggacatgctgatatgcataccacacagaatttagtaaatgcttattattcattgtcttatccttcagacataaatatactaacttgatacgaaagtgacaattgctattataaacacaacaaatcaaaacgaagacttaccaacctaatcccattattcagttaaaatatggttccttaactaatttagataacttgtaaaacagtaagcacaaatttttaattaataagattttaaacttgcagcataatttatgggcaacatttagggaatcagcaataatgcaaaaaatagacgtgtaccaaactagacataaagctaaaaaaaaatcaaatgttcgatagatttcgacaaacttataaaattggccaacaggtgaagaaatccaatatagaaaactttcatcaatgaaaactgaaaaaatttaacaacataatatataattcacctaaaaaattattttaaaaaaaaattaaccttgttcactgagtttttcatcaatcacaatcccaatctgttgcaaaatgggtcccataagatcacaatttcttattcttttctttttagaaaagagaaaagcaatatcaaattatattgacatattttaccttattgaaatgttcatattgccgattacccaaaccaaaaacaccatatctgagatgttgaagccaagcacccctgtctgttccctagacaagaaagcaaaatataaaaatatagcttagaatgcaaaagcaaccctgcctttttcctgaactgaaatatatcaaacacatacgcacaccacacccagagagagagagagaga

SEQ ID NO: 187964 - DNA, 1205 bp, Cannabis indica
gcaacagtgtttcccaatatatactaacaaatgtgtaatacactaaataatattgtaaaaattggacaaaattatagctcaagatggcttagttattattgaagatggatctgcatcaagttcataatttttactatttgacacaattgacacatttttttttttttttaaaaaaataaaataaatgtagtactccaaagcctatatatataataaatattcaaatatagtactccatatttatatatagcaaaaattataaaatgacagttaaatattaagattccattcattttatacacaagaggtaactaatcaatctaaatatatagctatctagattattaattaataataggtttcgttatatatgttagaacaagataaggtttggttcttaaatccgaggtagtttaatttacagtgtactatacgtacgtacactactaataatcaaaatataattatatatgacagttaattgtaaggattccatcctcacactattatagtattaatattacaaagttatttatattatatttaaatatatatatttatataactactggactactggttagatgtgatctacaaatttattatatatatatatgaaatttatagtaaaatataataagtacaaagcgtgttatgtagttttcagggttgcatcattgatgatcaccactacagcttataatacagttttaaatattattgtaatttattagccaaaggtatattgttctttatctttatctttcatttttttttcttaacttttgttttgtataatagaaaaggttttgaaggtatgtatgattatccattaattgtttataagttcatgatcattaatgtgaagccatcaagattccatagatgcatgtcaaaagggaacctctatgtacttataatattattggagagccagttgttcttataagatattccctttatttgtttttagatatatatatatatatatttaattagaggtaattgacaaaatattcattaataataaaaaaaaaaaaaataattcataattaataataaagaattggattaaagtttttttttcctaaatatatatactgggtactgcctataaataagtactattataaaatttaaatttttatgtcttaattttattatttaataaaaataaaaaactatcacttttacattttataagt

SEQ ID NO: 187965 - DNA, 1441 bp, Cannabis indica
tggacaatctgaaactgtttaagaaatttcaggtcaagagagcaagtcagtagaattattatagaaggatgatatggggattttactcattttcttcttttaatatacgatttatcttttaatttgagttatttataattttgttttctcattgcaatttgagattttatgtcttcactaaaagcgtctctatctctaatcgagtgctataaaaatgttgcacatgcatttttcgtcacatctttataaaattgaattttaatggtgccccttaaattttgtgttaaatttgacaaaaaaaaaattatgctatatttagtttttttttttaaaaaaattattaattattgtcttttaaaattatctgcttagtatcaagtttcttagagggaagtgagctccagctttgacatggctccaactctacgcgccaaagtcgtcgatgcttgaacttgcaattttgtcgcagttttgtccttcaaatatagtctattctataacatacaagggatgctgtgaaggccacttctcatagctaactaggacctgatagttttggaatttattgtcaatatggtccatctcccaatgcaatggattctcctcttctagcactggatcttccacgttctggacttgttctgtgtcctcatcgtctaatatatgctccgtaagaaaatcctcctcggtcatcgtggaagctacaaaataaggaagccaagtagttagtacccacactaagacaaatagcaagggtacgggagagtcctccccgataactgctcagagatgtccccgttggatccaacatttgggagcaaattccttaaagaacaatgctccgcgaagatagatcgagaacgcgatcatgaaatgagaaaaggactaaaccatgtcgtccaataccataaggatcctagattggagaaaccattcataacaacgtttgtcaagattttgcaggaatatacataattgacattaatgcaactacagggttcacaaagcatcaaatttcataaagcatgacaacatttctaagtttgattctcactatcgattcctaatgtctttgacgagcaataatctaaagattaccctaacagcgaaacatgcaacaaattatcactgaaaaactcgtcaaaaaccccaaaatacatagtagagtaacctatagttctacttagaaactacctaccccaaaaaatgagtgcgctaagagtacaaggtgaagtacttacttgttaaagttgaaactaggggttttgaaatttaaggcgttaaaaagaatcgtgcctaaaaacctctgagacgatttatcagctcgtcaatgctcccctagaaatctgacgacaacagcacaacaggtaaaacaatctctaagaatgggggttgcgcttggaaaaagatttgatttaagtcagaggagacattcattggg

SEQ ID NO: 187966 - DNA, 1264 bp, Cannabis indica
tcatgtgtgtaacactactgtttgaactatgttttcagcgtagtttaatttttttaaatttctcaaaatttttgcaagatgttttaaataattataacgtgcatgaccataaaaaaaatttaactaaaaaattaattttaaataccaaaacaaatagaaatacatcggcagatccctcttacaggatggattgtaaaattttcttaaatccttactctcatcctattgtattagtaggcataattatttcaactaatattagtagttaacaataatttctcaagaaaaaaaatctaaattaacttttatatggtttttttttaaaccaacaagtgtaatatggggtgtgtttgtgtttgtatgacctggcttttacataacatgattgttgtatgttcccggcaaacaccattaacgcttatggtcccactgattttttcaaaatatatattttttttgtcaggcttttttaatttaaatataattatattattttttttgttaatttgctgtcccaaccttgtttcagaaagtcatataaaatgaaccatttttccccacatattaaatgcacaattaattgattccttatccttaatgtttttatattaaaatatataaatcctttttccaaaaagaaggggggaaggttaattattctgaaggaagaaaaaaattaaaagaaaatgtaaatgtaagaaattaaaggaggaagttgtttcataaatgggaaatattaaatccatgacaaagacgcaaagccaagagttatagttttttatcccataaaaaaattgacatttttttcccttgagaaaatttaatacaatataaagtacatacatgctgattaaaattctatctgtgttatgataaatgcttttaatttcatctctacaaattaatgttacttatgttagtttggtccattatcacagacaaaaaaaaaaaaaaactaggcagtcaaattaggttatattattgtagaatgaaccattaaatttaactgctagatttattttcattccaaatattgttgtttaattagtttaacatggacaaattaagataacttgtgatataagtgattgaaggctatgcataataactcataacgttgattataattttggtttggaacaattctattttggtctgatgatcagaatagatgagaggcaagagcaagacctcgtgaacaagaaaaagaccaaaaaccagaaagttttcattattttggccaagaaaacaataccaaattaac

SEQ ID NO: 187967 - DNA, 1912 bp, Cannabis indica
ataaataactagtagtaaggaatactcaagtccctcactcaattcatttcttattttaggcttatagccttaataaacctaacaaaatgaccaagtagacaattgcaaattattttcctaaactcgtactttatctattctatctctacaccaatctactctgtcaacagaacaaaatcttcaaagaagactgaatgctactccaagcaatctttagcacgtccacaaactttataaccacttagacaacctcttaccatcaagcaaatacattaatgtgttgatttactaggccttatagttttagctaaacaaaagctccataaacattctcctccaaaacatatcttttaaatccaacaaaagaaattctatatctttgggttattgtgatctttgttccatgacccaaattgaacgaggaaatcagttctaaatcttaaatggtaatttatccaattcatggcttgtttacagctaacagtttccaatcacctgtttaattctttctcccagaatatctcaactcaacacaggaaaacagttgacttaaaagcctttagaattgtcatttctcattggcagtgtcagcttaatccatggagtaaaattcaacataactccaaatctcaagccacaaataatgtaaaacccatattaatccaagtaaagaattgcagcgaaacagataaaacaaaagatttaagaggcaaaacgaaaaacttaattttggtcaacgaaacgatcacccggcatataaatcaacaatacaaattcacaatctaaagtcacacataaacaaaacccaaatgcaaaagaccaatttgaacgtcagaaaaatagagagagaacaagttgtatatacctccacagcagcagcaaccgcaggttaaagaaagcagaaccattttacaaatatgaataaaccgactttgactttgaccctccgaattttgacagttatcggccatttttccattaacggaagctccggcttcagcatccaacaggttctgttgtagggcagcggaagctctcttttcagctctcatttgactggttttcctgtcgagatttctgacataagggaacttgaatgagtccctcagctttgttgaaggccatagatgcatctccgctttagctgagtttgaatttcaagatggcactcgaggaaaaaggcagtagaaacgtttactataaatcaaaaattacttacaaaaataaattgttatagaaaaagaaaaccaattcagttcaatttctattgaggagaccttcggtcgaaactacctgttgatagcggtaagtacgtgcgtgtgggaccggtgtacaggggtgtttcaattgggaggagcattactattggacatcttcgtgttcgcagtttgagtagtgcgggttgtaatttttttttcaaacctaatagtatatgcggtttttataatttctcaaagcgtgaaattttaaaattgtaaaaactgcaccgcaaaaatacagtatgatttaaataatttacactattattattatcaaattataatgaaaatttaaaaattaatctactaaaattttaataaacaaaaaaataatttattaaaattttaatatcttaatatatattaatcattaagttattatattgatttatttttaaaaataatatatattatatatatatatttatttttctaaatgaaaaagaataaaaatctgtacaaatttgtaactttataatatataatatggtacggtttgaaccgcaattattaaattcgaaattgcaaataacactataccgggtaaatcacagccgcactgcaaaagatttcaaacagcatttttatatgatgtgatgcggtgcgcgggcaatttgtacagtgtaggcggttggatgagcagtcgtgggaga

SEQ ID NO: 187968 - DNA, 2232 bp, Cannabis indica
aaaaaaaaattattgctcgtagatctctcattggtgccccgtgaactagtggtcctcatactccgaaaaagaaatggtggtactagccatcatattcgatactccttctcccgaaatgataataaagatatgctatctatggtatggtagctacgctgttgtcaagtttttttatagaaaattagaaaggctgttgtcaagttggaatctaaatatattgatagtttccatcgtgtcataataatgtgtatcaaatataacatactgcttttgatacaaattaaagtaatagtaaggaaaacgaaataacacattttattgcactcgattattattagtaattcttgcacattgcaactacatctggtgtgaagagaatcaccattcaccaacattacagaatacagattatataggctttttattttttatttgtggcatattatataggattttttgtttaaggtaaatagggaattggtacaagactaagaggaactttcttgtaaacagtgagaccataacattcactcatgtccaggctagaatcatcttcattgggaaacttccaatcaaaccaatgtaaaagatttgcactgagatattcaacagtggaaagcccaaaagccaagccagggcaaccccttctcccaaaaccaaatggaatgaaatgggagtcctgtcctaatttgaaatcaatatactgatcattctcaaacctctcaggtatgaactcctctgacctatcccatgactttgggtccctatgaattgcccatgcattgatgaaaacttgtgttttagctggaatatgataccctccaagctctactttctctgtcgtttctcgagctagtaaaagaggagcaggtggatgtaacctcataacttctttaatcacacatttcaagtaaaccatattgttaacatcatttgcatcgatcttaggcttatctcccactatttttctcacctcttcttgagctttcttcatcactttctgatgtctcattagttcagtcattaaccactctaatgttgttgatgaagtttctgttccagctaagaacatatcttgtacgattgcttttatgtcgttttgagtgagttcaaactcaagtttatgatctttttgaactctcagaagaatatcaacaaagttatcttttatcacaccaatattatcaccacttctcaagctcatcatggccttgtgttcttcaaccacttgattcgaaaacgtgtcaagagctttcgatgtggatttcaagctagacgtgaaccctctaatggagtctatccatgccaaacatggaaagaaatcaccaaaactgaacgacattaattgaaccaacaaccttctcgataactcgccgaacagattccctttaccaccttcttcaccaccattgctactactaaagctctttccattaacacatctacaaatgatatcagttgaggtttccattagcatttcactcaggtttaaaggagcattagtcttaccacaaatttgccttattctatcgaccattaaggctgttgcttcttcccttacaaacttgaattgttcaactcttttaaggctcaaaagctcaacaacacaaatctttctaacctgacgccaatactcgccatagggagaaaaggccacgtccttgttgtcatagagcaagatcttgccagctgtggttataggccggttggagaaaaccacgtcatgtttcttgatgatttctctaacaatttcaccacatgacaccaccagagttggaacttgtcccaagcgtaagagcattaagggaccatacttgttggaaagctctcttagtgacctgtgtgggtgtgtgcctagctgatgaaggtttccaattattggtaacctcggcggtgatggtgggtagctgagcttctcatctgatttttggggcttaatatacagatagataatgaagaagaggaagaaataaaggtgacgatatgtaaattaggatgtaaatgtagttggtttagaagttgaaacagagtcatttccatcttggtcttggtagctgagaaagatatagaattgatgagcatataaatactaatatacattttttgtatcaacttagttatataatataagatgttcatgacaattgacaaagagttaacttgatgaaataaaacaaaaaaattaagcggtgcatataggtcatctttacgtgcataaatcgatccaatcca

SEQ ID NO: 187969 - DNA, 1581 bp, Cannabis indica
atatagatataggtgtacgattatatatatgacattgtttgtcaccaaatcatatatggttggtgttttagtaaacacaggaacatcttgaatgaatgaaaatggtttaactaacaaccagtcttagtaggtgtataccgaacggttgtatcacgtgctcaccaataggggaccagtagccacttctaacccaatgaccggggcgggggccgtttatttattgagatttttttaataatatttttaaaaaaattacttttgattttttttaacattattttatatgaaattcaataattattttattatgtttttcatatttatgtaaaagttatatataattatttttattttttattaataaaatttatataattttttttgacttaatatttaaaatatatattttatgtgtatattttttaagaatataggaagaaaaaattaagaaaaattaatataaaataaatatatgattctttagctataataaaatttataaaataaggtgcttttataaagttttagagcgtaatttttctattataaataattagaaaatattttacaagaataaccttaagcatttaattaggaaacttgacatactgcagatcaactttcattagtagaaacacgaattggaaacaaatgcaaacacagaaacaattcaaccaaaatccccaaacaattgaaccaaaactagaatcgagttaataaccttgctataaaacccaagccattttctataagctaccactgcatcactcgaaaactccatttgaacaaaagccaaacctaatactgagactaatagtattgtcgaaccatctgaatcttccaatctgcaaaatagcaactgtagccacattacacaattgaatgattatcgtaaacacaaacaacaaacaacaaactcgatcatcattgatatataggattgaagctctcgagggtggaaatgaagacaacttgcaaaagaaaataaaaaatagagttgtgttttaccaaatatgtaaactcaactaaaaacgaactccaatataaaaatcaatgaaatcaatattttaattttctatcaattgtccaaaataatcacactacaaaaattatttaaaaatcgacatttttaactcttgttttttcttgaaaatagagcatgtaaatacacgaataaagctttttaatttttgttacactaatagtttaaaaatatattttctttacgatttgatttagtagaagctttaagttcttatatgtttatcattcacttttacatcaacaattgttaacaaacttcttgttgatgtcacctaaataactaacttgtctgttatattgtgttagttatagttggttgttttctgctttctaattcttgtttgtatgagactggattaatataaataaagctaaggcctacttagttgagttaaggctccttttactattctctgttttttcttttctttactctttaacactttcatcttctacatggtatcattgtcccctgctaagcgtccatggagtcttccacctccaatccctcacactactgctcctgctgcccctctg

SEQ ID NO: 187970 - DNA, 4952 bp, Cannabis indica
tctttggttgtttttcacgactgtttcttttttaaaacgttaccctaattgaaaagagtatatgttagggctttaatggagatgaggctgtttatttgggaattgtttttgcccgttgcctgtgtttttcttcttcgttaatttatttgaaagcttacttgagcttcagagttcaaattgtgctttactttcctgtcttcttttttgttttggttcactgtttttcatgttagggtcccgaagtttttcctattgtttataattcttaattgtttttcttaaacattgttatgctaattaaactttgtttttttttcttaaacaagaaagtacagcattttcttgagtttatgatcgttatttgaaatacacgaatttcccctttttgtttcccctttcaaatgacgtattggttttcttaatagaagaaacagagtaacattttccctgcttgtatattcttttctgttcttctttctatctattttggtcgctgctggtttttactctcactttgtaataatttagactttactatagccaggattaatcccagtctgctagtttagcatgctaagtcttactatataaactcatctatcctatttattcttcatatcgtgttcacatttagctcataataatcaggttatggtgtctgatttcatcaagcttatcttcttgaaggcacatgagccttaaaactaaaacattctaaaggaaatgacagatgggatgtcagtcatatggtttctgatgagatccgaggtttatggtccatattttcttggatggctggtcactggatcatttgggcttttagtcatcgtctttgcatttcttaaatggcagagaagagcgtctcttaattgggttaaagctgctgcaagagctaagaagcaagtttggaagaagcttaaagttcctttttcacatcatgtatggattgaagattatacatacgatgagcagccatccacatgctgtgtttgcttgtcttcccttgtgtccccacaaaacctaggtacaaaagccctatcaatcactcctgtccatcgttgctctgtttgtggtgtggctgcccatttctattgttctccgtcggcagtgaaggactgtaagtgtgtggcacaagctggttttagtcatgttcaacatcaatggtcggaaagatgggttaatgtggatgataatcctgaaatgtctgctttctgttttcactgtgatgaaccatgtggtgtaccttttcttgatgcttctccaacctggcattgtttatggtgtcaacgtctcatacatgtgaaatgttacactaaaatgtcaaaagaatccggtaacgtctgtgatttggggcctcttagaaggataattctttcccctctctgtgtgaaagaaattgatagctacagtaaaagtggtttgccaagctctgccagtgaggattctctagcctcttctctatatggtcagtttagaagaaggcaacaccgtgctaaacatgtaggcggtcactcagttaataatgttaagctacaggatgcctttactaatggtacagctctggaatatttgatcaatgggattggtggtctaaagaagtcacgtagtgagaaaaatattaacagcacaaagaaggatgggaagatacacaataccaagggtattcgtaacggattaacgatgaaaaagaattatggatttactagccagataaagaagtatacactggttgatttacctcaggatgctagacctcttttggtttttattaattccaggagtggtggtcaacatgggtcttctctaaggaggagactgaatgtattgttgaatcctgtgcaggtaattatgatattttcttattattttgatgctttataaattataatactgcaatattgttggaaatgagcaaatagtagatcatgtatgtattgtttgatgtatcatagttgttaggttgtacatttaacaaataaagaagcaaatagcatattctttttctagaagtagtctgataagataagattgcagcaagattgaatatttatttgttgtagggctgttcactcaaatgcaaatctctgtgctatgcataattattgtaattcaatattttcttagtaagtgacgtacaacttaattaaaaagtttttagaagtattactttgtatacactattggtaaagtttttttttattaatatacttgttttatctatttcaggtttttgaactgagttcttctcatggacctgagattggtttggagttgtttaggaatgtacagtattttagagttctagtctgcggtggagatggcactgttgcatgggtccttgatgcaattgaaaagcacaattttgagtcacctccacctgtttctattcttccacttggaacaggaaatgatttgtctagagttctgcattggggagggggattttctatgattgatgcacatggtggcttatccatgcttttgcacgacatctgcaatgcagctgttacaatgctagatcgctggaaagtaaatattagggaagaaagtacagatggtgaaccaaataaagtgcagtccaagttcatgatgaactatttaggtatttgtttgaatgttttttctttgttgattgtttctgcaacctgcttgacctattggttttttttttcaaggtattggttgtgatgcaaaggttgcatatgaatttcatatgactcgggaaataaatcctgagaagttttgtagccaggtagctatattttccataccatgtttgcctttgtcacatgattattggttttgttttccagttaattttttttctcatctcttgttatcattgttcattctgcactatccagttctgatttacttcacttcagttggtcttgagaattctcaacaaaaaaaatataacatataattggtttgttttatgaaaataaataaatcatagaattgctgtcaattggtagatctacatactggatatgtttttcttacaatgagttatgactttggatcttccctggactttacaaagtaggtggcagaacagctgataaataagcttgttgaatttgtgtcaataccattaccaagcaattcattagaaggatattgaatttgtaatgaggagaatatctgatactgatagtgataacgaatctagatttatagtcatgttggcttatattttctttttttcaacagtttgtaaataaattaagatatgcgaaagaaggtgcaagggatataatggacagaacttgtgctgacttaccatggcaagtttggcttgaagttgatgggaaagacattgatattccaaaggttcacattaagcttaaaatacttttttcagttgatagttgcttgtaaaatgctgatgtttcttttctatttctctcacctaggattcagagggtttaattgtgctcaatattggcagctacatgggcggcgtagatctttggcagaatgactttgagcacgatgatgattttagtcttcagtccatgcatgataaagtgcttgaggttgtatgtgtttgtggtgcatggcacctcggcaaacttcaggtatatgaattatgtacatacatacatatatatatatatatatatttatattagcatgtttactttctcaatttacatgcatctctcttatgtaattgcttggcttgtaatttttttcattgggtcttatctaaaaattatgggtaattatattttatgtagcaatatttgtattcagcattttatatttacaccaatgtagaaatatttatatttatgtgacctttaactgacgtaaaattattgtaaatagtcgtaggttaacttaaatttaaggaactaggaatgggattaagattatctatccttgttttatgtttattactaacttgggactaaagtgaattatttaaactgaagtaattattctatttgtgtggtataatttatcccaactaaaactgattgtttaattattacaaagtaatggatcccacttactaccaatgtaactctaattgcaaattaactctacccatatatattttaattgaaattcatgcaaatgtaaactaaaatattagtatttgaataatgtaatgttttaaactaaactcaactcaaaataaccctttatccttaattgaatgcaaattctatccaatcatgcatacgaatgacagtaaggccctagaggtgtactgttttctgatttgtgtaaatgaaaatgtttcttgtaaaattcttatcttgttttgttactagttcgccgtacatgtttttttaaccacaaacccttatcctccaagattaataaaactatagttttactaactaactcggtaacctttattattatttattatttttgcctgcttatgattagaacgtagctgtattgttgtttgcttttcagatttaaattgttaaaaagaagtcatgtgcttctgatttcctcaagcctttagtttataagaaaagttttcttttatgctaactagtttggatgaaaagttgaaaagaagctaaatcaattgcttggatgtacatgtcttctattagaaattataatttgaatgatgaaattattttttgcactatgtgctctctacaagataaatatgctataaaatttgttagcttatgcttctattattttacaggttggtctttcacacgctagaaggctagcccaagggaaagtcataagaattcatgcttccagtccgttcccagttcaaatagatggtgaaccatttatacaacaacctggatgtctagaaataacacatcatgggcaggtaaatcttttttctttgttggacatagtaatttgttaataaatgaacctttctttttgtgtatgcgatatgttctaaggttggtttttttcttttcttttttttttttttttttttttttttttta

SEQ ID NO: 187971 - DNA, 7353 bp, Cannabis indica
attttacttaagtattaacaattattaataaaatttacatatatcatttaaaatagagtgaaataaaatgtaatccaataacttatttattctttttaaataaaaggtagtaccaaaaaatttcatgtttgttatcaactcaaaatatatactgtggatgcatttctgctaattgataaatttgcgtcatggtgttagacatgctaaattattatatccaaagcttatcaagtctgacatttcaagttccattgaaatttcatgctggaaagagttcttgtccaaaactcgacctatacagacaattgcctaacatcatctcaaaaggaatcggaaaagaaaaaaagaagtggtgagagctaaatagtcctctattaggtccgtgaagaacaatggcttttgccctgaaataaatatccataactgcagtgatatttgttgccgttaaactcaaattgctgggttaagagctcgctctatctcttccagtgatctgccttttgtttcaacaacattaccagatatgtacaagacagcgagaagacagacagcagagaagcccaaatacactgagcttataccgaacttgtttacaacactcaagaaatagagaccgatcacgaagttcgatatctgatcaaatacaaaaacaatcaaattttcagaaaccaggaaggggaaacaaattaaaatacaaagaggagtacaggcttgaaaactagcaaaataacatgaataataaaaagaaatgcaagaaaaattccatcacatcatttgatttataggaaatatagggtcgagtactgccactacacaaggccattgttttggtacgaaactgaagcagtatgggtggtcttaaaactatgtattaagagaaataatgatagagtatagcttgttttcatttttcatttttctatttcaggaaagcagtctctgaaaattcatcaaaggcagagcacacaagatcaaagaaattggattatttatggtttgaaaacactgataatatagaaaacagaggaagaagttaaatataaagtagcaaaccaatgaggtttgtttatggtcactcacccaatgcattcctaatgacaaagcaactgcttttgctctgattcttgaagcaaatatctctggaagaagaagagcaggcacaggaccagcaccaagtgaaaacgacaagacatatctgttaatgaaacaaaaggccaagtttaagaattctcggtgataaaatagtcactatgtgaagggactcactcagtccaagtactactcttactatatcatatttgtttttggagaaaacgaaaaagagaaaaagaacacacacaaaacttttcgaatgctgccatgagaagtaagaacttacagaaccgtcccaataacagcaagggggccagaatatggtgccagaaccttccatgtaaaggacagagaaagcagcatcatggaagcagcctaaacaagtcagcaagagcgtcatttgttatatgataaaaccataaattgaaagactcgaaaacagaacatctcacacgctaagcaaggcctaagagatgtcacaataatttctttctttatttatttttttgcaagagctgtcacactaatttgacaatatttcatataactggaaaggcaagtgaaaatagtaccatccatatattgtctaattcaaacactgccttattggccaggtacaagctaagctcttgattattatataaattcatgagcagtcgattagtaatcaaatataattttcttttctttatattctacagggtaggcagtgtccaagttttcaaggttacatggttagactactgtgagtatactagtctaatattattcttcattggttaatttcatagacttcctcattctaaacaagaaactagtctaatttctgttttcgtaagaaactaacctagtaacaacttaaaaattgccacaattaaattcttaacagaaaaacaagcaaaacaaacaactaatacaacagagctataataaaccattaatataataggaagcttatcactatgttctatgactatagcaaaatacaagacagcataatcttttttattgatgaaatgaatatctatatctatatagttatagcaaagtacaaagatcgatatctatagacaaataaaagttcatgtggaaaaacacagtaccattccaccaaagcttgtgattagaagactttttcttccttgtctatccatcaaggatgatgccacagctgtgcctgaaaagggatcagttggacgcactttatggcatgatacaaagagaaaccaaaatttaaaacactcagaatgagaaaacactgaaaccaaccaaagacatttgcagctccaacaagagcacttgctgcaacatcagaggcaattcccgcactgcggaatacagaagtcgaatagtatacaacggcattgatcccagccaactgttgaaacaagaaaagtgctgcaccaacgctaacaactgcaacaagaaatatttgtcaaggaaaaagaaagaaaacaacagcattgattgtcagtgtagtttctcttcagcccctatgtgcaatcatattttggaagcaaagcgcaagatgaatatcaatttatgttataatggtttattttgttgaaagttattcttctttacctttactcatggtcttactaccttttcttccaacaaacctaatttaacaatcaagcattatgttgagattttacatttcctaaagtatcaaaatttttaacaagaactacaaatttttcaaaagcgacaaaaaaatattatttgcaatgcaacaatatccaacaaacacagaaaaaggtggcaattttaatggattttgaatgcttgtataatatgtgccccatcaatctataggaattactctaattttagtcttcaagaattatgaactcaacgaatcttattacaatctaaagcgcatattcatctcatcacaatattggacaaaagaattcgatcaacttatgtttatacctttccaatagcgggtactaaatagatcaaaccagcctgcgtcaggttcagtagagccttggcttccagctgataaatctccaataacctcagctactctctcttttccgtataatgttttgatagctttttcagcttgaggaattttcccttgctgccaaaggaaaatatatataatattttttttcataattaaatgagcaactaatatatatgaaattacttacttatcaacagcttaaagaaaccatcaaagccattaataattccactaacattagaaaagaacttctgagagaaaaacctgaaaaagccatcgaggactttctggagcaaaaaacattcctactgccagtagaatagagggtatagctgaaattccaaacattgtcctccacctgataaaattcataatcaagtaataagtacactaaagttctaattaaaattaaacaaactactctcacaaggaagataataacagtttgtgtattgccaatgttaatggtggatattaacagctttcatcaattcatattcttctgcgtgcagaatcatacaagacataagaattagtctaatcaatttcaaagaagtgacttcaaaaattaccattccatactatttttaagctttaaattactacagtatgaacacataacttatgtgattgataaaattattttcattttatttcaaatccaaaatgattcaaatatttaatttactttaccgaacactttgcaaacttttgaagattaagctttatgtccatttagatcataatgaactctcagactttactcaaacgtttagaccatgccaccttccttatctattgatttttggaaggatgaaaacagaaggggagaaaaaatgaattattttgcaaaagaaaaaagtgggaggaagaggagagatagagagggatgagttctccctcttaattctccaaaatcaatgaaaatggagacctcattctttatctctcctctctctctctctcactttccctcaagtcaaatgcaatgttaaaagatgtgcaaggttagcatatcttgatagttttgtcaaattgtacacatgtatcaaattttggcacattaataaatgctcattaaaattgaccaatcaaattcattcttctatgttatatgatattataagaaatgctaaaaggcactagtggtgcctaacaccctccaacgtgtgtcatattgctattggtatgattaagtatcgagtcatatataatttaatgcaatagcttttatgagatatcgctaaccaatcgcacgacaccacctctaggtggtgctagacaccactgatgcgttatagcaatggtcttatattatttatttaatataaactaaacttagttccaataatgtgcataggtttctgtatggcattgcatataacatttgtgttcgagcataatgctaaatattgtgccaaatataatatttttagtcactttaggaccgaatttggcactgacacttgcatttttatggtctaaagtaccaccaaatacacagcttttcattattgaaaaaggagcagtgtatatccatagtttgtattcaggagtgataattaaagtagcaccaaatatgcactaacttttaataacggaaaaagatacaagagcatcacaatgtcttaatttgattccaccatgataaattttgtgaaggaaaaaaattctatgtagctaattttatttagttcgacaaaactattaacacattaaagttttaccatctgaacaagttaataccactacatgtaaaatataccaaattacatttatgcaaagtttgattataatctcctgcacagtactataccatctacatgaaacatactaaagtacacaccatgcaaagatttgatattttcattctataaattattttcagcaaataatgaattttctatttattatccttaattttttatttctttatttttcttgttcagctattgcacattaagtaaatgattcacaaaaaattattgggaaggacataccataaaggattggctgctaaaggtaaaccagccaccagtgctgcaaggatgcctatacatataaaaagttggtttacagatccaagtgcgccacgaatttcagttggtgaaatctgacaccattagaatttgatattacgaaattgcaaatctcaatattttattagtgacctaagaagaatgcgatttcaagatcattacctcagatatgtaaagtggaacaatggcagaagagatgccaataccgatgccagcaagtaaacgaccaattatcatcgtctgcacactctgggctgtggcactggatgtaataaacactacttttaagtagcagttcttcagttttcatattagtgacattaactccatggggaaaagacataccaaagaaatgctccaatggtgagcgggattgcatctaactgaaatgttctagtccttccaaacttgtcagccaaagctccaccggtgaatgatccaacagttgcaccagcaagaagtgtgctcacaatccaccctacacagacatcacttcttttattatagcgaaaccaaaaattggcaaaattttattcttgatatcacttgctatgtagtggatatttattttatgggaaagattaaaagaaacaacaatataaagaaatgaaaagctgtattatggctaagattttctattcagctttgagtcaaactcttgccttgcactacagcattttctgcaattccaagatccttggagagatactcaagggcaccatttaccaccctgcctcaaagaaatagaatatcatggtaaggctcatgtaagatgaaatagtcgtaaaaagggaaaatattaaacaatgtcaggacaaattaaaggagaatgatttggtcaagttaaaataagaagaaaatatgatacatctcattccaactacgtattaccccagatgataaccaaacaaaatggctccaagacaagcaacaccaacaaatggtaaaactgttccagaagatttgccatgttgggtagaaggaatcacaggcacagaagcctcaaggtcttcttctgaatcacaattacaaccgaatacaaatatcaggcataaaacatccatggctaggaccctaacatatgatacttctacaaataatattaaagttcaagtaaattagagtacaacatatatggtcacacattaatagagttagaaacatttttatgacacgttctgagataagaaattccacgaaaatattacgaatatgcattttcgttgggttttaaagcaattttcacaatagtaatgccataaatcaatcgcaaatgcccaaaacataaacacttcaaaagagaagtaatatctataaaagatcctgaatacacagcaacaaggtatttcatataaatatattttccacatgtcaagtacatcatggcaaaacaaatcattgataactaaggcaatgatggttaataatcaaaccagaagcctgagctttgactgatctggattttgccgaagacccaaaaatgccatcaacgcccattctggcacgccccagttcaattcccatagtcgcagaattcaagctcagcccaccacagcaactacttctatctgtcatgtattggcttcttaacattgaaactcttcttctactcgtagattcaccgagacccagcgatacccttctctggtgttcagccccaaagcctactcttcctttgactgcagaatatgttgaggcttgcatctttatctgacagtgagaagtaacccaatcccaaagaaaaagtttacaaaaagtcaaacttcactaaaaaaaaataaatgaaaagaaaaacttttcaatcgagatcacagtcatattcatcacaaaccaaaaatatagccaaattaatgaactatactatgtggcattgatagaactacaaatcactaacaaagtgaaaatctacaaatcaagatcaaaaggagaaaaaaacacacacacacactgacacacacaaaagtgtataccggaattcagttgcgtaaaatcaagttgtgttcatctaaaatagtgaaagggcgaggagaggaattacccaaatgaaagattattattattctatgagaaacgaataaaccccagaagaagaatgagcttaattagtgacaattgttttctgggaaagaagtggtatattgtagtgagtgagaaagttgggaagtccgctgaaaaaaggattgacagttaaaagctttttactaagcatttgccgctatcaacattattcgtgaattggtttta

SEQ ID NO: 187972 - DNA, 1664 bp, Cannabis indica
tttttgatggatgctgagtctttggcttctgagctgcagaaaaagtttgcgtgtagtacatcagtgacagaactaccaggtatagtgcttcataggccttcatgatcatctacactttctggtgcagagctaatagtttgcatattttcttgacttttcttattctttgcagtttacttatttttcatatcttccataaagtttagctgagataacaatgttcaccttgtttcaggtaagaaaggacatgaagtcctggttcaaggtggtgtgattgatgacctggcaaaacatttgattgagcaatatgggattccaaagagatacatcgaagttctggataagacacggaaatgagaggctaaaaggtggtgttctcatctttatggaatatgttatttttgtgaatttaaggctcacttggtaatagtttgatgtatggtgaaatcggtgaaactcaacacttaatatgcttagaagtgttatctgtcaacttgcaattttttttttttctttcaatgcaatcattgttagatgttgaggatggcatattctacttctcaaatatgagagctgagggtttgttgagtacataatcttgcctttcatgtacttgaatctttttcaacatacagtaaaatgtacattcttttctgatctgtatccttttctttcctccatttgttgcatgtacatatctctatcttgttaatgttgggatcaaactaattgtattattataaagagaatacaacttaatagacttagatagtgaacccaacctgttcaaattttgtcacttgggttcccaatctctataattttgcaatcgaatctccatcctcgatacatggtagcagcagttagtccttttgattaattttgtctatttgtggtataaatacgcatatgcattgcacattttctcagaaaagaaataagaatgctccaaattggtaggtcccttctctgctcattcccaacgaagtcgaagtatgttaattcgttcgtcctgtaattagtttggtagactgttaataacatacatatataaatactagtttggagaagcacgtgcgcccatttgagaagcaatatcttctctcaatatagttttcaggtgcaatatttttgttcttgtagcctatgggtccatgttctagtaacccaaagttaattgcacttttgtatatgaatttacaagcagcttctttcaagcataaaacaaatgtgatgcttcttgagcatgacaaccagcccccatttccacatagcattaacatattctctaatcttcacaacttttgctcctgtttcttcatgcatttgagattcttttgtctagaatgaacacaaaatacaaatgaaaatgaagatcaagacagattcaatatgcaaatgaagatcaagtcctaaaaccatagagattagtattcaatcccctaattaaccacaactataaccgagaaattggtaacctgtaaaataaatttgggactaaccgagaaattggtaacctataaaataaatatgggacttgagagaattaataaacaaagaatagcaataggacaatcgtgatatcaaaaccaaaaaatatccacctaacctagatgagatctatagagagattcaaatagtattttagtttgggaaatttacat

SEQ ID NO: 187973 - DNA, 2578 bp, Cannabis indica
cgatccgccatggaatggtgtcttttctttgcttatttcttactgtaatcgtcctacgtggcaccatcggtgccggaaagtttggaacccccgaacaggacttcaacgagatccgtgaccatttgtactcgcgccgacgtggcgagcctcaccgtgtcctcgttgaagcccaaaacgacgccgcttcggctgagtctaacagcaacaactacgctacctttgatatctctaagatacttaaggacgagggtgaagatgataagcctgatccgaataagccgtacagtctcggacccaaaatatccgattgggacgaacagcgtgccgagtggttgaaggaaaaccctggtttccctaactttatccgacctaataagcctcgggtccttctcgtaactgggtcttcgccgaaaccgtgtgaaaatccagttggggatcattacttattgaagtcgatcaagaacaaaattgattactgtaggcttcatggtattgaaattttctacaatatggctcttcttgatgcggagatggctggtttctgggctaagcttccattgattagaaagcttctgttatcgcatccagagatcgagttcctgtggtggatggatagtgatgcaatgttcaccgatatggcttttgaggttccttgggagcggtacaaggatcacaatttcgtgatgcacgggtggaacgagatggtttatgatgataagaattggattggactcaacactggaagctttcttttgaggaattgtcagtggtcgttggacattctcgatgcttgggctcctatgggtccgaaggggaaaatcagagacgatgctgggaagattctcactagggagctcaaaggaagacctgttttcgaagctgatgatcagtccgccatggtttatcttctgatgaaacacagagatttatggggtcaaaaggtttatttggagaatcattattatctccatggctattggggtattctcgttgatcgttatgaggagatgattgagaatcaccatccgggttttggcgaccaccgttggccattggtgacccattttgtcggttgcaagccttgtgggaaatttggtgattatccagttgagaggtgtttgagacaaatggacagagctttcaattttggggataatcagattttgcaaatgtatggattcactcacaagactcttgctagtaagaaagttaagagggttaggaacgatactagtaaccctcttgaagtgaaagatgagcttggattgcttcaccctgcattcaaagcggtcaaggtatcatcatcatgatcatgatcattataataatatagatcttttagcttcaatttcaagtataatgttgagatgggaaattccattattattattattgttttcttttttggtcataatttatgatgatacatatatcagtttgtacgttatcggttactcaactatgttctagcaccaccatcattggctgtttctattctctcttcaatttttttttttggatctgtcttgtagctatttaaagttgaaattgtattgatttttgaaagaaaagcatagcatcccttcctctatctcaagacttgtattactgactggtagaatcaaataagatgaaattacaaaatcggatttttatgttggtggtgattgaaactttcttggctttgacctgtacagtttatatattgcctaatgtgaattcttgacactgttgagggataattcttttctttcattttcagcaataaattttggtaagcatagttgggttgtgttatgtactgtcttatgattggattaagtgatagaatcccattttgcttaaagattttaccatatgtttgtttttgtttcttctcgagaactttaaattttccatgtaagcaaacacaatggaggaactaatagtttctaataactagtggcagtggctgtattatgttttcattcagtttttctctgtattagctcaaaggtatattgtactagattaatatagggatctgaactctgaacattgtgaagtgaagaactaagcttagttgatttcacttcatggatatgaactaaactgtagttgattccacttgaagatttattggatggacactacatagatgtgacgcattgcaagtggttagtagttttcatgttatttattcaatcaaaatgttgatagtgaattgtctttgcataatggttattattggcaaaatttctcttgttaaattcttttatagtgtaattatctttgtaaattttcttcaagcatatatccactatgtgatatcttatattggttgtcacttgctacaaaattttctcaatttagactttattttcactttgtcaagtaccatagaggttccttccaaaaaataaaataaaaaataaagtatgaagaatggctttcaaacagaagagagaaagaactatgttagccaatttgagatttataagtgaatggaaagaaagtaattgtcgcttagcttagctaagagccttgatttgttttcatctcacttaaacgatcataacccaacaaagtttacagctaa

SEQ ID NO: 187974 - DNA, 4605 bp, Cannabis indica
aaaaaaaaacttcacatgtcattcacattacacaaaagaaatatgaatacaagatcgctgtgtgttcttatagcatatctatgtacaacacagaaaccaagctttatgttttctgtatttcacaacaactaaggcatttgcagtaaccttaaagaagaataatgcgagctattgcagtaactggggaaccaatgcaaatcatcaaatttaacaactttgcagtccactgatgcatcactgttttcttctcaaacagacgaatttgaggaaaagaccatcaaaatcacctcatatctgcagctacatgaacaacttggtagagaaactcttgacccaggacactgctgaaaacacattgcaaaatgatcaatgaacagtaaaagcttattcagtatttacaaatataatatagcaaacagccaataacattaccttatatatcacttggcagaagagacgcgttgaagagatgaaatccagctacttgaatgacccactttattaccactttcatgaccagaatttgcagcttcagcaggcaaaacagatttatgaacatgtcttcttgaggttccagcaagtgcatgagaagaagatggtgtatacacatcactgacaagctaagggaaaaaaagacagttataacgttgacatttttggagtcagatttgcagtttaagagcataccaggacaagtaggaaacatatatagaaaacataatctcggggaaaaaaagcactagtagatattagaatgtcatttactctatttttacttaaaaaaaaaaaaatcatttactcacattcttttcgagaggattatcataactcaaattctttgtcgctggctgtttaagttgcatgcgaatgctaggaccagtagcgttggtagatcgaatgcgatctgtgacctccggtgagtaagaaacattagcagctccagccactaacataatttacaaaagaaatttgtttcatttaatagaggcaagctggaaaatagacattaacagacaagaatgggaaaaaaatgtttcctgcaatctttaattaaaagtaaaaataataaaaccaaaagggagctctacttcacgagccaatacatcgattgagaaaaatagaatagggagacataaataaaagcccaaagccaagtctaaccttggtgactacctgtatccatttgcattgaatgattattgctgcctccatgagctggctgtaacagtcattcaacaatgttataagcacacaacaaaggtaatatcaacaaaatttaggaaagatattttagcaaacacactcacagacaatcgagcttgtgttttatttttttgtgcctgctggtattttatgatagtccagtcaaatatgtaatcaaattcatatcctgccattgtccaacaagatcaccaatgagttcaaaataaagaggagcaacaaaaaatgatggaagggaagagaaacatttaaatttttaacactccaaccttcacgagcaaacaaatcacggaatagccgcttcaggaatccataatcgggtctttgatcaaatgtcaatgagtggcaataatggaaatatgatgcgaactccacaggatgagatttacatagaaccttctcaaaatagcagttggttagatttacaatacaatggaactatccaaaaacaaaatagcaattgacatgcacctcaatgggagttgataacttcttttcgcatatcttgtcatatttttgcttttttgtagcagcttttaaaccctgccatggaaggctaaacaaaacaaaaaaaaatagcaattccttaatacaaaattatggcaacgatgatgttgaagataatattaacaaaaataaacttaagatatagaacagaaagaaaatatgaatgaccaaattgatggtgccgttgcatactatcaaacagagcatttaaaaattctacctacagatacacatattagaagcaagaatgaacaagtaaagaataaacacatccaacaaattaaagaaatagcatatcttatctaaatgatgaaaactaatgacataccttcctctcaagaaatacagaagtacatatccaagtgactctaaatcatcccttcgactttgctctacagggaaagcaccattaagtaaacttagtttcatcaaggtacaaaagaaaataataaatataaacatcataaaattttctgcttaccaattccaagatgtgtattgcagcttgcatatcttgcagtccctgttaagtttttgttctccctatagaaggcaatcgtcagtggaaaataataataggtagtataagctttctttcttttctttgggtcccgatagaaagagagattatttgggaaacgtgtgaaaaggaaaaggaatgcacatataagaaatgaaaaccattaaaagtcaaacaaacctgtaaggaatgtgacgattggttgttgaatccctatatctttttgcaagtccgaaatcaattatgtaaacctaacgaattaaatcaataatcaaacaatatattattgacaaaattgatcaaatatgaaaagaaatttccacccagaagaaggtattaaaaaaaggaggaaaactaaattatcacctgatttgctttccgaccaagacccatgaggaagttgtctggttttatgtctctatgcaaatatccttttgaatgcacatactctatcctcgtaatctggaccataaagaaattagttaagcaaatataaacttcagctttcccaataatatgatttgaagcagggagagggatgatgatcagattgacggtgtaaatatgagaaagcttcacaaccgaccgcagaccaatgatacgccaattgcagagaaattaaacttacaggatgttatatacattgaataaattgtgtaaagataatgcttaccatctgatcggccaacattacgactgtctttaatgaaaatttccttccacaatacacaaacaaatcctccaaactaggtcccagcaaatcaagaacaagcacattttcctccccatctacgccagaccattttatgcccggaatgccacctggattcagtacgtagaaaaagaacacaaagtattaaccatcaattataagtatatcaatacacccaacaagaaaaaaaattaacagtctcgtaagagctcatacttcctccttgaagagtaatgtatagcttggcctcgtatattaattggggatgctttgttttgctattttcctgcaaccacaaaataaatacttttaaagttaagcaaattgctccggagtcccgagtccattaacaaataaatttgccaatttgtttttaaataaataaaataataaaataaagatgaaaatgaaaatttgcggcttaaaattacagaaacgaactactataaatatatataaatactttaataagtttttagcaaaaattaatactttaataagaatgaaattccctatacatgaacatgcatatacctagacaaaacacatcgccacatattaaacaaaacgcacataaatagtccattaaaatatcaaaaaagaaactgcgatggctaattcaaaactcacaatcttgacagcaacgatctcgaatgtgtcgatattcgtagctgcaacaaaaaaatcgaaacaataacaaaaagttaaattatcagcttcgaacacatatacatagaagttctatgatagaacgaacaggaggccggattcatcactaaccaagaaatatttcaccaaacgagccgctaccgattttccggccgagcttgaatttgccgccaacgatcctgtccatgacgactagtcgaatggatcggatcaatcagatcatcgaagtgcagagatgagatccaaacgaagtgaatcccgattttccttttagctatggagctgagaaaccgaaaatgagctctgattgtgttcgtggcgtttgtgtggctttcgggggttagtgaggcgaggaggataaatagaggggtagtttcgtaatttagtgtaggaagagaacgcgttgactctttgactaatccgaatcgggttttaaggtccgggaaggagggaccggattattattttctaatcacagtcacagagcgtcagaagggaatgtattattacaaggattattactgcgtaatcacaactcgccacgtcgacgacataatggtggggcgttgaatttaccatattgcccctgataggttatgaaatgataatagtggggcccggtttgatcagaacattaatgggcagatggatcagagtagaaactagaaagaaaggtctggctaatagggccaccacatgatttggacgtagtctacaaggtttacgttacttaacaaggcccatctagatgatctatcatccattgttgaaaaaaattcccctagccttattatgtttagtaatgaaaatgaagtttgtaatcaaaatacttacacgacctaaaacaaaaaagggcatgtgattagaattactcatgaatttataatacatattctataaatagcgcatgaattttgttgaacctagatagcttatcatctaactgaatgacgtattttattaaactataaactac

SEQ ID NO: 187975 - DNA, 2852 bp, Cannabis indica
tttttcgatcagcacatttttgtacgtctagcacactaaacatacagagtaacagatacatactaaacatagcagactgtagtagagttcggtgaacatggtgatcaactcccttgaaggtctaatccctagagaagaaagagtagtaacaaaaacaaaatacgaagaagaagaagaagaagaagaaaatataagttatgatgagcttgagaggcgtatgtggaaggacaggatgcggatggaacagcttataagtcaaaatcagtcatttcatcatcatcgtcatcattatgctaatcagcccgaaacctcatcagattcttcttattcagagaaacgagaagaagcatcacggaggaaaaagatggcgagagcccaagacgtcgtacttcaaagtatgttcaagatcatggaagcctgcaatgccaaaggttttgtctacggcatcgtaccggagaccggaaagccactcacgggctcctccgacagtctgaggtcatggtggaaggaaacagtaaactttgacaaggctgcgcccctcgccatcgtgaaaagcgcacagccgccggtgattgtagaagaagccatgtcaaaaatggatgcaaatgataattcttcagtggatcttcttgtaaacatgcacgacacaactttgggatcaattctctctgctttgatgcaacactgtgtcccaccacaaaggagattccctattgagagagggctggccccgccttggtggcccagtggcagtactattgggagggagctatggtggggccaaggcgaaggagtggtcctcccagaattattacaacaccctccaccctataggaagccccatgaccttaaaaagctttgtaaggttagtgtgttagcttctgtccttaaacatatggctcctaattttaatagggtgagaaggttggtcaaccagtcaaagtgtttacaagggaagatgacatctcaagatagtgctatttggttaaaggttgttaacctggaagaggctctctcgaatgaaagagccaagaatagacttaaaataatctcatcagaagatgattgtgatcatgataacaactgcatatctaagaagaaaagaaagtgtactcttgagaaagaagcttcttcaaatagtacagaaccatatgcttcccaaattaatgctccatgtcatcctcaagtaagtgaaaagagcctctactttttcggtgaaagcagttctagtactcatgataaagaaattaacaatattgaagccttggatttattggagaagagttatttcaatactgctcaaaatttgagtttggttgatgatagttggatgaatatggagagtagtgaaaccaatcagcaggcagtaattgatgatagtgtgagtactgaggagactactgattttggacactgtggaagctgtttggacgagcttaatacatatattaatcaaatggatgaattagaagtaccactcccattaatgctagaccttattatcccacgtaatgatgatgatgaacaacacgaagcttcaatttgggatatgggatttgactgaaaattagttgatataagaaggggtcctttagtttctcttataataaatgttgaatgttgagtttatcattatattattaattatagcctatcaaaattagtgtagatgtcagattatatgtatatgtacaaattatattactaccgagttagatcatcatgtttaaatatatagatgtgtttatatttatacattacaatatattacaaccagatcgaagaggaagatgaatgaaattaaagaaaaaaaaagaaaaattaatgtacagttggttgaggtatctaggtgtgattgtatagtcaattaattaatcataaaagctgtgtctttgaggtatgcagtcatcaaaatccagtcttggagcaatacatgagtaattacttttcctgaatctgttaaggttatattctatagaactttgtttcttcacttcaacctccaccgagaagacggcacaaacaggtctatggtcagaaaatcttgattccccacgaatatatgataactgctctatcccattcccacgccacagtatcctatcacacctaaacaaaaaaataaaaaataaacattaatggtgtgatgatgaataccttaattaaaattattcaggtaagagtagatcagtacgaaccaagcaggtgttcggcgtttcttctttgatttcacagtttcgccagcgtaagcatctgaattgtgagagtacttgtaagttggggcaaagaaaatccgtccctcgtcgaacccactgaatactctcctcgcttctctctctgtattcagctgtaataatataatattgctaacgtgttaagtattccttgtaagactacatattatatatatatatataatcatatgggctgtattgcatctttgcaaaaaaaaaaacaaaacaaacaaaacaataaaacccttatttgagtgagtctttgatgtttggttctttaattttcttctactccatgcctatctctgctaattaagttatagtcaaaagattaggtcttaaatataatatcacatcacatgtatgcatgtcagaaccgaatattccagtggaaatatccacgtctctgtaacattgtcatctcttgctctttttctatataatatgtagtataatcctaacttattttggccttgtgaaagagatatttgacctacttgtttactgatgacagacatatcatcccactatatcttgattacgttcaaacaaaattccctaataatttattaccatataatcattgttgttagtcatttacttttttttttttttttg

SEQ ID NO: 187976 - DNA, 4003 bp, Cannabis indica
gtgcacttcgtgcaataaattttgtgttttattacagttgcattatatttgcttttctattttattcacgcactgataattgaaggcaacacttttcttaaatacaatctataacatgatcagtttttttctatatttttaattagtttatttaacattggttacaatgttctaaatagttgtttatccaaaaaaaaatattaatgtaaaaaagattattgatcagtgaaaaagaaaataagttcaaaatatttgtataacagttatatttgtgctactaaaatactattatgtaaataaacatggctcagaattggcaatacacgacttaaacaaggagaactcaattgtcgtaagtttgcctaacaacaaatatacttgttgcattgcatttgtatttaggtttttcatagttgacttaccttaaatgaatttttaaattctcaagaacaggacgcaattctacttctcatttttacaatgggtattttgatgaatgaatgaattatgtaaattatgaagtcagtggccaatttatctcaatagagtgcaaatatgaagaactagtacacaacttgaaacaagcggtggaatgcaaccaagaagtgccacctaaaggcccctcatcctgagaagaaaactcattagagttgtcctcagtcatgatacccttgcctttgcctttgtctgtaggcgtaggctgggcaggtcttgtaggcccttataagaccggggcatcaccaatagtgcccccatagaaaagatgcaactgaagagtgcagtccctcatgctctctattcgggccacctttgccaaagggacctcttcaacaagcttgctcttttccttcccaacagcaggcctcttccccttgctcttctcctttctaacaggagcattacctaggtcctcaggagggttattcggagcagaaacaccctctctagaaggttacataccatatttattaaagttctcctcataggcaaccgtacaaatattgtgccgagtgactggaagggacaaaatgtggttggacaagtcccttagtctcaatgtggggagtggctgactgtaagtttgaactcggtggaaaaattgacagacgccttttatgtcatacgccataaagtaactcctgatgtagcttccaacctttgacatggttgcatcattagtgccgcccagccactaatagccatcctggctaaagtagaagtacccagtcctattctggcctagatttgattttagctcaaaatagtaattcacctcgaaaggcgaaggatatggccaacctaactcagcatacaagataaaaactgctgacaagtacttgatactttttggtgcaatctgagttgaaaaaattagctacgtacctgaaatacggtttaaaggaagcaccataccttgctctatgggggccaaaccacgctatccagtttggctaaagatggtgagccaagtgatctcgagcaaccctaatgcatcggacctgaccgacaagtccactatcgacgctgtcgtcaagcttggtagtgtagaacgagaagatacccatctatctccttcccccatttataaaatccatggctcggtagcctcgtccttaatatggtcaaccctaatctctgagggttgacccctgctgttcagaggcattccagcctcaccgtaagagcccaggggattaccttggatcacgtcatgctccttagggcacctccgaacaaccctaggctcaatttcagactcaacttgatctacttccagctcctcctcttggtcggccgtaggctcctcttcctggccagcctctggttgttcagtctcctcaacttgacggatcctcccccttgcatgagtttaggaacgtggagatcaattggaggtgccttttgataagtttcgccaagtttggatgttgctcggaaaactgggcaacaatcacaatagtcgctactgcaagaagatctctagatgcagaagtcgtttgtccaacaggcaaggtgttagcacactctggtggacaatgtaagtccgagacttaggtaggaagtgtctccacccatggttcaaaattcaaaaaaatcttccgtagatctcaccacctatttgctcagaatagtggtgatgttgaactttaggttccggagaaccactgttcacttcaaagtcacttgaagagctacccaaagagctctcaaaggaagaactagttgagcaatagtcttcagacagaatacggagtaagtcctcgtcgatccagctatcacctgcccaatagtcgtgcgtgttcatctatgcagaaagacaaagggaggtgaacaacaggagatcacaaatatgataaggataaaaacatgggctaacatgccaatacttgtgcgtaccaaccgaccagcccatgggtgtcaagctatgaaccggctagcttatggttggtttgccataaatcggccagcatctgaaagttacaccaagaactggctagctcatgttttcttcaccatgaaccaaccaatacaaaattcaaccccaaaagggccggatagagttcctggaaaggaactaagtatcagccaaaagtctaatactagaccaagaaccaagcaaggtctctaatagacccaaagcactggccaggtccctaagtggatcaaaaaccatattttttttaagatttaaagctacgttcttcatgttcttcgaaccttgaagatcaaaatctcaaaacagagcacaagattcgatctttttcatcaagaagttatacattatgcatcctaaagctatggaacgaattataatgtataaaaactatcctaaggcatgagaatcaaaaagttcataaaagctctaaaactcatcaatggcataaattcaaagaacgagaaagaaagggaaagctttgaacttacccactaagaagaagcaaggaggcttgagctagtcctcacaataaatgtgggtgttagaaacttgaaaatccacaaagaactcaagctcacaagttttcaggtctatggagtctttgagagaaattttgcttagagaatataaaatgaaaagtaaagaatgaaaagagtatgatgcacttatatatagtttcttgaaagttttctcccaaaaaaacttaatagaaaattaataccacaaaaataggtatgcatgggaaagagaagaccaagaatgacaacatgggaaagtgtgcagccgtcacaaaacttcctacattgatcaacgtaaaatttataactgccataaaatcacatcaatcaaagagtccaatacctgactatgcatacctgcatgggaaaggatgttgcaataccaaaaaaagtataaagtccctaccaaaccagatatccaaacagggacattgggggaggggggcaaattttatcctattttttgtccacttgacgtggcatctccacatggcaaaaagtagaaaatacgttgaaggcaggttagcactaacctgctaggattagcgccgtccagcctcctaacctttgagattccatggttgtacggtggacataagcagagacagatgaacaaacctaccaggtcctggccaaacctatagctggccagccaggggtgacaacctccaagtaccggttagccttcaataaagctggttgaccaactatacagaaacgcacaacacttgtaagcctaccaactctccttcaatactcacttaggaacagttcaaactgcccacaaagataggggctcttcatcaacaaataacaatcctattattgagggattattaattatatattttgtagtatgaaaatatagtgcaacttccctattttgtaagaatatttctaaggctagccgtcgaatgtggaggctaacctttgcaagttgaggacaggttttttcactgtttccctgtagaggctaagttcccttagtcgaacggatgctcccttggtgccaaagtcagtttttggttggccagcttgtgcacagatc

SEQ ID NO: 187977 - DNA, 3703 bp, Cannabis indica
tagttttgctacacaacaaaatggaattcggagccacaaatatgcaactcggagggctatttcagtgacacataacaatcaattatctcctatgaatgatgatgcattgtcaattccaactgatgatagtgaatggaatggaaagaaaaaaaaatagccacttcaagtgatgatgaggatagttctgaaatttgccaatattgtgacgaatctatcatagaagaagagtttgggggtttactacgacagtgatgcgggaaaccatagaaattataagagattggaaaggaacaaagagttaatcgacccaaatagtaaattgcccaatccagaaggaggttatgacatatatgagaatggaaaaatacttcttagaaagtggttgagatttagagatcacaagcactattgggatgtggtgaaagattttgctgtacaagaaggttttgagcttcgtaaagtcaagcatgcttctagtagaatcactacaatttgtagagcaaaaggatgcaaatggagaatacatgcttctaagtcaccagatggaagagagtttgtcataaaaacatacaatcctgaatataattgccaatgtgttgttaagaattgaacagttacaacaagatggattgccaaaaagcttcatagaagctttgctagaaatcctgaaatgagtgtggagaaaatgagagttgagctaagagaccattttggagttgaggctacaaacagacagctatgggcagctagacagaaagctagaggggattcaggtggtgactatgctcactcatatgcaaacttaaggcattatgctactatgatccttaaatttaatcctggtagtgctgctattgtccagagtaacttagtggaaatcaaaaagaatatggagggaaacgctgatgaactattgactcttaatgcctcaataataaagcctcagttcaatagaattttcatttgttatgaagctgtaaaatttagtttcaaagcaggatgtcgaccattttttggattagatggttgtcatctcaaagggccatataagggaattttattggctttattggctgcagtgggggttgatgcgaattttcacttctacccaattgcatatgcaattgtagaagctgaaaatacaaatagttggaagtggttctttgaaatgttattgggagaaattgggcacaccaccaataatgaccaaccatggtgtgttatgagtgatagacagaagttgactagtacattgactttatattcttttctttaggaatttaaaaactttttattgcggtaaaaatataatactgattaaattaaccaggtactccatatatacaaacactttatacgtgtatatatatatataaatatatagctaagcaatgtaatttagtgataaatgaattaattaactatgtcatatatacactatttatatatatatttgttgtctatttatttctatctcaagtttttgttgtgttccttagtttttgtgcaaaggctagttttagagcagtaaattgtttttaattatcactgtctttatatattttgtatgtatgaattatatatatggctaagtaaagtgacttatataataatttatttagataatatattatgcttatttgaatttaagttgtagtcagtaagtcatgtaatggattcacaaaatgaactaattccttgatgtttttcctaaactaattctttcttaatttttgtagggtttagttgatgttgtggctaacatcccagatgtatcacaacgtttttgttgttttcatttggagaacaacatggtgaaaaaatttggcgcatcagaacttaaagtactattttgggtagcagctgagacagcaaattttgataatttcaagcatataatggattgtataaaggcagtcaataaagaagcacatgagtggttgagtaatattgacttcaaccattggtgcatgagcaaatttgatacaaatgttaaggtagaacatcttaccaacaactttgtaaaatcttttaatgattggatagatgagcaccgatacaaacctcccattgaattgcttgatggtttaagaatgcagcatacctcaatgatgtatacaaggaattgacaacagatagatggcatcacaagttaactccaaaatcacacttgaaagttcaagaaatccaaaaaaaagcacgttttgcacgtgtagcaaaggttattaatcttgaatttcaggttgattatgctggaaaaaggtgtattgtgcgactgaatgaaggatattgtatatgtggccaatggcaagtgaggggattaccttgtattcatgcaactacttgtataaacactataagggcagacatttttaattattgttcgccatacttcactactgaaatgtggaggaagagttttcaaaaagctattcatcctatacctgatgaatcgatgtggcctgagtttgatgatgagaaattactaccgccaataataaaaaaacttctaggtagacctaaaaaacatcgtagaagaagagttgcaggagaggagaggcctttacctcttgaagttcagagacaaactcaaaaagagccaattagcaagggagtttctagcactaagaaatgttcgagctgtcatgaatttggccacaataaaaggtcatgcaagaaacctcaaccaacaagcatagaacaagagacttctaactttgaaaatcaaccaacaacaagtcgggacaaaagaaacgcaagtggtcgtggcagaggaaaatttcaaggcaacaaaaggggcaaatcatcacatgaggtaaataatttatactagtattatatttaagctatatatatttagttgaatcaattaactatttttaccatttttttaggctccacttggatattttgaaccatctgctgaggaaatacaaacgactgaaacaccaatagatttttttctcaagtgactagacccaataacaaattttagaaagcctttatatatataaagtgacttgatgcaatgttgttgaaagatttttgtaatgatttgtttgttctaattactacaaacttttttattagaagaactaatttctagttattttaatatttgtaaagatatattttttctttaacaatctcttttatattgttttaaaataatgagattttcattttagtttttatttatttgaacagatataatatttaaaaataaataaatattaaaagggtaatatagtatactagaaatttgggttctctaaattcaaggaaagggtactaaatgtgtagaatttgtaaataaaaggtactaaataatcattattaaaaacataaggtactaagtttgttttttggtaaaacataaggtaccaaacgagtatttaccttaaaatctatcatccactatataattggatcggatttggataagcttaaaaatattggatgtggtccaatgaacaccccaatatgtgtcactaactaaatataagggtaatacagttttggtcccatgtaatttaactaaataccattttagactcttgattctcataaatacttaaaaaggaccctctaaatattaaaatagttaagaagtccccattataattttagtcaaatgtattgttttttaataattagtcaaatgtaattttcaaaagattgaaatactttaatcttatttatt

SEQ ID NO: 187978 - DNA, 2845 bp, Cannabis indica
tttttttttctttatttaaaaaggaataaaaatatccatgccatctagtcacaaataactataaaacaagctttctaattatatcagaatatgggatcaacgtataacagctcatctaaaagtcgtaaatggaaataagtgaagcccagagaaaagcatggtaatacactcaatgctaatggtattgtaaggatattttagcgaaattctcaggtactcatagcatctccaactatgctctctaaagctaaaatagggtgtgagtcttaaaaaaaatagctccaaccataaaaaaaaaatgctctctataatagagaatggatagggagcttccctattttttgctaaatttttttaatattattttaataaaagcactattacctttttcattatttcaaccaattaatttatatttaataaattcaaatcataaaatattattgaaataatcaaatgctaactaaattagggagcatggttggagcaagaattataaaaataactatctattctaactgtttagctattttagctaaaatttggataaaaaatagtgagcaccattagagatgctctcaaacgttttataacaaacttaagcaaatactccaatattaacttaatatctactgaaatacagaatggcttaagatactgaaacaatacaacagaacataccgtgactgcactgaacgcaagcgccccacttcaccttgcatatgttacacactagctttttgcgagtttcttttattgcttcaatattcataatcggttccatcctcactatgtcctcaatataaacctcgggcaaccactgagagcaaaacaaatgagcaaaatccacggagtcgtcattctcaacacttctatgagcaggtttcaaagcaccaccctgcttcgggcaaaggacacatggcttcgtcgaatccttactatcagtagtctgtttacaccgtgaacacagccacgatgagtctacatccccttgtacgccataacacttccgatgaacagaaacctgacaagaactacaggaaaccaaccggttaaattctttccccgaatcatcagtggagcaaaaatggcacaaggatgtattcccatcacaagaagaagctaccaaaaccttctccaacccagcatcaccacccagaagctttcgtttcttcgaaggacgctcagtagtcaaactaatcttattcctacaacctaaaagccactcaacactgccggacggtactgaaacgaaagaactcgtttcctcttggggcatgtcattatctaccacgctatcgatttccatagattgctcatcgtcttcctcctcctctaattttacctcctcattcacaatctcatgtttctttgcatcattagcgctctcgttttctatatcattttcatttgcatgtccagtattaacattctcatctctaacgaaatttttattttcattgatgaacttcaccttctcttcactacaaccatctgcatgttctcccctagcatttctcaaatccggaatcaagaaatacttacaagtagctgaagtacttagcaaagatacctctgacaacgcgtctatatccgccattgtcaagtccctgaaatattcttcagtttcaatccaaatgttagaggttttggatttttcactgggccgagaagacttcttcttctccgcacccgaatgagacttcttgtgccgtctccgactatccgactgcctcgacaaaaaccaagccaaaccacctggcagagtgggcacagtcgatgacaaagcctcatcggaattatcaaacggagaccgcaaacacaaagacttcttagcttgtgaaaagaaatcgacatgagctgacgataacgtcttctctgaaacctccagtagagtcgccgggattttcaccggaaccctagaaaccggaccagacctctcctcagtaccacaacctccgaccgcacccctacccatcatcttcttccgccggtgacatctccctccggtcatcaccgacaataaccacacaaacaatccatagtcgaaaaacaagtaatttctaattcccaattgaaatcgacctgagccgcaattcctcctcgcatgcagctttccgtgaacaagaaacccttagacctatgttccgagactcggtcttcaatcaatctcaactaggaagatgtagctagcccgcgaggtcagaaatcagaagtggataaaaccgcggctagggttagggttttcagttatattctggttcgtattcttccggatacgttttttttttttctcgcagcttcggggagagagaaatttgggtttttgggaggggagtggatagtctcaactctaagagagatatttttatacgtggtcttatatagagtgtggtgacggaataccattggtattgtagaacccttacctatgctacacctgtcacgcacgcttagttaaattttatgtgtcacaaggaaattatttcattgtctgtttttttttttttttgaaaacactgtccgtgctttaacagtctgaaaaaattcccgctgtcctacacactctgttctaatggctgaattagctaattaatgaaattaccatttccttttttcaaaataaaaaagtactaaaaaaaatttaaaatcattatgtttttcatattaattaaaaaatgaaccaatttaaattaaaaaataaataaaaatatccttacagacaaggtaaattttaaaaaataaaacatatttatatttatttaaataaatacaaaatggagtttacaataattattgctagtgcttttcaaatcacattattcaattcgaccgaattagttac

SEQ ID NO: 187979 - DNA, 2977 bp, Cannabis indica
gcagccaaaagcagaagctaggaaataccagattttagtttttggctatgcgggattaagttccttggtttaatgaataatttatatgtcaaatgtaaccttatatatttatgaaaataccaacaaatacccttgttgtctttgaatcattatcttcatccctttttcacactcatcacggctcatggcagttccagattttttttcttacttttgttcttcaattgaattgaatacatcaaatatcaacctctttcataaatgatttcaattttgggtgtcgatatgttgcattcctatttttaacaaatattggttaaataaaataataaatttaatttatttagaataaaatatttgccctacagtatctgaaaaaattgcagaagatgtttctgatgtttgtgatacaggttctggagaagtatctgggaagataactttgccttcgccttcattgattactgaagaaaaggttgatgatcgctctgataaaagtccagttagcagccctgtagaacatgaggaagcaaaaaaatatcatgttgaacttgaatcgagtgaacaattgggcgtttctactggtggtgattttgtatcagctagtacatcagaagtgtttcctgcaacctcaagagatggggaacaaaaggctgatggtttggagcctgcagacgaactaaaagattctcaagctgagatggatattaagtctgggccgtccacagctggagagaattcgccagaaaaatttgtggagcacctgtccactttggagtcaggaatcgaagaaaatgaatgttcatctgtgaaggctatagttagcagcacacctgttccagaagaaccaaaagattcaggggctgaaatagctgtccaattgaactcaaataacactactggggatttgttggataatattccagagccttcatcttcttcagagacaacagagaaaattggctccctatctatggctcgcagctcagttcctttaaacgaaccaaaagactcagaggttgaaatggttgatcagttagattcatgcaagggtgttgggtgtttgcctgaaaagatcggttcaagtcctttgtcttgcgtagtaatcaatgaaggaaagatcgaggattcatctgtagaagaaacagaagacttaaatgctggaaaggatgttcaacctctgaaagatgctgatgaaagtaatgttcaaactgatccatcccatgttagcatgatactggtagaaaatgttgtagacaacacaaatgcaccacagtcttcttcagtgcctgaggaagaaaagattgaggcctcatctgctaggagcccagaaacaattgatgactcttctgagatgggtccagcaagcctctctgtacaacttgaggggtctaaagatcttgagtctaatatggaaagcgcagctgaagcatgtcaggtggtcggggacgtatcggacaatatgggttcagatactctgaatctaccttcatcgtctttggtgtcagaggaagaaaattaacggttccaatgttaaatgtctagctaacaattcaggaacgctaaacaagtcaaaagatggtgaagttgacaatgttgatgatgtggatgcacccctcactggtggaattataaatagatctggatcttccttggaaactatggatcaaatggatgctactgcagctagtttagaaacagaaacaatgtcagaatctgtggtatctacatctacctcgcatgaagttgaagcagatgttaaagactcatcagaatggggtccagacagcagcccagtaccagaggataaattaaatggtaatgatgctgaaacgggtgatgataagcctgagcttggtggatctttgtcaaaagagattgagcgctcatccgagaagaatctagcaagcagcagtggagcagtggctgaattggagggttctgatgctggtatcaatgaccaagttaattcatccaaggttggtgggattatgccagatataaaatcaaatgttttctaagttctttaaggctttcattctactgaagtaaatatattcaaaaaatttaaaaagttggaaatcctagtaatatttatctgctttttcttagacggtaaacaaataataattatgataacaataataataacagtaatactagtaaagataatatatcacaagataaaggttcctcttcactaaccattcttaaaatgcatgctgcatacagaactatatgccttgaggaagctttttatttttcattaattttgtggcaccatgtcttaagtgttccactgaaacaggctaccgttatgttacaggaaaatgataaccagactagtattgaccttcctgtgtcttccatagacatggaggacaagaaggttgcaggaaaggaggagtctcagagttgcggggtggtatcagatactgtttctgaaaatatagatcatcaacctcaacagtcctcagaacccgaagcgaataatgacagtattgtagcacctgagaactatgattctgatgttaaagataaaactgattctccagtttgtgacacagtgccagaatgtgaaaacattgatcagcttcgacaatcaccattgggcgacaatgatagcagcagctgagaaatcagagcccgaagctaaagctggagcggcatctccagtttgtgagaggtgcagaatgtggaacctgaagagaccaagagtccaaaaaagattagttaaaggtgtagtattgatgtacagctacctagctacataccctatgaatatattttttcttaattctatttaagaaatgctttggcggtctgtatagatagaagttatatattaatatcatcttttgcagtttataagaaaaattaaaagatcatttataacttcaaacatcatcatgtattgaccttagtttcaacatcttttgcattttataagaaagagatcatttataacttcaaacat

SEQ ID NO: 187980 - DNA, 1156 bp, Cannabis indica
tttaataataaaatattactatacgacaccatcatcttttatattttttaagtactaaataattataaatatgattgtggtagcttaagttcaaaagtttgaacattgtcttcttaatattttaatctttttccaaacttagtctatcacacaaattaatagcaaaatttcaaacaatttcattaatttattattggtaacatttgttgtgtactcctttttttattcatggaacatacttgtaattgtaaagttgtagattaatgttacataattaataatgtaggaataaaaaatattataaatatatagctattagtataatttaattttaaattttatatattattgataaataaaaccattaatcattaacctaatagcaattctcatagtagaaaatatccacttggatatgatgtgagttggttaaggaagatcaagcttagttatgacaagtgttcaactaaggccacactaattgggagtgagaagaagattcactttcaacaatttaagttgaatattcctaaatatataatttgtttaaaattaaaaattctaaattgatattactaaaatagaagaatccaaaatagcatcaacatagatacttcccttggcatgcataatgattaattaagatatataatttcactattgcttatgtttaatatgctaaataaataaagatatattaaccaaaccaatataatattaaaggagaaagcatatatgattgggttgggtggtgaatggagcatagaatagcattgcttatatataaatatatatatatggggaggtggcatagtcttgtccatgaaatcaaaaaggaaataataataatatgcaaattctcaaattaaattaaaataaaataaagtaaaaaaaaaaaattgaagtgggtatctatttatttatataagagcaccctattaaaataagtatattgatacaatttttaactgtttcgacataaataagaattttttaattcatttttttataatcgtgtacagtataattatttgagacattttataaaattttaaaaaattcaaaataatgtacaataaaaaaatcgtctattttacactttatagaataaagaagtcactcatccaacaaactttttaaactttatttttaacat

SEQ ID NO: 187981 - DNA, 1618 bp, Cannabis indica
agatagttggtttcttattttttatttactttttctttccttccatttatttgttgctgtataggaattataaaacatgttgtgtggttcttttacattgtaagagacagttgctggcctttctagaagcagcaggtcttcatcattgatccccaagaaagctatatttgttgatcctcaggctaggcttgatctgggaaaatctttttgtaagattgatgaattaagaagttcaaatgaggcattaacttggagaacatggagcactcagcgggcaggattttcaaatatgggttttgaaggtatttctttatactaattgatggtagctgaatgtttaaatggtttgattgttaatgacctatatcaattgatacagacactgaaactgcatcaagtgaatctcgtattggagggtcattggatttgtcaaaagaagaaatactaagaagagagagtatacgtaaaattaatgaagggaatgaactagattcacatcatgaagtgattagtcttaatcaactacgaagtcgtcttaagcacctggagttagagctgtcatctgcacttcactcggtgcgatataatgctgatgaaactgcctcacaaaaggtttttactctgatgtttacatttaatgcaactacctttcccatcatttttaatattcttctcacagaaaaacgagaatactttggagttttgttttgctgtctaggtcatttggaacagatttcattttttataattataatatcatataagtttttaatctgttgaataatttaataatttatcaattgttctggtatgtctaggatcatgaaggcgcctctgatgacttgcggaagctttctgatgcttgggaatttcaggaaaacgagattatgaatgccaagagtttattacgttcaactcgggcaaagttagctgttttagaaggaaagatggcactagcaataatgtatgtacattctattaaattgaagaaagtagcaataatgcatgtacattctattaaattgaagacgtataagatttaagttaactgctttacgttgatgtttcggatatatcttccctttacagtaatgcaaaaaagattgtggaggagaaacaaaagaggatagatgatgctcgaagagcttcacgacttcttcgtgctagttgcatagtttggcctaattcagcctctgaagtacttttggcaggatcatttgatggttgggcatcaaaggtataatctcatattcccacgtccctttaaacaaggcaatgcttgtgctgattggcttacgtctttttggtttgaatttttattttattttttttattaataaatttcagttcagacacataacatttattcaattaccaaaaatcctatcacgggttatggtatctatgattgtaatataaatctcacaaatcactcgagttcaatcttgttgatagtaaccttgtccactttccgtcgtacagtatatactgttaatgactgcagccatcagccatgtgaaggtctttctatagtgatttttcttcgtttagttcatgcatgttctttgtcttctttggtagatcactgggagttaacttaatatatatatatatatat

SEQ ID NO: 187982 - DNA, 3799 bp, Cannabis indica
gtctggacagtaggaggatcattggtcagagtatgaccagtagaagcttgagtggcaggatcagcagaagtggacgcctttgaaggagaggatcaatggcaatctgataccatgcgaaattcatgagagagtaaaagagatgaaaaagaaagcagaaggaaagagaaatcttcattatacaacaaaacaaaaatacaaagtatttatagagtacaaagtactctgattacagctggaaaaacaaaataacagacataacaaaattctgttatgtaactaacaactaataacagatctttaatcttgtttttcattaacaagggcatgatggagaaactcgcatttgataaggggtagatttcactgactcttaagtgctccgcttctgtttgttactccatgtgaatggagaaattttttgtaacattatttccacttgtagtactcgtcaagggcacccttaatttctatttttgtttttattatgtgttgatgggctttcttcgcttattatgagagagattgaagtgaagaatatttgggccttgtttgtgggtggaaagggcatatgatctctcacttgttcttcggggatgacaacttcttttttttttaaagcaactttagaaatttgctcaagatttaaaattttggaattggcatgaggaggcatcactagcttttgaatttggctaagtctttggtttacttttcggtcttcatttgccctactatatgcgtgactttagttgttaagcttgggggttcccattgttacttcgaattatcttgtttccttgggaaaagtaagagaggcctctttcagtctcctcataggcttcgttgatgaaattcattgccattgttggtagaaatcaagtggtggaatagggttaggtaacttatttgtgtcttaccaatcaaatcttacaaacaagcaacgcgtatttataattcattggaacccctggcaatgagagctatgtatggctttactattctaatgcctccttcctaaacgtcaaagctaccaccaaatgtgcttcatatatctacaaaagtgtgctggcgtcaggaattttggaaagcaggttctaggtaggttgttggtaatgggaaatcagtcaatatttgcgaggatgtttagattccaaagaatgcagaaactctatctcctttaatagagacacttctttggtactgtcaacgagctaaaaattgatggcaggaaattaaattacaaggtgatacataattccttctttgagaaataagctcatgctattttatctgtcctgattcccactcgtaacactaaaaaataggctcacctggaactatactaatacaagtaagtacttggtcaagagtgggttggaatgagatttgctaaatagggtatgaccaatcctcttcttcttcgataccttctcgttggtagagttttttgtggtcactgaatacactaccaaaggttcaaaactttatatgatcattcctactcttgcaaacctcaaaagacatggtgtcaatacagccctttcaatttgttcttcccttaaaagcatcatgtttggatggcaatctcagataattcaacaattgggaacttcccacaatctatctgattgtttacatggcagtgtgtattatatggctaagattgaagttaagaaattaacggtcctatcctagtgtatctagtattacaggaaaattttatgcatgagaacgagctacttaacggcaagtttgtctccatcattggattacctataccgttatcaagataggtgagaattcctctaccttaagttgtgaagcttgtcaatgcagtggccaacacctccacacctgtgttgatggtagtgtcttccacgagacggttcgcaatggtggtgttgcggtgtttgatcataggggctggtgctaggagcgatgggagcttctcaaatggaaattttgcttgcggcctcttttggcgaaagccatgaccccaagctcggggttactcctttgtcagattgtgtcactctttgccaagacgtccaaggtgcaaaagtcacaggcgctaagtttggaatgctgctaaatgacatccaaacatattaggaagccttttaattctctctatttcacattgtaacagagttgataactcaattgcgcattccctactcacttggctatatcattagaccagctaaaagtctggtggttgggtttccctatatgtttatggccttagatgtttgattgtgctgtaattgcttgcattggcttttagcctgtttttaatatacgatgatattttaactcagtacgaaataaataaataagtcatctaggtaactgcgttccgcaagtgattcaagacacaagtattttataaggaaccctcatcaaattttatacctaattgtagtaaatatatgaagaaaaagcattactaaacaaataattttcaatcacccgagcaaacaaagataattcaactttacaccaagtagaagtttttttttttggttaaataagtctttttattgaaagggagcaaagctaaaacaaagtcattgccacagagggggcaatgtcccttaacacaccttgagaaccagacttagagcctcttgcccaaccggctaaggcatcagccactctattctcagcccgagcacaaaaacaaaacacaaccttatcaaagcacttacacaaacatcgacaggattcaaacacagggtaagtgccccaggcgagaggcaaacaaccaagattgagagccatcactgcaaccttagagtccgaatggactttgatttttcgcacgttacgctgacgagccacttgaagagccagcaggattgccaatagctctccttcgagaatcccagacacttttttgtaatcagtgactacccaagcctgctccccatcagcctctgccctctgaacagccgccaaaccagcttcctcgtttgaaattgaagcgtcagtgtgaaaaggaaccaagtcggatgagcaagagagctctgtaaaatcctgagaagccaaaattgaaacctccccagggtctgcaatatcactcaaatgcatctctcgcacggatgcctggacatctgaaattaattctgcaatcgcaaaaggccggttcctgaaaatgacattgtttctccatttccatatcgacgcacaggcacaagccacgaacatctgcaaactctcatccttcacagaagtctaccacaaaccaaaatccataatagaattccaaagcagatcatcaattcaaatgccccatttactgtgaaacaaaactgccttaagtgcactacaggcaccaaacagatgcaaaacagtttcatttgcattatgacagagcacacaatcctcctccagtctcccaattctcgacttagtgggcaaaacatcagaccatattttccaaagtaaaagtttcagcctaggatgaattgatgaacgccagagcttttcccacaccttattcgggtccttgaacctatcttgctgactcacccagtaactgctctttaccgaaaattttcccaactttgaggctttccaaaacaacctatcattagtagatatcaaaggccgaatgctcaagatagcttgagccacatcctcctcaaaacaatctttgataatctctgagttccactcacgtgtcccatccacaaaaagatcagaaattttgacgaagacatgtcttctagagtaggtgaaattgcttcgaacttcctcgatagacaccccaagaacccaaggtctctcccacaag

SEQ ID NO: 187983 - DNA, 663 bp, Cannabis indica
tgccacagaagaaatttaactgcacagagaaatttaactgccacgtgttccgaactttttcaagacaattaattttattcggattttaaattgtgttatcacatctaatttatttgtcaattcaaatatgtagtgatgtgtttgtacacactttcttgtaacttgtcgagagaattaattatttcaataaaaattcttttatttatatttacatatattcacgagagaaattttcaatagaatgtgtctaatcgtgaattatataaaactttagagttgaaactctagcataatgcaaatagcaatttgtttttttgaaagcaattacaaatagcattttgataagtaaactgactctatatagacatttttttcctttatgtaaaatgacatagtaccacgatagctttaatttttcttggcaatatccccactgaacaagaatttcaaattcattagaccatccaccttgccctcctgaataggtatctctgggacgatatctccaccgcaagatgttcaactatagtatgatagtaatatggcgaagattcaggagccactacatcaccatcggtaggggtgcatcaaccttgctctcctgaataggtacctcagtttggaaaaccccatagtattagaacttattttatcaaaatctag

SEQ ID NO: 187984 - DNA, 986 bp, Cannabis indica
tttttttttttaattattttgcactatgttctagttttgataatattttttgcaaatgattttccatacaccaaacatatgattgaaaattttaaggcacccgatccaaaattttaaccgaagccaaaactatcaaaataatccaaagtacatggtgaactataaaaatgtctatttccacggataacctcatccaataatgcttcttttcatcttttttcatgataaattatctgttaaatattattttctttcatgatctttgtatttaggttcttgatttttttcttcctttctatatatttgtaggatgagtgttgtaggaacacctcttttgttcttattggtaagaacatttttattttcaatatatggaagaaattataatccaaatttttttatatgacaattgatactatacttataacatatattctattaattttcgaaaaatttcaaataatttatagtgttaaaagcaatattaaaatatttagttgtatttatgattaaaaattgtgttaatgtttacttaaaaacatttatttcacgtgcttatgttttcgcctttttggtactatattcgaatttttttaaaaattaacagaaaatttactataattattataagtttaagaccatcatgaaaaaagaacataaaaaaacacctaaattgtgtgtcgtcaatttggaggcatgttgcaccataacacatcccctatcacataaaaatttggtgtaatggtaaattcttagtcaattttttttcttcaaaaagttaagggttctaatcttatcaattacatatttgaaaatttcaaagtgacaaatgttagaagaccttgtaaagagataagaactcttttactatacttaagatctgacaaattaaattaaaaattgtatttaaaattttgctagcaaattttttttttgagtctgccactatgtagataaccacactgtaaattaaattttgaacaagc

SEQ ID NO: 187985 - DNA, 2050 bp, Cannabis indica
  modified_base (67)..(67): a, c, t, g, unknown or other
attttattttcttgtacagacagatagagagagagagtagagcgtgtttatatatatataaaaaatntatgagaaaattgaaaagagagtgaattgagttgaatggtttatatatgaaatgaataatgaaacgtagttccttttctttttatttgtttattttattttatagttttttttaaaaaaaaagaggtgaaaaagtgattagaggtgaggtgtggtggagtggagtggaatagaggtgaaagtacgaaagaggcttttttattttacaccgacgccttctactttttcttaaacatggaaacagccacattggatcacgcataaaacagaggccaacgtgaggataatttggtcatttcatgtatgcattttgtacattgtaatctttttctgagaaaaatggaagtttttattaaacaaattagtcaattttataatgatatgtcacttaaagagcatatttgatcgaattaataagatagcaaatcataccatttacaaaataggaatgaaaattcgaatcgcaccttcaattaagataccaataaggtgaaagtgttaagaacgctgacagaatcgtttggtggtggtggagcgacagaagtattaaccattggaggatctttgatcagtggtagtagctgaagtgcagcttgtgtatgccccatgattgaattcgatgaagcttcaattgatttcttgaaggtttggtttttcatctgataccatattagttgtggaaaacagagtaaattgttctcattgaatagagagaatgtaaattgtttgttacaatggcaaagtgaattatgcatatgttacgtatatataagcaatgatgcactgtgatatgtttagctaattaattgactaaatcgacttaattaacataattagactgactaaaccgacttaactaacactaagttttaataagaatgcaagatatcaaatcaaataaacataagataaattacacctatcaataactatcataattttttttaataaaaattgggtaataataaccttattatttaatctaaaataaaaaggaaataatcaaacgaccaaccacaacgtaacaattataacaaataatcccatcataaatcatggccaataaaaatcagagaatctcccagatttgaacatgaataaggatagtaatgctactaacacaaacatactttgatccaatagaaattcttctaatatcccaaaaagaaataagactaaaatatcctaccatgaatggataaagctctactactaaatgaggatagtaatgcacaaccaatatatttttagcattttccttgagaaggaaacattacctgaaaattacattgtctcttcggtctattgaccatatttataggttttctacaaagagtgagaaaagaagctttgcctgaagtccctcgcatttccaacaactctcgtatcacaaattgcaaaaaaacctatcataatgttaagccaactttgttactttggatttggaaagcacgacctaagcattaatatgtgtccaaacttgtttccccgcgagaaactttgcatggactctattacacactaagcccattccctcactaaatctaaatgatagaaaaattgctacaacattctgcttaaggcagccaatcatgaaacacatggaagggagttaagctctgcgattcctatggcgattcgggaacaagctaatgctccctccatgtaaaattaactcgccaaagtttacaagtgccacgaaggaaactttaaaaatatttacatctaagaaaagaaatttgtagttcccacacttcctagattcaacaagcaatttcgaaaactaaaaagtctaaaggcatcaagctttggccgttggaactatgagcttcgaaatgagaaaagaaaagcagaaaaaaaagcaaataaaagtatggcaagcaatgacaagcatacataaatgagaaaagttgtcttctaagttattacacacgacctcgtggttaaggcatgttcaaagtgtctctgcaaaaaaaaaaaaaaa

SEQ ID NO: 187986 - DNA, 578 bp, Cannabis indica
atatatattacaataataataaattaatatacctgattttgtgttctatccgagatcttaacaacagtgtaggtggctgccccagctaaagcccctagtggtggagccaccaagtatatccacaaccctttaaaattcccagctgcaattgctggacccaggctccgtacaggattcattgacccacctgttgatttcctgccacgccaactcagatttaaatatctagttgtatatatcagtacttataatttataactcttgtctgatcgaataagccatgcatgcatatagataattatatggtgattcgaaggtacaaaccctgatatgagaacattgaggataacggtagctccaactgctattcccgccaattctcctgcctgccatatatatgtatccctcttaaccattagaaatgatcaaaagatgtttatatatatgtatttatgtacttaccgcacgtgtgtcggtggagacagcggtgacaatgaacatgaggaagaaggtgacgacaaactcgacggcaaaagcttcgtgaagggagacagtaggaagggtgagtccactggaca

SEQ ID NO: 187987 - DNA, 1784 bp, Cannabis indica
aaaagtaagagaagggacagatgatatcatatgagaggaaccgtacatacgtaatatattctttgtcatctaacaatggagccaataatcaaaggtgaaagcatacaagtcaagctaataaaagggtctctgcccataaagagcattgatttcaatttgtcaaatttactttgcttgtggttccattttctcaaacatatctatatacatcaacatgtaatagtagatatatatggtaaagaatgattatatatatatgatcaattttgtaactatagtacactactgatcaatatggtttaatattatatatttaatgaatgtacatgtatcacgaggaatattctacagttaaagagtaggtatagtttattgagtacacagtgagtaagtcacatataaatctataaaaacttttactaaaggcaaattaagaatgataaaaagaagtaatatgattgagacggaatataagcaaagcccatatccgaaactttgacaagtctagaataatggtacttttaaaaggtaactaaacccagtttgaagcaaggtaccaaacaacagtctagtaagtactacactttttttacccttatgcatgcactatataaaggagcgtagaactaaaccaaatggcaaccaaacacaaattatcaattcttttcttataatatcttctagtattactagttagtgtctttgacattcttctttgccaaagccaagaatggacacaaagaccacagctgcccttccaccacaaaatctggcctcagcctatgcagttcctcaaaaccagctggcctcaacaccagcagcagcctctccctatgcagtgccacaaaaccagctaacaacacctgctgcatatgcacccactgcggccctggcaccaactgcatcacctcatcatcagaacctatcatcatctggggttgcaccgcaccataacctagccacctcaggcattgttcctcatcatcagaacctttcatcgtctgtggttgcaccgcaccataacctagccacctcaggcattgtgcctcatcaccagaacatggctgggtccgggattggtgcgcctctccagaagattggtcatgctgctgctgctgctggaattcttccgaataatgctgcacgcttttgggttcggacaaccgagctgctcgctcatcggggtttggactggatggccgctctgctcgtagcgcacttggattggatgggcgtgcttctcgcactcttggacttgacagccgtgcagcccgtggtggaatgtctgatgagactgaactgagcaagagaattatggagcttcatgagtctgatgaacatggtcttgctgttaagcctgttctgaacgtcatcgatgtcatttttcaccgcgccacttctgacctaccaggattcactgaggtacgtattacatattacattataacttagatataaagtaattgttagagagttataattaatttgataatattatttataacattattggctgaaagagtaacacacacaaaaagaaaaaaataatagaaacaaaaatctatacccctttatctaattttcttagatctatggctcgctaacaataatctatattatagagtcttaacacttccctttttactagtaacaactatatatatatatatctttatatattaaaagtgtctatcttatctaacgacattttttggtttaacacaatatacttaaaaataaaagaatattctgttaaatttaacgattaggtttgatctcgcgtt

SEQ ID NO: 187988 - DNA, 1924 bp, Cannabis indica
ttttttttttttttcatttagggtttttatgttcttctttattcctctttggttttcttccaagaaattgacttgaaagataattacatttagtgcagtgggagcttgggcttaagatgacatcccttagaattttcaagattttcatgaatttgttgttttctacgggagttagggtttataagcttttgttatcgtgactgtatttttttttattcattgtgttggatgagaaagtagtgaaaatgaaaacgaaaataagtctcatgctttactcgtttaagatttatttcatgcttaaacctttattttaggatttttcgtgtacttaatagaattcttggtgaccatatgggttatggttttctagggttgcttacatgctgaaattagcgagaaaatatagttgattttttgtacaaggattcgtagagatattgctgggtggtatagcaggttttgttgggctatgagctttaatggggaacgttacttcctagatatggacaagctggcaatgtccttgatttattggcctcttccacagttttacttcccctttccttgagagaaaattcaaacatttgttgatctttttgcaggtttggcactgtcgcaggctctgcttccccaaccccatctgctgccgctggatcagaggtgtcgaagaaatcggaggagcttaaaagaaaagctagagcagagaggttcttttcaatctttttcaagacacctgtagttgttatatgtcgtactatctaataaccttcttaacaatttttttcttgctgtataactgtaatgcttgttttattttctatattattcaggtttggcattcctagtccgacagtaacttctgatgaggagagcaagaagaaggtaacttctgaccaggaggccaagaaaaaagctcgccttgcaaggtttgcacctgcctccaaaactgaccctatagaagacgacaaaagaaaagcaagggctctcaggtgaggatatctgctagctatgtctccaaagtaccatttagataattttgtaatagaggatgtgtttattatatttatttgtgattattgattttaaaaaaggttctatgtttttatgttgtcaggttttcaaccaccccatcaaattctgttcctcaagtgaatggaaagtccaacattgagaaggtcaggtttctttaatttgtggtgttgatgcaaacttatgttgtgaagtcaaagccaatactgtgatgttttttacttttgttatatgcttagagagtgctgatattttcttatttccactgcagagtgcagctattgctggcgaggctgggggagattgaacatcaatatcttccttagatagtaagatgacttgttcattgcaagttttggtagttagtgaccctagtctatgggttatctaatcttattgtcactgcgtatgtaactggattttatcagctttgttttaattaaattttgtttctttatgacaggtctaggtcctaacagtctggattccctcatttttttctcgtttactatgtgtcttgtctgcttcccgttatatggatactcatgtgcagcctttccgttgttggataccttcaccaaagtaaatttaacaggatctcggccgcagtaggagttttctctcagttgaatatgcctgtcacttttacccagtgaggtcttgaatttagtaacacctacataaagttagcttatcttgcaatctattaagaatatcagaaattcagaaattaacagtaggacaagttgtgtcaattttagctactattttggttagcttactcttatttttggttcacctcattcatattattcacgtgcatatcatcttcggcaacactctcagtgcttcatagttcatttagattcatatccatgatgctgtgtggtgtaat

SEQ ID NO: 187989 - DNA, 1303 bp, Cannabis indica
agatgaagccaaaaaccaagtaagcaattttctggaaaaaaaaaaaggcactttcatacccagtgtttttgattcgtgaaacttgttcaggagacttaaatccagaccaatgggacgagagccagtctcttctttgtggaatataatctttgctggccaagaattcttcattaaggattgaagtaactttctgaaatatcttatcaatgtcttctttgttcacttgcccagattctaacaacttattttggtaaagctgaagagctgtgggatggctcctaataacctgcaatgtaaagtgaaaaatgtcaggagtatggaagactcgtccaacaaagagaaccacactcatcaaaacattagctggaaaaaatgcaaaaagcacaagaattaagaattattataaggaaaaaaaatgcacatatggaaaggggaacaaaaaaacaaaggcttcccaattgttttccactcaagtaattatatcaagctagaccaaacaggagcgaaggacaaacctggtacattttgggctgagtgaaagacggctcatcaatctcattatgcccaaacctcctgtaacagactaaatcaacaacaacatctgaatggaaagtctgacgccactctgctgcaagctcgcaaacatgaacaactgcttccatgtcatcaccatttacatgaaatataggagcatccagggcttttgcaacatcagtgcagtactgcgaagatctcccagacattggatcggttgtaaaggcaacttggttgtttattacaagatgaatggtcccaccagtggtgtagttcggaagggcgctaagatgaagagtttcgtagacaacaccttgtccagcaaaactaccatctccatgaatcaacacacccatgttcttagttctgtcaacatcatttgagtaatattgttttgctctagtttttccaacaacaactgggtccgcagcttccaaatgacttggatttgcaaccaaagacaaatgaattcttttcccacctcttgtaggccgatcataagaagttcccaagtggtacttaacatcaccagtacctgtgtaaagcccaacctcgtcgacaggctttatgccaccactaaattcactaaatatttgacgaagaggctttcgaacgacattacccaatacattaagtcttcctctatgagacattcccataacaatgctctcaaccccaagatctgctgccctgtcaaacatctccttcataccaggaatcaaagtctctgcaccttcaagcccaaatctcttggctgttgtccacttag

SEQ ID NO: 187990 - DNA, 4301 bp, Cannabis indica
atatatatatatataatttccttcaagtatatatattggaatttaatgtcacaattagtgtttaggtcttattgttataattaaagtcaaattactagaaaaggactcttaacactaataattaggagagggttaggtttgagctcaaaattattaaatgagactagagaaaacctatataaatagttaaaatatgtgcatatgacttcattatattcattctctacttgatcttttctatagttatttagcagttgcttaattaatttctctttcctttatacacgtagttatataagtcaaaattttctttattaaagctattatgttatctctcaaaaatccgacgtaaatatacatgaattttgttcaagatatcaaggaagttagtaaacgaaatggatatcgtgaagacatggtactacaggggaagaagcatcactatgagtaaggccaaccctactactagctagtagggttgatggccctacgtaccaccacaagaaaggccgatcttgcatgaccatggacatggccaactcttgtgatgggacatgctctcgtaacgggacacgttgtcgtgatgagacacgtgtctgagacgagatacaacttcattaattatgagacaaacctccgtgataagacaagactgaccctctgtgacagataccacaagagccaaccctccgtgaccagccacaaggtcgagcctttgtcatgagcgacagtgccaaccctggtggttcaccacctacactaggtgctcgtggacatgacgctggcgagatacactcacgtgctaggtcacgactcacgtgtcactaggcggcttacgaaatattctagatgcatctccaaatttattatttgttataagatatctattttaaatattaattatatttttttattataattgaacttataaccctagttaagtaaaacatgtatttggttaaaataacccctaagccatgctattatatgttagcctataaataggtcactcaatcaattgtaagaggagactctttctttctcactctgaaataactctgaaaaatagtcacttaagaataaaattttcaatgaacataattctagagaattattcttaatcatatattgagattaataaaattataagtggactaatctattaccattgaaattggatgcgaaccactataagattcaatgttcgtcattgtcaattttctttctacaacgatttatattttttaatttgtttatcttacttatttacgattttttttaaatcagttaataaaaaatcgcattattgaattccataaaaaataaaaaacttgatgataatgcaatatactttgaggagaaaatcattaattacctaagtaaattgtatagagtttccattattcattctcttgagagacaattacctaccaaacaaaaataagatcatatatatatgatctctttcttaattaattgttaattttttctaatacataaacatgtagtccttttcctttatttagtgtaaaaaaagtaaataatattaatcaaataataaacgcattctttatctgttgtggtatacgaatagggctattcttcttatccaaccaaattcctgtggcttttgtttccaaaataggctgcacacacacatacatatatacataaatataaatatattatataaaaaaaataattaaatattagacatgatcatgatgaaaataattttatattcacttacatatagtataagaaatttctagacccctaaaaagtcgttctggtagattctttattttttagactaattgtttttttagggaaattacttcatatataattttgttaactttagttttatcaaatttacggtttggatttctaaagtagtttctccggtagtttctatgtgggttgtcatacggattttagttgcgatttataagttgctccggcagttgcaatagaggtttctatgtagaatttcgtaaaaataatacaaaaaaaaaattgttttgaagtgtaaaaatgaaaaagcccttttttttatgatcgcaaacattgtagctatttaaaatcacttgtaaatttttaaaaaaatttgaataatttacagtgcaaaaaataaagtttaaacagttatataccacacgtattagaaaagcagtcgcagttgcaataaaatatgtaaattttattttcagcattgtaaactatttttaatttttttaaaaattcacaagtggtactaaataactataacgtacataaatatttaaaaaaattgactaaaaatttctcttgtataccgaaacagattaaggatctgccaaaacacttctttaaaaaagtgcagtgtatacttaccctataccctatagtaagcataatttttatactcatatcttttagaaatatataaacctagctagtaatctattttggtataaataaatatatatatatatttatacctcataattgggaagcttgacaattttgtgctcaaagtatacacgagcagctgaaattctagagacccttaccttcaccacaaatttatctccactctaacacaaaacacaaaattaattatatgattaataataataataatagattagacacatgcatgctcaattattattatattaattaggtaattaattaattagacatactcttaaaggtgaaatgaatttgattgacaaatctgaggtggctaatgtttctccattgcgagcaactgaatcacagcttataccaattacacttgccataaactcatgagtacctataattatatatataattatcatgtgtagcaaatcacaaagctagggcatgcacatagtacgtaatacaaataaactttatatatacatatagtggtgaactagacctgtgcttaaggctcacctaattaactcagagtaaaaataaaaattgtccacttttaaaattgtagttttttttctaaatgagggctcaaattttttttttctatggcccattatatttcaagatcgatgtacatgtactacaaatcatttatatacatagtagaagagccagaataaaacattaaaataaggctataatataagttttttacggctaaatcctctcaattattattctatttgcataaggttaaattttggtagtaaaaccctctaaactactgaactgttagcaaatttaagtgtcatttattcttcacagttaactgagatggactacttatgtgtatactcttgtacatgtgacatatttatattagtacacctaatattattatttaaaaattataaaaattattttaaatattttttatttataaatattttaatttttatttatataattttatttaattttaaaataaattttgaaataataatattagatgtaccaatataaatatgtgtttagtattttgaaaggttttaccgccaaaatttaaacttagaagattaagtgtcattgaaacgataactgagaatatttagtcaccaaaaactccgaatgcattgacagtatataatatttagaataagcaaacatttattctacatagttattttttttatataaatttcaaattgtatactttaaagaaaaagcataggcccgcaagagcctcacctccttcattggatctgccaccaatgacggaggcacacgtgaagactgggggcctagccttccctaagtcaaatttttgtttttatatatattcatgtataataaatgcaacaaaatatatataggtattaacaattagcccccctaaactagttttctcacaatttgcccccccataacacaatttctctctccatcattgtttatcacgtagcatgagtaaacctagggcctgtaaactagggttgcgtgtgtgggagatgaatatatgggatcgaatctcaagtgtgtataactcaaaagatataaaatataaagacgcttctaaaaaaaaaaaaaaaaaaaaaaaaaacgaaaaactaaggccatgcaacacatgcacagaacaattaaaagtaattacgtaccatgttggcaataacttgcataaatggcattgtttacgacaccaaactagatcgagctcataatcacgaacttcgtagctcaatatcaaataattcatcatttcatcttcattcttcttctattattatgcccactctctcttcacaatttttgggttattataattatcatcatcatcatctttacttactattcaatttctacattaagtagtagtactaccaccatcacatgtg

SEQ ID NO: 187991 - DNA, 2011 bp, Cannabis indica
tgttctgttcttgtgagatgtcacaaccactttctccagtttgctgctgctcttttatcaccagacaaaaatcgtggaaggcttagcagactgttaacccgagtaacgccttccaaagctgaccactcctcatcgtcatctgcatttgaaatgaactcagctaggcttctcctagattgactctttgcaggaaacttttcctccgtcacatctctaacaggtacaatctcactagagcttcctatatttcccgaatggggatcaggatcgataacaataccatgagaataatcaacttctaaaccttcatcagctatttccattgctccttcatgattctttgtcctatcattttcaataacagctgcactgactggagacttatggtctagaaatagacaaacaacagcacaatcatcatttttcgacgtgggatatttaagcttccaggctcgaacagcacagtccaccagagctcttgcagctgttgcgcgactgggagctgaagcaacaatttctacagcttccttatttgataggacatcccaaacctgaaatgaaaggagttaattcactttgttatttttagcactgaaaaagaaacatagaagagaaagagagagagagagatataccccatcagtggcaagaataatgaactcatctctttccgtaagatggtgatagtaaacatctgggactgatatcaaaccgaaatccttgagacagaagtccccgaaagctctagccattgccaaaccaggtgagtcattattaggcagccagacacgcgctacctcgggctcatcctgcaatgcaaatacccttcctttgcattgttggatcctagcagcttcacctaatcaagttgcatagaagatagtacaataaacaaaaaagttgcacaaatgttcaaaacagagaaaaagggcttttatgatttcagttcatacaagataaattcaaaccaactttaaaacatgtagcataatctaaactactaactgttgtctcttgcagtattcattcatagagatgaataaaattataatgtacacaatcaatcatattcaatatatgtatgaggtaatagaatgagaaagagagagcgaccaggaagatcaggctttaagtccacagttaactgtacagcaatcaaagtgtcgtgttgatcccttgttgccattacagctctggaatccccaacatttccaagcacaagatggtcaccctgagaatgagaagccatacaaatggatttgaattagttttaagaaataactaaatattccaaatgaagaaagagaagtgaatgggtgtgagtgtgagtgtgtgagctacctgtttgactaaagtaacagcggttgagccactgcagaagcagtcaatagtaggatggagcttcaattccttatccattaacttgaaagctttcaagaaagcatttttaagaggtggatacatgagtgggagtgattcatcattgttattattgttatgatcatgctcattgtcattgcaatcttcttcctcttcctcttcttctttttcttcttgttcttgttcatcaaaggtagcttcccagtgagtagagagtattagaggaagtgaatcacggattttcttggataccatatgaccgtaaggaccatgcccatcaaataccccacaaaatacagtatcactacgcccactgaaattctgtttacatatatataatatggattcaatgaactgattttcagaaaatgaaattggaaaatagaaattaaggatgatttgatttgttacctcccaaaagagcatggcgtcttgattggttcctttcttgccttgctgggtatgcaagcatgagagtttagaggctgaattgaagcacatccttccagggatcccaatcccaatcccaatctcaatcccaatcccaatctcattcttattcttattcttcttgatcttattattagtagatttggaataacaggaacccatggattattattattattat

SEQ ID NO: 187992 - DNA, 6585 bp, Cannabis indica
tatatcagtggcatcaatccaagtcttttaacaggaaaataaagcacaatcatagagaaaaccatgatattcttggctacacatagccacatacacatgagtgataagaattactttttttttcttaaaaaataaataaaagaaatatgccaaaatgtcacagaaaaggatgcttcctcagctcttgatgagaaagtaacatatatatatatatatttatatagtaggaatatgtatgtatatattaattagtgggttttattattattagaggtcagagtatataaatcttagactttctttaatccttatcagaaacataattattatagttcttcatcgtgtagcatcaaaaataaatcaaatagttgataatttgaaccaagattataattaggtgttatagaatggaaagtcataatgtgaaaatgaaacaaataaatatatatatatggatgagtgttgagtttgaattaagattgcttatatataggttggaagaggtgatgttgttaatgtcaagggaaaattggatcatttcaaaaaggaaaatgtgtcattgaatagacttctttggctatataaatgagaccaaccaacataataagaggcaatgagataagcattttacaattttgcattatataataaaattccaactacctctatactccatattcttttttaaaaaagaaaatcattcattgggtttgccttctaggatgggctaataatatagccttaaataatgaatacagatcaatatgggaaagaatcatgattaagatgagaagggtcaagagcactgaccatgataatgggtttgataagaatgcaaaagaggtgtcttaaacaaaacaaaacaaaaaaaaaggtgatggtgagatgagtagaaccattgaaattgaaagcatttgacagccttgtttcaaggagaaaaaaaaaatgagcttaaaaaaagtttttgttttccaccaagaaagttggttttgtgggttgagagagagaagtatataggaagagaataaagcaaagggaaaaaaaaaaaaagcactatctatatcccaattggaggggaagagaagaaacctacaaaacttaatggctcagaaaagcttttgcctctccccaaaataataattaataaaaatcagaaagatgggatttctatgtcataatgttatgtgtctttagaaccccatttagctacatttctcctttttcatgaagatgccagcaaagggaaagctacctcttagaactaatatgactttgattcaaagacaaataatggattaggaaaaaagtttggccgcccataattaagattaatctcttgttgttattattattattattactaatgtcatacattaatattgttgttatgtatgtataatttcttattggggttttacttttgagggaataaaatatgcccaataacttattgcaatgttggaggaataatcttaaataatagaggttcactttcttgagtgaggcatccaaacccacctctaaattggacttggggaaaagctataatattctatatggaatggagcatgcttttttgaagagattattgtggacatggaaaaccacatattgctacattcgtgtttcttaaaagggttgaaaaataaggtatcaaatagtgagttataatatattatatatggtctatattatttaatatttgtatatatttgtttttgtgtgaaaggctggcttgaagtctagctgttgacccactttcttagcccaaaagaactgccctaggtagatttctttttcccacattttcttctctttttttttcagtttttttgggtggaattttcctattccaacctaaaattttcataatggaacggcttgtttttaggcctatacaaagacaaaaattaaagtagccattttcagtattgaccaatggaaggaatccggtgccaccagaattgatctaataatagttgttaagactagttgaaattgtaataaatttgcttatctttatacgtatgaatacaacaacatgatcaaacgtcactaaattattagaatatgggttcaatattctgctgctgacttttcatttggcaattattaagcttaaaaatactggtattcgagtacatcttattcttagagaacaatgcttcattactttggaaataaagatttaagagattgaaagtaaacaatgcattgagaccaatatgacataataaaatacaaccccattgttatgatgaatatgtacccaattcaccaaagaactaacaatttactcaaaacaagtattgtaacgtatcaaggaattaatgagaaaatcaatgtatcttcaaacagaatacaaattggaggtaattaactatttataaacacattaatttatggaactaaaaacatatgcattctaaaatgaaattacataaaaattgtgtgcctcttttttttctttcgttttcctaaacctataaacctcccaaattggctaatctacaatccaaatcttgttccaagtcttatcttatctctaagctctaattatagactttctattccatcaagggaagagaagtgagcatccacatgtcttagagtttcttgatctatttcggttggagtgatcaatgatggcaatgaaaagtttacttctctacttacttccaaatcatttttgccagtctcctcagttaatgactttatatccctagactctaattgaatttctttattatgatgattaaaaagctgagattttacctccaaacaagattttaaatcctcctcgtttcgggctttgtttagcttgtcaacaagctcatttaaagttgaagccctttcagcccacaaatcttcttcacttttgggccctttgtccaactcctttggatcaaccggtccattatcacagccatccaacccactcttctgaagcttttttaatcctcgatcaacaatttgatgtattctctttctgaagttactagttctcagagggttagacctcatcttcaacttcaaacctgagaatgcagcatcatagccatcttccatcgaagcagggttacggtttggtatagatgactcatcgtcatttgatctgtcgggactacttttcactgaaaatagttcctccaataagttgacattttgcatgtaccgatcaaaagattcattttccacttcaatacttctttccttgtattcttttaacttggaaaatctccattcatttatagctgccgcatcctgaaattattttctaagattagaaagaaattgtttggtttagaaattttttttactggtttattattaaaagcacctttctagtcaatggcttccttgatcggacagggatttgcacgttactgaattgagaaaaactgcttgaaagatgccgatatgaagccactctatgtgaattcctgaaacagaaccaaagagaagaaaatcctaataaaaaacagtggcaaatttgaatatatattaagaaagaggcaatgtaacaagcaattatgatattagccaatttaaggaagcattagagctaaatacaatatgctgctgcaaagatgaaaggcaaggctatgttcggaactcaccctgatgacgatgcgtcagtagactgctggtcaaataaaggcgaacttgatgttggtgccttatcaggaaaagtggcatttgctttcaaaactgcagtcacaatgcagattaaggagaagaaaaaaacaaatgttgtgatcttcaaaaaatgacaaggtaattaaaaaaaaaaaatcagactcctacacaactctcaaatatgaatgatgatgaaaataaccgctatttaaaatttgaaatattcttcaataagcttttatcaggaactatttcaagatttttgcaatttcttaactagctatgtaattaattgcaaaatcaccttaaatttagttgtttaagtgtttagataggattttgcaatttactttatattaataaattatctaactatctattgctctctaagagtaatgatatgtgcacctaattgatatcaaatctcctgtaattaatatcgactaaaatgtttccacaattaagctacagacatctaaatttcaatgttttttgaaaaatattttcaattaaaagcagactgtaaaatgtattccaaccaacggcaactcaaaatacattaccaaactcatttaccaaacaagaaccggatatcagtgccagctgaaaggtggggcagcaagggccactgccccaggccccagcctaaagaggcctaaaaaaatgtgtgaaatctcacacacattcataggcccaacatttttttttttaataaataaatgataagaggttgagtaattggaacttagagttccaagaggccaaccccaataaacattaaaaaaaatgcccaatttactaccttttttcttatttattttatttcaaatgtaaaaatcagttgtataagggttttttttaagccccatttaaaaattttgccctcccctcaaaaataaatgttatcatattatgactatttcttcattggtgtaaattttaccctgtgacaccgtcaacaaaaaatatacatccagagaactccaatcacatgaatatagaaaccacaatataattatcaacaaattcaaacaccaacataaacaatgcaattaaataaaacaaaatatgatttagcatataccatgaatatgacatggattttgagctttggcacagcaactcttgcatgattcatatggacacctgcacagttaatttatctaattataatccacatagcagtaccagccttaagatggtataagtaactgacagataatgtgatgtgatgttcctcaagtaaatactaacaccaaatcctacatattcaacaaccagtggaaaaaaccaataactgaacagagtttgaagtaatgaccatctcagtaagtgcaaagctttggaattgactctatctgataaaaaaacataagcaactcagctcaaactgtgaacatgttattcattgtcaagaaaaactgaaagtacgagacttgcatctatgccctaaggttacaacttgcaagttctccacaactgtaaacatttctttttcttttaaaactacgatcacagcctaaccgtacaatatttgggaaccaggaaactgtagcaattgctatgtggctaccccggagaaactcgaacattagacctggtgggagcaaaccacacgcctgaccagtactgtgaatgttaaactgatagttgatcatcaacaacaacaatctactaaaaacctgacctatgcttaacaccaattattgatggtatccatcatacttatatcttgtcataagcattgagcacttagctattccccctttctttttcttctacaaaagaattaacttgtcctatccaaatccgacaacctcactatacttgaaacttcaataattgaaatctgctttaatttgtttgaggaatacaatcagagaatgtaagaacgattctgatctgacaatagctacctcaccaaacaatgtatccatctattgattacagaagatatttaaccctgatagataatcatattttccccatcgtaaaaaacataaacctaaaacatgtaaggcatcagtaatatagatattagatattcattgtctcattctagctatgtcttacatcaaacttccatcttttcgctcagtaaactagttacgagtcatctgacaacaaactttcgaattgaaattttcctacttcttaagactctaattctcaggaccgtatacaacatctatgattcacaaaaagctcacgaactgcatcaagctatctcttagtgtaaaattctcttctagacacaatgggtcgtggacatttccagcgtattcatacaaatacgcaagcaatctgagctactttccagatcattttagcacattgtgagcaaggatatgcaagtccctgtatgccatcatttccgataactacagattccaatcattatgtatatatctctgtcctaaatccaaaaccaagtagaagcctaaaagcaagttcccactaaattctaaatacaacttcctacaaaacagcagaacgaatctctagggttccagaaactccttcactacaatcaagactccaaaataacataacacaagaaaccaaagaagaaatcaattaaattaattacctagagcgagcgacattaccacactgcttacacttaggcttattaagcccgcgaagagtcttaggcggtgtgtccgtacgattgacggtgttaacagccggaatgacggagggaacggagatcggggcagcaacagcggcaatagcagtggcagtggcagtggtagtggtagtggcggaagatggaggtatagaaagtgcaacggcggtggaagcagtagtggcggtgtcggaggagttgttgcttagggctggagaagccgccatggattggaagagagagggtttcaatttcaaatcaaattggggaccgaaaacggcgccaaaaataaagattaataaagcattcctattatt

SEQ ID NO: 187993 - DNA, 963 bp, Cannabis indica
gtactagtaggggtagatcctgttgcagggtctagcgtagacaaccgaactgaacctcacatccttacatacgtgccacgctccttagatctgggtattcctgtggcggttattggtacggggctcggctccgagggtagattccctcttatgccgccgtgtgctccaaatggggtaaaccatgcggagttcttcaacgagtgtaagcccccttgtgcatattttttggccaaggacttcggccacatggacatgttgaatgataatcctggagttattgattggacaattgaacattgtatgtgtaagaatgggacatgtccaagggatcttatgaggaggtcagtgggtgggattttggtggcattttttgagggcttatgtgcaaggtgatgataaggatctagaagccatcattgccgatccaagtcttgctccaacgactcttgatcctgcattcattgttaaagattaattaatcgtcgtacttgtcttataatatatatcagtatggtacttatcaattctcagttcaataaatgagagtgcattttgcatgtcataacgacttaattataaataaagggctagtttggtaggccgagttgtattgtattaaataaaaataacactatgtttggacaaaacaatatattgtattaattattacgaccaaattttttaatacgatgtattttgtttaaattaatacataataaatcgtctgtattagtttgtattataatatttacaaaggatttggggtcaacaccaatctgacccggactcggacctgaacccgagcccgaactcggacccggactcagaccgggacctgaacccggacctggactcggacccggaccccgactcgaacccggacccggaccccgactcggaccccgacccggacccgaccctgacccgggacccgaaccccgacccggactcggacctgaaccc

SEQ ID NO: 187994 - DNA, 1656 bp, Cannabis indica
tattttggttgcttcatcagtagctttactttccctcagcattgtaattcttatatgatacattatatatacagtttatgtaaatctggttttgaaagcttaaacatctaattatggattaagtttagatctttatatttcttttcaggttgatgccaatggtgcactttcattgaagcataaattgtgtggtcaccagaaacctgtgtcttcagtatcatggagccctgataaccgtcagctgctcacatgtggtgtggaggaagctgtcaggcgttgggatgttgcttctggcgaatgcctccatgtttatgaaaaacctggtcttggcctagtgtcttgtggatggtttccggatggaaagtggatattctctggtgtcaatgacaagagtatctgcatgtggggattagatgggaaggagctggagtgttggaaaggccaaagaactctaaggatctctgatctggaaataactagtgatgggaaacaggttattagtatttgtagagaaaatgcaatattactgctcgacagggaggctaaggttgagagatgggttgaagaagatcaaacaataacctcgttttcgtatcaaaggacaataaacatttgctggttaatcttctgaaccaagaaatccatctttggaatatacaaggagatgttaaacttgttgccaagtatacaggtcacaaacgcagtcggtttgttattaggtcttgttttggtggaattgagcaagcttttattgctagtggtagtgaggattcacaggtagtcaatcggttctcctcatctttctgtgtcaaaattgcttgcttatatatatatttgtccttttaagcctgagcaaactatttcacccatgaatcaactcgtttgtatacattttcttgtcaagtattcaagggccaagtcaccttggctattaggctttctgtaacccttttctctgagagcagcagttctttctagctgcatcagaatcagccatctatgttaattactttcttaaatcacagacaacaatacaatgctgaactttaatattaaagattatttggccacatgctaatagattgctattgcaggtttatatctggcacagattaacaggagagctcatagaggcgttaccaggtcattcaggcgccgtaaactgtgtaagttggaatcctgtaaatcctcacatgctagcctcggccagcgacgatcgcacgatccggatatggggtggtttaaacactcaaaatgtcaagtgtggtggttgtgatggcggtacactcagcaacagcaacggcgtccattatagcaacggaaaagcttgaattgaagtctgataaaagcatatatctggttactatttctttctctgaccattgctttcttcattttatgtaaatacttttatcatttgtcaaaagaaaaaactgaaaatcagacattcatatcaaacaagcttgtggggctgtgtagcaattttatgataataagtttttttcttttatttttctttggagtaatttgcgttataaatacgtaagtttaactctttgttacagataaatatttaagtttaatttttttgcggtaataacatataaatttatttttagaactttcgtaattaggtggcggttgagaagttattat

SEQ ID NO: 187995 - DNA, 2309 bp, Cannabis indica
aaaataaaaaattaatttttttataacgatgttctttattgtgacaataagagttttgtgatctgcaagggaaaagtttaggggttgcattgctttagaaatgtcaagtgagatgattctaaaactatataggtataagactacagaattaaagaagacttaaataaattgatgggaactacctatatcagcaagatgcatcttttttttggtagtcatctcttaagaattcgaaaattagcgtaattattatggaacaatcttaggatggatggcatctgaaaaatgtgcaagtgaagacaaaacattgctggaaagactcatgttagtttgtaagcgatggcgtacaactataattacaacatcatccttataaatttttaaaaaattctgaatagtttatagtatgacaataaaatttttgacaatttgtcactcgtgttcaaaaatttcaaacctgtttttgacactataaattattcaaaaaaaaattataattttcacgaattacattataactataacgaataccgccatgaaaaaaatatttttgtatatattttcgaatgcgagtaagaaaaaaattataattaacactatactttttatatatatttggagtttggaattctactttaactagcattcctttcttttatttactttgactaagaacttgatgatgtttgaaaatattaataataaagcatatcttatatatataagtaaatattttgaatgatgtaccacatgagggtaagaacaagaaaaagtaaagaggagatccatcacaacaaatagtttccgtaggcattattttatatagttagagagagcatctttgatttggggttaaaagaaagtataacaatagaataataataacctaatatatatataaagttgtattataatatatagtggtatactataacacaaaacaacataacacaactcacccatctattttgagtcaaattcacaaaaaagtagaggacaataacacttatgctcttttcttaagtttcaatactacaagtcacagatcattagatcctagccgtccatttaatacaaatcacaacactatagctggatcccagttgtccaatgttgttgctttgctctagtactataaatatccatgacatctaaaatagtttccataacaacaatataaatatatacgtactaataataactatcattcattcactcaaaaacatacttcttttcttttcttagggcttaagaaaagttttgaagaaaaagaagaagaagaaagttattattatggggaggcatggaaagtcttcttcatcatcatcactattctcattatgcagcttatttagtgcatgtttttctagtggtaatagagatgatacatactctgaagaaggtgtttacattaggagaagaatatgccctagcgaggaagaccgcggcgggtggattgctgagcctggcatcgaccgaaaggcctcggccttcatcgctagattctatgaaagccgagtttcagaccccgagaggcaaactttgacggcctaattaagagaagagttttttgagtaatgatatctgcacaaattatgcaccaaaacattacacgcagtagtaatgtgatcgtctcaaataaatatgattggttcataattttgttgcatacataatatcattactcttataagaaaatcattagaggcagaggactctctgccctacttgaaaatcttatcacttgatcatatatcatattgtattgtttcccacttagaaaatgtagtaatctcataatttttcaaagctttatgcttcccaattttattgttatttattttctcttttgtttctttttcatgttatatttttactttgcaagttgttcttctaaataatgcagacataattaataataaaaatagtacaccttcttttttccaatctattattgtgtctttttgaattattataccatgttaaatttagagacaaaacacagcccaatttgatatatatcatcactaagagtgaaatattttcttctttgtatatacatatatatacatctgtttgtcttttgaattatacacctagattaataattcttcttaaatttgacgataaaaacagcccagtttgaaaattatcatcactaagtgaaagagtaaaaaccagcatagaacacataataagatgcatatatattatgacagatcaaaaacaggtatttttcatgcatgggactgaactgaactcaaattaaagcatatattttctaagatattagaattattatcatcact

SEQ ID NO: 187996 - DNA, 3296 bp, Cannabis indica
cttacttacttaaaaaaacaaaaaaaaaaaacaaaaacaaaaaacaaaatctaggttaaaaaaaaaattataagtaaatatatgatgagagtaataataatgacacgtgtgttcatttgattggtgaagtgaagaaacagcagggaaagtaacaggaggaaatagagtgcttcacatagacgacgcacctgtgccacaagacaagcctatttctctttcaactcaatcatccaatattgagctccatccactcgtatctcgctatctctccctctctctactctctcagatcgctctcttcggagctcggatcttcatcttcttcgccaatggctgccgtattcgaaaccctaactgttcctcgctgttctgctctgccttcccgcgctctctctccgattacaacctcttcggcttcttcactcgccgcccgccgggccttgccgcaggtcagaggcctcaagctcacccccactcgctctctaggatcggtcagttccgctcctagttcgaaaattactcgtcgcggtggactcgtcgtctgcgaggctcaggataccgctgttggtggtcagtattctatgctttacattttattccagtgatttctcagaattcctgtttttgtattttacactagctcttttatccaggaaattaggaaatgataaattctcctcacatatcttttgtatattacagtttttcatttcccaattttgatctagatactggactttttaagtgttaaaaatattcaggcaaaatatgcatttttatattaataattgttaggattgaaattaaatttttaattttgtaaacacttagaaatttgcatttgcatacatacattttcgatcatatcatatgtacgtgtgtactatcaatgaaagcaaggttagaaccaaagtaataggcatattttgaggaacatgtcttagagattagttacattctttttgaaaacttcagcggctcctgtaaccgacgcatcgtggaagtcccttgtgcttgactctgaattccctgtggtcgttgaattctgggcaccctggtgcgggccttgccgtatgattcaccctatagttgatgaattggcaaaacaatatgctggaaaggtcaaattcttcaaagtaaacactgatgagagccctacaatcgctactcagtatggtattcgaagcatcccaactgttattatgttcaagaatggtgagaagaaagaggcaattattggcgctgttcccaaatccactttaaccacaagtatagagaaattcttgtagaagtggtaagaatgcctttgtcaaaactcgaatttaagtatgtacttgtagtttttgcttcgatctttttattccagattctcaactctagctgttttgcataataaacgcctctcttgtacagttatttgattcaacttttttctgtcttcgtaaaatgctagctattagataatttgtcgattaaacgctatttctaaattattatgttaaaataatatatctctttaccaactacactacttatgttatgttcatgtataaattgatgactttagtaacttagtaaagctcttgagcctgtttgaatcttgtgaattagtgaatttggggtaacattattgtgaatgttgactgactctttacatggaggaaaaaatattaatcttaagctaatgtagaataaaggagatcagattggatagctgttgaaagtggagcagaagatggggattgtttgggtgaagttttattctatgacgaaaaaccaatgatctttctggtcttcagacaaattcagaaacagcttaaaagagtataaagctgaccactagggtgctgcatattatggagtgattaaactgatatttgctcaagacttcaattgcattgacaggaaaggctggacttttagtttttccaaacacgtttagacttcaaatctggactttactattaattcaaagatgtttattagtgtttataaaatttccacaaaatctctagttaaattccagtatttctctgagtttgtgcaactctaactcatttgctcaattcagaaactctctaatttggaccttcacattggcaaccatgtgtactacttgtcctctgtctggatggttcattttggaaaatcggcatatacataagtcatagatgatttattagaaccccagattagttgactgagcaccatttattagcacttacacttcccaaccttcctttcaaccgagctaatatttctcgtctatatcaagtaaatgcaaaatttctaagcaatgtttctagaatgagatgatgccgtagtgtatgctgcttctaatttagtgtgatgtatttcaattttctccatcaaagttcaaagattggcaaaagacaaccagtatataattattttacgttccttgcagaaacaatggtataaatatgtgcacgtgtttgtaaatgtcaaaatgatcaattcaacataagacatggttcaaacttcgaagattcattgaagaattcccatgtcatagtcaggggtttgctgtcttgtttctagtcgaatttactaatccgtaatagtcacaacaggatactatgaccctggccaaacccaatttagcactctttttcattctccaatggtacaaagaatattttatattgtctcttaggatttctcttcttatatctttagtcattttttctctggccaggctcgtcgaccctcccttcgtttgggcgtggcttggtcaggatctgtggtttcgctatcgcgattaggttttagctactgcgattagttttgtctttgtgacacaattttgagtgttttttgtttaggttactacgattagtcttatctatgtgatatgattttgttttatttcatttcattgttagtttgtcttctttgttcttcgatgcctcccagtcagattgttgttagtgattgagaataacaagttctttacaactgaaaaagttgttagtagtgtagttatgtaccttgcataataattgagtgctcaaactaagggttgaatggacatgctacaacagatctactgttgtatcttttgagcagtagataaaactaaatataggtattcttaaggttaattgtgatgctctaatatttttcatttgactttatttaatttcttttgtcaaatgattcgggaatcagacaatcaattaattagctcatttttttatttttatcttacttgtgtttctaataagggagatgttttgattaggttgtagactattaataaaattgcacgattt

SEQ ID NO: 187997 - DNA, 1928 bp, Cannabis indica
cattattttaatttctatagtaaaagaatatgtgttaggcaacttcattggtaaatattgaccacaagattcacagcaatacctgtaactccaccaaacctattacaaagcttctcaacaagagcttccatttgcttgtcctggaaaatgtcaacacaaatatcgtaaactaagtactaaacagcaattttatgttcttattgataaaaccagctaagcagttcataccttcttgatggaaccaattaagaactgcataatattgcagaaagactctcgctttaagttctggttagataacttgccgagcatatctggaagtaaattatacactggattgttccctgtaaattaggaaaacgatcagcaatcaaatgaaaaattctatggtgaaacataggaaaataacagcataagaattatggtactactactggggttaaggcaccacctttctttgataattccagaaaaaacagtctagccagatttgaaatcctctcatcatcatcttccaatcttatagccatttcattgatgtaacctttcacctgattgagcaataatcataatcatttaatcagaccacaatccattttaataaaaacaggttcaagaagtgacaatattcagattcagtttctcagaccttcatcatgtcatttagtatgagatgagaaagcaccaaaacagcattcttcctaacagaaactgaagagtcttgtaacctagaatacatattttctgtccatggttccaagatattaggaaagcgaacagccaagtctccaagagcaatagtacagttagaacgaacagtttcagaaggagcactctccacaactgtgaagagaagctggagatttgcctcactgcaaaaggacaggaaaaaaaagttaatattgattcataccatgttacattgatagatagatagatagagaagcagcgcaattatgtgtgtgtctagagagagagagagagagagagagagagatagagatcatagaatctcaaccaaaggttacatcaattatcataaatcgacagagagcaagcattcctgatgcttgtagtactggatactgaaaagaagacaaatcagtctatttttgaaatcttacagtgctaataaaaatttcctttgtaactttagcaactacttacatgataatttcatagtaaagaattacatacttgccattcaatcttaaatttttttgaaatattctagtctcataactgctctactgaattcttcctttttcgaaaaccaaatgcatttgattgcaaaaccaatatctgaagtaaaatgttttatgaaaccaaaatagacattacatttacaaatctcagaataaatgaaacttatgcaatcaccttttgcatcaaactaaaatttctgcaaatctttgtcaggaaaggagcacagcatccaattagattcttatcatcaaaactaccagaaacaatttctttttcagctctttcagatagtgtatcaagtactgcatcttcagaggccgcaaggccaagctctgcactaattccattttcctgaatacaaaacaattaaaaaataaaaagtcttatataacaagagaaagttgacaaatggttccagatacagcaataacacagtaatgaaaaagtaataaatgaatcaaggttccttgacgatgagagataaaagaattccatgtcacctttgaagcatcaccaggagttgtgccattaacttgctctgactgattttcaggttccttctcttttcctgctttctgtttctggaccttccgaatacaagattcaatatataccagttggttcatagcaacatgacttacaataaataggtaccgactaagctttgctgcttgaattgtggtaagcacagtaacattgccaccatctatctcattctgcaa

SEQ ID NO: 187998 - DNA, 2028 bp, Cannabis indica
aaggaaaagggaatggtagtaaagaattggttgaaccaagaggaagttctaagccaccctgcagttggttggtttttaagtcattgtggttggaattcactcactgaagctatatggcatggtgtgcctatgttgctatggcctcaacatggggaccaaaagatcaatgcagatttggtggagagaattggagttggaatgtgggctaagagttggggatggggtgattcggtggtcgtcgttaaaggagatgaaattgcagacacagtgagggagatgacagggaatgagttgtttcgattacgagctgcacaggttcaagatgatgctagaaaggcttttggtgaaggtgggagttcatatgatagacttaatgatctcattgactcctggaaatgttcaccagatttatgagttcatagtcttcttctgttattgagtctcaaagctgtagcatttgtatgagaaaatacaaatttcgaacaataactgataaaaaccaaaactaataattgttcttacaaagcagctaactaactaatactcttaatgggtgagacccttttatgagatgacaataatgtcaaatacagttttttcattctgttgagtagagtgcttaaagcacattccttgaaacaacatcaaaggtgattccattgtcttggagtcgttgttggagatcggttggaccgaaaacaatcccgggtgtgaaaactcctcccttaggaaggttatcacgttggttcagaagaatgagagcacactgaaccagaattattggtgtggtcacatatccaatctctggacccatcactcttgtcacgatttccatgtcgggtttcgatttttcttgtgaaacaagactggtatcactgtaaccatgtccgacgaaccacatcttaaacgaagcacttttcacctcatcctccgagggacccttcttgctgaacaatccaaggctaaaaaatgagggaaatttgaagagaagacgcctcccaaaagaaaattgaccaaagataccaagaataactccaaatgtcatgacatataaaatgctcagcaacgatttagagccaaactttactccaaaatgagccggcttcaccgttgaccaataagcctcccggttaaaaatttgttctatactctcgttcttcccgggaagaccaccagggttttcagtcagtgttgaaaacgttctccgaacaacaatggcatctgcagaagggagctttagagcccataagcctatctttttctggtgttctaaaactggccatttcggggttggcccaggaatctgaaatcaagcaagcatatttgtcaaacatctatttatatagcttgaaagaaattcataggtcccataatctacctgaggtcaaatttctaatcatcaatgattacaatgatcaacagtgttgtgattaagttcacttcacctctagtccagaccaactaatttaatactgttaactgataataaccataacttgattcacacagcagcagagtataatatgagaccatctccaatgcatagtgtaaattatatagcaaacttaactcaaaagatggttcaatgcccaaattttacaattgtgcttggacaaattaacctctaaagtcaacataatcattaaatttttatttttctattgaaactataaacaaaaattaatgaaataaataaaatattaatttcaacaaataaataaataactatcatatcgttaaaggatattaatggtgtctagcaccctttaaaatatcatatcgctattagttaaattaagtatcgaatcccatttaatttaacttaataactattatagaatatcattaatcctaaccaaaacaacatctaagcaccactagtgactcataccaattgttgggtatctggtgtactaaaaagcatggcatatactaacatgtactaaatcatcacggtcaatgtgtactgtatatatttgtctctatatataaatataggaaaaattcaaaaagggtgcaatggtgtat

SEQ ID NO: 187999 - DNA, 892 bp, Cannabis indica
ttaattttccaactctattatatatatgggaatcattccattcaagtggtatgatgtagctcaagacaaaataaacaataatagctaggttacaggtaacccaatgaaagatcctttaagacggcaaattaactagtgtgtttcccgtataaaaacaatcacaggcttagtgccgactcttatataataatatgtatttgtaatttggaatgaaacccattatttttttccacttggcaagctggcattggaatttgcgagtgaaaagaacaaaacagtagataaagaactaagatgatcaagaaaatagtctatatataactattaattatattggattcaaataatgaatgttggagattccataattaactttaaggaatttggacagctcttctagctaggagcaatattggaaatgggaatgaaggatggtatgtttaggtatgcagattgggtggacaagtggttgatgttctttgggattttgggtagcttgggtgatgggttacagaaccctctcatgatgtacattcttagcgatgttatcaattcatatggatcttctaatagctctctatccaatgatgatgtaaacaaggtaagcatatgaagtgcatgaaaaaattctaaggttaaaatgcaagtgtaattgtccgcttaaaaaagatgaatattgattaggactgctacactattttgtgtgtgtttctttgaaatgaatatttaattgttgaatggatgcatttggtgtcttgtggttttttatttgcagtttgcacttaaacttctgtatgctgcaattggagttggagctgctgcatttgttggtaagttagtgcacatataattcactttttaatttcacggatgaagaagaactgaaggccaa

SEQ ID NO: 188000 - DNA, 2220 bp, Cannabis indica
aaaaaatattcaaccaaaaactacaagaaagaaattgaaagaaactactaaaatcaaagatcaacataaacgcgacacgacatgtaataatttaaataaaaaattaatttaaaatttaaaatctattttcttatcaataattaatgagaaaatttaaaattaatttatttttatttattgataatcaataagaaaataaaaaatttaaattgtacaagtggtgctaatatgacaatgacacatcaaccacatcaatattttgtcaacaggtaaaacttaacaaaagttttatatttcagcattgtgaatagttttgggaaaatttttaacagtaaaaaaagtcgaaaagcatgaacacaatttaattgttcaaggaaaataaaaatgaaaacaatttaacaaaaaaattaagtaaaacaattgcctccaagaatcgacaacaaaatacaatagaatcaatgaaattttcattggcattgcttttacaatagcaaaaaaaaattattatcacttcatatatgttacctccattagcactgaatgcagcttcttagtctctgtcaaaacacattctctgtcgaacaaagctgaaacaacagcaacgcccttcaactgcgactcattaatttccatcaccgaacgtgcattcaaaatcccgatacctccaatggcaacaacaggtagcttagaagccatacaaacagttttcaacccatccaacccaacagtaatattgttttcctttgtattggttggaaatacaccaccgcatcctatataatcagcaccatcaacccatgcttgctcagcatgcactggggtcttgcacgacacaccgatgattttttcagggcctagtagatcgcgagcaacacgaacaggcatgtcagattgtccaacatgcaccccatcagcatcgcaagcaagagcaacatcaacacgatcatttattagaaaaggcaccccatgagagcgacatatttcgagacatgatttggctgcttctacaaaatcacgtgtttcaatgtctttctcccttgcaaacacaatttaagaacatagtcaatagacaaaaatattgtttaaaagcaactattgtgagcagactacttcctatagaaattaaaagttattggagaaaagcaggcatactaaaaaggttaacagatgaccttttaaattttgatatgttgaaagtttggcatcatgaaaaattaacggttaactacgcaagaagaacaagaaacagtaatataggtgccaaaaagctcccattgaaagtccagaataaatgagcctctggaataaactaaaacacatatcttaaattatttgcttgacgtaatacataatagggaaacgaaagtgattaatattatgacaagctcaacacagaagtaaacatcagttcgtgtaataattaagacattagacttaagcaaaaaaaacagctgcaaaccttagttgaacaatggtagcacctccttctacggcagctttaacagcatctgaaatagaatgaccccattttttattcattcttgaatcggtaacagcatacaagaacaagtcacttgggtcaaatgcattttccctgtaagtgctgtgcatgtttctcttaagcctgagaaagtgatcaaaggggccttggcggccatttccaatgacaaggtccctgctataatccaaggaagcttcaatatagtgtttagctgcctgtcaaaatcatcatgctaatttcttttttagtttttcaagagagagccagtcaccatagaaagtcatgtatgcaaattttattttaagttcaaaagaatatgttaaagggatcctccaaccaaaagtgaaccagtgtgaattgctttaaaacaacatcattgcatgcatatttcaccttaaccgcttgaagcattgaagaaccttttgccagctcagctgctatgcatgaagccaaactgcacccggtgccatgagtattacgagtctttatgcgcgaggagcgcagttcaaagatgcttttacctataataagcatatttttatgagaagatattttccataatataaagaaaacatcattactgaattgtaatttaaaatatacataccatcatagaaaatatcaatagcatccaatgaatcaggaaggtcaccacctttgacgaggacatttctgaaaagacaaacaattagttctcacgctactatacattttttttt

SEQ ID NO: 188001 - DNA, 875 bp, Cannabis indica
aatcggtatcctatagtagtttggattttgtagtttgcagttctatctgttctggaagaagtttccactatagagaggattacaagtgctaatgtggacatgcttatcactgcaaaattgcaacttaaaaaactcttggtcagtttaactttcttttctggtcttattttaaatttgtgatctcgatgtgagagatttgaatttctaattcttaggttctctttgctgacaattattctgcagaaattgattacttcatgtagctcaatcgaagacccttctccggtagcctgtgcaaccagatcactgaatattgggcaaacagaaggtttgctgtcatataaggcatccagtagcttgattggatcatcggattatttctcaaattgggatgtcaatttgcatcttttggcacttcttaaggtacatttttcttttagcttgtaatatgtgtgtaaaagatggatatacatatttacgtgtatcatggaccgtactctgtttagtttgttaactatatcttatttttcttgtgtgataattatgattcttttgtcgatgtacgattgtaaggttaacactaattatgctttattaatactgttcccagaaaattatgccaacatttattcttaaattttcttttatatgaacgctgatttgattaggattgatttgtttactcatataatacccatttctatgtgagatgcttagctaaaattgtcaggcttgtggtttgctcttatatgattagaggttttagcccctttctaggtgtctacctacatagcaattgctataattttctagtctccatatatcataaggttagcctgggaggctatttttgaatgcacacacacacacacaca

SEQ ID NO: 188002 - DNA, 2546 bp, Cannabis indica
aacaaaataaaaaccttcattaatgcccatatactaaaatgagcacggtactcttggtatgtcatacctccattgccaacctctagcatatccggatctgctcaaaattgtaggattaattacaattaccacacaaatacacatgtttttccacaacataattatttcacaaaaggtcctcatgttttaccattccatccgccaggtcctgcatatgctgcccacttatcgttcaaatcagcgatggtagtcatgctaaacaacaggagaaagcaaattctatcaatactatacaataccagtttcatattaaattgaattgaatattttgatataacatggcaccaatcatcatccatttctctaagattaaaagaattgcagaattaggacctggcccatgaatcatttatgtcatctgttgtgcgccagctatttcctaccttcccagcccataaagcaggatcatcaacccccctgtgtagcaaaaaaattggatacaaaccattgtcaatgtaacagagattaactcacatacctaaatggatcaatgaactagattaccattcacaaagagagtagaaaattgtacgccccgtgctgtttaacgcatcacgcattggaggatatctgaatagcatggaaacaagtcaattcacacaaaaaccaactcaatagtaattatttgaatagatgtgtgagacaaagaagaggttaaaccgttttttcggatcaatgcccagattgaaacagttgtcatacttcaaataatccacaccctgatagaatatcataaaccaataatcaggtagaacaacccataaacacatagcttagatatctgaaatgagcttgtgcatttgagattgattaaaggccacttaaaaagaataattactagagcaatttagccaaccagcgtagcatttaaaataacataatctgttgatatttaatagaatagataatccagttgaagaggaagacattaactgtcagcaaccagttgcttctattttatcccaagtcatcactttagctattcatattaagaataaataatgcaacaaacgacagaagattaatgtagtaaatcagttacacatacttaaaccaaaacacagcaagttattgaagaaactaacccacgacgcaaacagcttggcatcatcattttcatgaaaaagtgaccctggtcgaacttggcatgtaaaagccctagaaaatgcagatgcataaaatataacagtgagcatggaagtgaaataggactataaaacaatagatcatcacgaaacgggaaaaacaaaaacagataaacacataaacaaaagagacatcaagaaatcgacagtaatgtaattcaatttcatcccacccagcatcagagtaaattccaagctgaaggcccttcacatgtacataatcagcgagagctttgattcctgatggaaatgttttcggatcaggttctaattgaccctgcattagcaaaccagcagcattaaaaggatttaaaacatacatgaactccaaagtttgtacttatgtaatggctataaatcttttgtcacttaaacatgaaaggtcaaataaaaacataattgagtaagaattaagatgtatcctccacattgaaggagcaagttcaaatatcgttggaaagagataaacatggtgccttatgagactacaagatcaaccattggttatactgattataaatttgtgagatatatagtttggtgattagtagcagcagtaacctttaaatttcgagttggagaagaccagcaatcatctacatccaatagaagaaggaaaaaaattaagatccaaaagcacataatctaaagttcaccaaattcatattaggggtccagaaagaagaacagtacctatattgagatacacatatcctaaatcagccaagcccgataagacaagtgcatcagctgtgtcaatcacatagaaatgtatcagtaacttcatccgggatctccctttatgtgaatcctaattccactcaacattaatcatcatagtttcaaaccagtaatcaaatagttccaaattgttcaagattatctattgtgtcaatttcactattttaaactcactgatgctaaaacaatgaacagaatggatgttggaaataatggttctcgcatagctacctatgataccaagaaattgttacctgtttccctaatgacagtttcattgatgtcacaggcaaagaaattccaactattccatctgccaaaggtaagcaaaagccaattattatggtctaaactcaaaataagatcactataatataccatggagaaaaagcaattctgcggaaaaccatgcatttgcagcataaacgatgagcttataaaaaaaactccaaattaacaatcaaataccttaaaatacattatcccaaacttaccccatctgaggagttttagccaagccattattgagctgtaaaataccatacttagaagtatcataaattcgattaaaggatggtctaacgaaacttggtttgtcat

SEQ ID NO: 188003 - DNA, 2886 bp, Cannabis indica
ttttctttacaattcttgcctttatataaatttaagaaaattgatgtgcttatttacaattgttttttttttcactgtactttaatgacaggaacatattcttctggatcgagatagagtaatgtcgaagacttggtacaatgaggagaaaaagaggtgggagatggatccacttgctgttccttttgctgtgtcaaagaaacttgtagagcatgcgcggattaggcatgattgggcagtaatgtatgttgcaataaagggggatgacaaagattattttgttgacataaaggtaagttccatagttaattttctcactatgagttaatttctgtacttatatatgctcatacacttacattcctattccaggaatttgatatgctatatgaagatttcggagggtttgatggcctgtatatgaaaatgcttgccaatggtattccaactactgttcacctgatgtggatccctttctcagaattgaatcttcagcaacagtttctcttgacactaaggctgtctcaacaatgcttcaatgctttatggaagacagaaattgtttcatatgcaagagattgggttattatgaactttacagaagcaaatgatgacataatgatggcaattgtgtttcctatactggagcttgtgatcccttaccctgtagggttttgtttttcatctttgcatattattttttctgttatacttactaactctattttaaagttctgaaattgttgattggttcattccaggtaagaatcaagctggggatggcatggcctgaggaaatcgatcaagctgttgactcaacatggtacttgaagtggcaatctgaggcagaaaagagttacaaatccagaaagagagatgacttccaatggtttttcttgtttactataagaactgttatatatggatatatgttgtttcatgtcctcctatttctgaaaagaagaatccctgtagttcttggttttgggccatatagaaaagatccaaactttcggaaattagggagaatggtattgcttcattccttaccccaatttatataaatatttatttatggtataaattcacaatattgtgtatgacctgttcttcgtcattccgtatgatttgattgtaagttcctgcatgactaatttaagttcaagccgtactaaggttcttacatttaacccgtcatagttaaacactaacttaagtaactgcaaaataactgttttactacccttaccctgctattttttttttgttcattgtgcaacaaaggaaacattagtagatctgaagattgttattggctactatgcttgatcaagtgcttgggcatctttgttctgatcccattatcctactgtttacctgctattatgcagaaatattatctcaaatatagaaagaggagagttaaacaaaggaaaaaggctgggtttgatcctataactcgagcttttgatcaaatgaaggtatattgttgccacataaaggttcttttgattatagtgccgatattgttttattttatggtctgaaaaatcttttctggtttgcagagggtaaaaaatccaccaatacctttgaaagactttgcaagtattgagagtatgagagaggaaatgaatgaagttgtaaaatttcttcagaatcctcgtgcatttcaggagatgggtgctcgtgcacctcgggtatattcttcttaagatatttgcagaaacttcactgtatacacattgtcctcctatatagcatgcatcatgataaaacatatctttcactggtctgtctcctatgatgagtaaagataggagtgtgtttataatatatatatatatatacatataaatatttggtgagcttattgtttatatagtttgcatggtttcgaaatgtttcctaccattggaagctcatgctgacatttctcttcttctagttctttatttaatagtgtttggtctaagattaaaaaattaaaaaaaaaatataagttcagcttaagtacatgcatttgtttttactagttttagcacaggtgttcaaggaagcggtgactgatgtgatgagcatctaagatggttgtcgcttatattgcagggagttcttattgttggtgagagaggcacaggaaagacatctctagcattggctatagcagcagaagctaaggttcctgttgttgaagtgaaagctcaagagttggaagcaggattatgggttgggcaaagtgcatcaaatgttagggagctatttcaaaccgcaagagatctggttctcatctaaaatcttcttattactgtcacatttatcttcttacaatattttttaaaaaaatcggagaaaatgtatgtgaggattcaatattaagaagtaaaaaagaaggaaagaaaaaacagagaaatatttacttgtacattgaaaaagattttggaaatgaagaaaaaaaaataaaaaatcatactctaaaattgtggagacttgtcatatcttttagaaagattatttgttattttgaaggaataattaacagattagattagaataatgatgtttttgagttttaacttatatttgcttaccattgacatttttagctttgaaaaggaagaggctagttccaatttcagatgctgcagctgagaaaccttcatatgaaaaatacatgaaggctgctagacaaaataggaatattttacaaaattatttaactatactttttctaaaaatttgctctctaactttgtgtttgaatccaaaataggaaataaaattgtttagaatttttgttttccttcctataattttatttccaaacatagagacggaaactttcaattcctgtcctctctctctctctctctctctctctctctc

SEQ ID NO: 188004 - DNA, 3719 bp, Cannabis indica
gctatcagtcacaaaagaaaaaggaaattgaggaaatacctcgtaatctgattctgggatttttgggttcactgcatccaattgttcactttccttctccttaaactgagcagcattgtaatctgaatgtaaatttatcgagctcggaacagtcatattggttgattcttggttgatatcatcaacaaaacccatattggagtcaatgtgacccaaagcacctccatcagacttcaaaggcgggtggctgtaatctattggaaatcctcccatgtttgccatcagggacgagaaacctagatggtcctgatccataagagacacatcttttctttcaaattcatcctgggctagctttcgaaagtatgaccaactctttggctcatgattctccatgttgatgctcacaccagctccatcaccaggcagaggactgatgcctgaaaggttttgagatattctagcttttatgaaaatatctgacagaaaatcacgaggaaaacgatcatttatgtcaataagaatatctccatgttcggaagcattaacaccagcaggagactctccttgtgcatcacctgtgaaagcaatttccttcctatcatgctctggtgaacttagagtagatctttccttgggtttatcaaatccttgatttgtcatttgatgattcagccctgatgcttccttatcatttgtggagtgatcttttacctggacctgataaggcttctgtaacttcgagtcaagcacctcctcagaaattttagagttcatcttattaatattttcaacaagattttgagggattttttttgatggatttgatggtaaagatgactgctcagcatgcctagcaacattatcctcctgaaatttactagttgaatttgatattggttgcgagtgatcagaaagtgcctgagttagtaaaaactgagaaccaaaagagtcattagattttgataaacggttcagttcagcttgctccctgggaattcgctcagatttaaagatcggctgaggaacaacaggtggttcaagggagctgttaaagtcaacaggatcagtctcagaaggaccatatccaggtacttgcagtccgctaggtgagtgaacttgactttcctgattataatttttcccttcatttacgatttcaggagataatgaagtttgtacctgttcctggagctttctattgctttttgtaccaattgaaggtggcccaatgtctgctgccgaattaggaaaagatggttcttcccttggcatgtaatgtggagatgaaccatcatgggtatgtgaagaaaagttgtgttcactttccatggccctacttgtatcagtttcagtaaccttttggaaagagctctctcttttcatcactgactcttttgacatagcttccttgtccaaagattgacttttttcaggttcactaatcttttgagctgagctaactccttttagcttcatctcatttgcagatacttcagaattatggagatggacgccaccatattgcttatcttcaggcaaagcaccatgttgacttccatgccctgggatgagtgttggacctgaactgtctccaactgttgcataattgggagggtgggagctataactgtattgcagaggcgtcatatttccatctactccagagaagctttccacgggttggaatgttgatggaggatgtaggccagcttctctcaaatgcatatcatgtccccagtaagcctgtctattagattcataagcactagttaaactaggaactgctgtctgagaagattgacgagtagatgaaggcaaatggattgtggaagccgcagtactagtaccagctaattcaggtgaaggatgttctctttcaacatttagaccaagtagctcatccaaattgttaccagaagtgcttcctaaagcaaatgagttctttcttgagcccagatccataccatttacagcaactacatattggatctcagagtcaccttccatgcttcccagaccaagctgtacatcctccaaatcggcactagaaaacaagaatatacgaggtttcagtgatcccccatcatgcaggcattcctccatcatgttctgcaaatcttcatcgcaagaaacagaaaccaatgcatcaagatcttcaccaggaagctgatattttattgtatgtgtttggttgtatatggttaatattttctgcattagttcttgccaggaaatatccttgcttatccttataatacgtgtatcacctccaacatatctaagtcttccatcactcggacggggcaaaatttttccaccaaagctgcaaagaaacttcacctttgtggatgagctatgagatgctcctgaagagacataaccatgaagtccacggccaatatcactccgtgatgaggtttgtggtacggatcgtatagaaccattataactcttctcttcatttacagaagatcctttcctctcaaaatcctgggtttgagatttctccctagaattaaccatagagatatcagatccactttcagaagctgcatggctagttcccagtatgccgtttagattcatataagcaggagcattgttaggatcaccaccataagcatttggaacatagtgttgcctggaatttactctttcacgcataaactcgaattcctccccagtctgaatcggagaaattcagcccaggtctagttccaacagacacacttgtaacccggtggacctcaagttagtattaacattactggatggatcctgaaaatatctatcatttgtagacccatgtccatcatttcttggttccatattgctgtacctaacttgttcatagttttttgttgatccatggccctttttccctgatttctgtccatttttggctaaattcattcacatggaaaaacatacaacctgtgacgtgtggatcatgatacatgagcatgtttcaaattgcaaacagctacaaacgtcacctgcatagaaccttcttcccatggaggttactcaatcctcaacagattaacctgttgatacaaggcacacacaaacttttataaagaatcatctcaataatcaataacggaattcaaagaatatgctaaagaaaaatgggcttttctgtttaagatgttaaaaaaagactagcaaacgtatcaagcacaaaagttacaacaaagtattccccaccaaccccaaaagtgcacagaaatagaatctcaaaatttgggttccaccctaaaatctcagaaactacaatcaaaattcagttgcccaccccgttagctttcatgaaccgggggggtctttttttttttaaaaggaaaagattaactgcaatttctagaaattaattctaactttttattatataataaaaaaaaataaaaactctaattgtattaaaatgtttggtgttgttctaagagaaactacaactattagaaatttacattcttaaattgtagatagtgagactagaaaataaatatctttatcttccacaattgcactacaaattaccatatgcaaatacaaactccacaaagtacataagctaatatttatcatccacaattgaactacaaattcacatatgccaataacaataagggcgttaatggaaaatgacagtatattatatatcatcttcaagcttcaggcatttttgaatcagtctgtacataacgatttat

SEQ ID NO: 188005 - DNA, 1215 bp, Cannabis indica
gctcaaagccaccgattgaatcatgacagtcttatatatttttaggtggttaaaaatattaccgaagacatagtatacatagttgttaggtggttcaaattcaacataataattttagttcttttcaaaaagataaaataaagatatgaagtgttgaacttgtgacttttttaaactttaaaaatatttttactactacactaaacagtcttatatattattatttgattaaaaaaatatttaaataaagattcaaaaaatatacttagaatcaagcttcgaaataatttatgattggtcctaattttaagtgaggcacatgtaactttttgcctatgacttcgaataattttattttttttattgtttatgtcctaccgctaataatattaagatagtcactattttttcttgtagtgggggatcactcgagtccaagatccatggctgagtgtgggcaacaacaaaatagaaaataacaacccttcgataacctctaactaacaatgcttagtagtactgtgtatgaaaaaaataaagaaaaacataaaattattttatttttaatattacaaaacctagcagtttataggtatcttctcaattgagcatgctgcccaatcggtgagtgtacttttaaggcggattctgaaatttagtaaattataggaaaattattatttttggactcttatttagaaaaaaaaaagtatagtatttttaaaacctaattaaaaaattgtgtaatattaaaaatgaaagttttttttagcttttcggctaggtgggctcaaggcacagacttagtccgcttatacttagggtcggacttgtgtgctttggtcgtgcgtccgggcctaagcaagagaataaatgtcttgatttcatttgtataatgatgttttggtgttgttttgggcgttgcatatgcctaggtaagctattttttttggctccgaaatggaaggtggattaaatattaatatccatccgacaaagggcagtcaactgttggttttgtagaggctcttttttgttgcattttggctttttttttgtcaaattttattgaatgccttttatgctagttaaaggattgttttgatgcttattgagcatttagtgattcattaaatggttcaactcgcatatgcttaatggttctttctagctcgattactagagttggaaacaacctcgatatctattgaagaa

SEQ ID NO: 188006 - DNA, 6519 bp, Cannabis indica
tatgttgtatgtttttatgtaaattatggtttatgggcgtggttgacatttgaaagagtgagttatgggctttggtaatgtcggagatgtatttgtacttgcatttcgtactattggtgggttgaactggtattttaattccttttaggtggaaatggagaagaagattgagattgaagatcctgagaagaagaagaagaaggaggagaaggttttgttttcatttctcgaattttgtagttgttttcacgatatgtatgagtaatatttgagtagctattttattcttgcgtggcaggcaagagagaaagaattgaaaaagcaaaaggctttagagaaggctgccaagcttcaggtatcgatgctaattgttttatggcatgggtgtgaattttaattcttgtatgcattgcacaaatgtctataagtttatgtcttagtttaattcaagttattaaaatattgttaggcacaagcatccaatgctcccaagaagagtgagaagaagaatgttaaacgtacaaccgaggaggagaattcggcagatttcattgatccagtgactgcttctggtgaaaagaaaaatatgtctcctcaaatggcaaaacaatacaatcccactgcagtagagaagtcgtaagtttaacggtttctgatacatctttgtcattaatttcatttccccccaaaaagatattggggtgaaaaaatttatattatgtgctgtggggatatttatctgtacttgctttttccaggtggtattcatggtgggaggaatcaaggttttttgtggcagattctagcagctccaaaccaccatttacaattgtgagtagtactgagtattactgatcttacataggtttactggcactataaacacattttttctgtttgctttcctagtacattggtatggaacataacagttatgctacttaccttttgcaggtcttgccacctccaaatgtgactggggcccttcacataggccatgctcttaccgctgctatagaggtcagtctttcactttcttttttcttttgttatatttacaaaatgtttagctagatcttctatctccagcatccattgaggtatgtttatttgatgttttgtatttgaatgtaggacactataattcgttggcgacgaatgggtggctacaataccttgtgggtgcctggaatggaccatgctgggatagctacacaggttggctcttctctgcatatgatgttaaaagttaacaatgtaacttaagactaataacatgacttcattaactcttgtgagggtggggaatgtgcgttgcatggtgtcttgtcatgccagtattatttctggtgttagatgtttagacagaagtttgtgcatcatgctgtcttctgaaatctgtcagatatttcatttatcaaccattaagaacttaaacatgtaatcaccttcgatgagctccaaagtttgttcaaaatgtggcattattttttattttattattttaagagaagaactaggtttctctagcttgacatgtttttgtatttttttcccgtggatgtgcatctatgtcaattatctttttcttgtctttgcattagtttgcatattcaaaaataggttccattagctattgcaagtgttaggcgggagtgttgtgagtggtctggggttcaaactccagcattatataatttagctaattcaagtaccaactataacgatccattagtgctgtttatttgtccaagtttttctttattgactgttatgtgtaaattcatgaagttgtaatttattttatatgacaacacgtctggaagttggtgatacattgaatttattctttactggttggatttgatcttccttggtgggctaaccttttcaatttttgtgtattgcataggtagttgtagagaagaagctaatgcgagaacgtaagttgacaagacatgatcttggacgggaaaattttgtctctgaagtgagtttgctgaacttgggctaaaaaataaattctgcagaacttttaaagtctgttctcatgtatattttatgttgatttggctgtatgactgcaaaggtttggaagtggaaaaatttgtatggtggaacgatattacagcagctacgacgcttgggtgcatctttggattggtctcgtgaggtaaggatttaactttgcaatttactgaacttggtttgaagattatgtgaattgatatggataaaccaccgtatataatcaacagtttgtatcaagaccagctcactctttcttgttttaacgatctgctctattttcatttcttatattattcagtgttttacaatggatgagaagagatctaaggctgtgatagaggcttttgttaggctttacaaagaaggccttatttacaggtatgctataactatccatttatttgtcaaaatcaattttatatttacatactgactataaaacttgtgtgttttatacatttcaactctatctaaaggtatctgccaagtctacactctaatgtatgctcttgcgcgtcttatgtttatatgtgtctaatgtatatatttctttttttgattgtttcagtaaacatattcataccttttattcgtccttgatctatatttctctttaatttgattggtatcacattggtatttacagtttctttgcttttgtagggatattcgcctagtaaattgggattgtaccttgcgaacagcaatatctgatcttgaggtattcattgttgtgtgggatatttatatttgcaacatattttgcatttaaagaaaatctttctttattaggttgaatatgaggatattaaagaaaggacactgcgaaaggttccaggatatgagaagcctgttgagtttggtgttttgacttcatttgcttatcctctggaagaagaccttggtgagattgttgtggccaccactagagtggaaactatgcttggtgatacagccattgctgtgcatccctgatgatgaaaggtaccgtcatcttcatggtaaaatttgctatccattcctttcaagtggaagacgtaatccctatcgtatgcgatggtattcttgttgatccgaaatttggaacaggtgctgtgaaggttacactattttatgccgaacatacttgcacggaatttgtttacaatttactcttcaaacctggcaaggaatatgacttttttcttatcgcatctgcagattaccccagctcatgatcctaatgattttgaggttgggaaacgccataatcttgagtttatcaatatttttactgatgatgggaaaataaatggcaatggtggtgcggaatttgttgggatgccacgtttcaaggctcgggaggcaataactgaagcattgaaaatgaaggtattgatttgttatacatacttcatttcttagtcaagttagatgttagtggaccttagaaaatttcaattttacctagttcgttcatacatgttatctgtaaaagatgcttgttattattaactgttatggctggggctgcttattcaataatactgctactatcattgtcaaaacctttgtcttagtcttaccttgtattatgaaacttgactagtacttaatcaaagtactcttgttgtcttgcttataaaaattttctctgattcgcggcttctactgatacctctcccatatagcggaggtcctaagttcgaattcccctccaaaatgtcaaaaataaaaaccatgtgcactttcaattgacctagcttaggttgtgagtccaagatcagttttttggtccttgcagatatagtattatatttgtatagtttatctcatgtttgaaaaaggttatactgactgtaattcttcttacatttagggtctgtacaaagaagctaagatgaatgaaatgcgcctaggcagttgttctaggagcaatgatgttgtagaacctctgataaagccccaatggtatgttaattgtgggggtatggcaaaggaatctcttgatgctgctgtggatgatgaaaacaggaagcttgagttcttcccaaagcagtatattgcagaatggaagaggttggttgtttttggcttttttctttctcgctgtttcagtaagttaggtttgtttgcgatgaaaaatagtacatctgtcttattggcaaagaaaatgaatttttttcattttttttaagtgtaagaacattggttcaggttttgagtctgggtcgtccttaccggcatttgtgcttatattatggtcttacaactttctggagacctgtgtttttggtaaagtcactacaacccccgacccccacatatgtaatgaaaaggccttgtgttaaatggtgtcatattgaaaatcaatgcaatctacatccagttgtctggttagcagaaactgaagacaatttttttttcttttgagattgttgattttaatgtggcatgctgcatgatatgttagtgctaatcttattcctcatatttttacttgaacattgtttaccttttttgatcatgactacatagttgtgttgtattatgcttaagatttgatttcaaatatcacagatggcttgagaatattcgtgattggtgtatctcaaggcaactgtggtggggtcatcggatacctgcatggtatgttattctggaggatgatgatctaaaagaagttggcgcatacaatgacagtaaccactgggtgattgcaagaaatgaggaagaggctcaagaacaggctagtagtcgttacaatggaaagaaatttcaattatttcaagatccagatgtgcttgacacttggttttcttctggcctcttcccactgtcggtgttgggctggcctgagaatacaggtgatctgaagacattttatccaacttcagttcttgaaactgggcatgacattctctttttctgggttgctcgtatggtgatgctcggtatcaaattgggtggcagtgtaccatttagcaaggtgggtcaaccttgagccaggttctagatagcattagtacatgtacatgctgcacacattcttttacacagtttttaatagattaactgcaagcaattggtgtctatattttctaattgcttttgacgtgcatttcatttatatgctaatatggtgattcctttccaaatattacatgcctatgcttgaagagatacatactagcttattgttttaagcatgtaacatcggtatcctttttttaccttcataatctcagttcaaagtttttgggcaggccatcatgtattttaatattaagggtctggagttaaacttcttagaagtatacattatggactttctttgaaccaaataagaggtggggaccctctgttgaatacctggccctctaaaggaatattaattgttggagtattatttggttttgaattgtttgtacatgatagcatggttgagtagcatgtttaacaactgaaagatattttaccccaaacctttctgcaagcagtcttgcatcacaaggttgagctgtcaacatttgcaaaggggattttataactcaagaacctaagtttcttacacaatgttgtatcttttgagttcattcattcatttttttttgccgcttgatgcgtgtattgatcgagatgactgttatgatttatctgcaggtatatttacatccaatgattcgtgatgcacatgggcgcaagatgtcaaagtcattgggaaatgtcattgatccccttgaagttataaatggtgtatctctactagatcttcataaaaggctagaagagggtaatttggatccaaatgaactagtggtagccaaagaaggacaggtgaaggacttccctaatggtatcactgaatgtggtgcagatgctcttcgctttgctcttgtcacttacacagctcaggtttggcatatagctctacaaatctacatatttcagataaattatcttgttattgaattaatttaggctctttaatttgtcttttcagtctgataaaataaacctagatatccaaagggttgtgggttatcgacagtggtgtaataaattgtggaatgcagtacgatttgctatgagcaaacttggagataattacacgccaccctcaaatgtaaaatcaaatgtcttgccatttagttgccagtggatattgtctgcattaaacaaagccattgcaaagactgtatcatcactggaattgtacgagttttcagatgcagccactgcagtttatgcttggtggcagtaccagttgtgtgatgtttttattgaattaattaagccttattttgctggaaatgatccgaagtttgcgtctgaaaggagttttgcacaagctacactgtggttatgtcttgataatggtttgcggttgcttcatccatttatgccattcgttacggaagaactatggcagcgtcttccttctccaaaggatcatgagagggcagcatcaatcatgatctctgagtacccatcagttgtagaggttag

SEQ ID NO: 188007 - DNA, 1251 bp, Cannabis indica
tctccgggatctttttctcttactacttctcctactgctcttacgtttcctactcctcttacttcttgatttccttctccttctatcgccttcttcctcatcagattcactctcactctcactatcactactactataagatgatcttctacttttacgccttttacccaaactcttcctctttttcttcaatcgcgaatcatcagattccgactcagatttacgctcagaatcagacttcggtctctccttctcgcctgaatcgctcatttccccaggatgcttatccgaaatttcctcagccttctcctcaaattccgaatcctcgttctcattccgaggaggactaggtgtaacattccaaatacatttcttcaacatcttcctcatcttttgcctcttaagcctcctatactcctcatagttcagacctttcaattcctcatccgattcctcagactctgattgccttccatttcgatacggtaagtctctgcctctacggtccccgccgcgcccaaactttctaggcaaatcatctgaacctctataagacatcgaggttccagagtgaagactccgttcctgaatcaacggaaacaaattatgaaaatcctcagaaattattgaagaatgtgatcatgtatgtacacataagtatattgtaattacaaatcctaggtaggaatgatagaagcagatttatgtgattaatcaaagaatgaaagagttatgcaagagacgaaagttgaatcgattaagcgcaagaagatgtttctcagtacctattagttggaatcggagatggagattgaagaggacaacttctgaacttcggagagaagagtagaggagattgctctgccgggcgtgatggagccgacgccgttggaagattgctcgctcgatactctgattagttttagggtttcttttttccttttttttttaatggtaataaattaactaaaaatatttattaagtttacttggaaaaaaaaaaataggagaaaaattattattattattattattattttaagaaattatgtaattttattaataacaattaattaattatgtcttgagaaaattaataataattaattaaattaatagctttcaacccaattgaaatattttttcattggaaacaaaaaaaaaagattgaaccaattaatcgctggcttgatttaataataatcacatgcctctaccaaatatagttttgtttaggagtgttcataaaaa

SEQ ID NO: 188008 - DNA, 3124 bp, Cannabis indica
tttgttttttttacgaaaactaagagtacttgtaatataaagagtagtacatatattacgtcttatatcttcatccaactattatcaattcagttgatgaaataacgatggttgtaattcactcaaatgacttaagctgatggaatttggaggccttagtcaacgacttgaaaataacccttgtacccaccaagaactgctcagcgacgcaggtaaatgtgtcatacctaagaaagaactccaccaacaataccctggccatcaacaccaccaaatctctacccgcacattgcttattatccactgaaggatcctcagtctctcttccattagaccaaaacacgtactttaggttctcttcacctttccccataaacctatatgccacaaacttctcgggcttgtcaaaaacttttgggtctttcgtcgcaaatggctgatacccaaacatcatctcccccttctttaccttaaacgacgcatcgtggctctggataaccagatcttccttagcgtgaccgtattggaatggaaccggaggctcgatcctcaacacctcgtacaccactgacttggtcaacgccatcttttctatggcagcaaaagtcacccctccttcttgcttaaccatgcttctgatctcgtgaactagttgggcatgcaaagtaggcccggcttgaccgatccacttgaacaagcttgggaagaggactttcatgcctccgtaggtattaaagcacgtgaggaaaatcagattatggcaagcctcttctttctcgagcccgaaatcctttgctttgtctagcacttcggtggctgaggaggagaaagcttggtatattttattgtactttgatttcacaaggaaacttggtatcgggaatgtgtggatgagtagatcttccactagctgtaggaacttcggtacgcctagggttatgagtggagccacttgcgggacaagccacgtgtcaacagtggtgttgccttgggaccctaagacagtgtctttaggacttttaccacaaaagaggttgaaaacatactcgaatgagtaggtatcgcttatggggttgaagttagcttctttcttagatgacagttgtgactctagagtgttgaaaagctcggttagggactttcgcaacacagggatgaagttttcgtgtttggaagcaaggacagagaagaagtagcctttgagggatttgtgttttggctcagatgggtcgaggaaggaaagtactctgtaaccacctgtaaagccagtagaaggcatataagtgccatcaaagacgttcttcttctcgactttggtcatgtcaaagaggataggaaaacttgcagcgtctaggaggacaatgactttaggattttttgccatgaaggggcctggtggcccgttggctctgaagactgtagatttgtattgggtcattcgggcttggaagaatccgtcccgaccttggttgtagtagaaatcccatcggtctttaatggccccaaaaaacggcaagccgtaacctccagggatctcttttagtggaagctcttctctttccttttcataattggatggtaattgatcttctaggtcatgtatgattgagtaagatgatattgaagacatgactactttcttagttacagaagggataactatagctagaattatttgggagaatattattaacctgtgactgtgtgattaaggtgaagtaaagggtagtatttataaagtaatatagtatagtacgtgtaaggttttaggtacgtgttctgactattttaatattttagtagtgacatatttataatgctgattttattggatatgtacggcaattaatcatcaacaaaacgaaatcaataatcagaacttatgaaacgtgtaactcatgcaggccggatcaaccaagaaagtagttgagaatatataaagaattacgatgagtcatgatagtggtatatctttagataaaaccggtattctaatcatcaactactctttctcgatcaggtcaatacaaaacaaagaatccaacactgaaagatcacgtgatcttgtagatcgccacagccattgctcgaagacaaaatttattagaaatataaatgacatatctgctgcaaaagtcaaaagtgtatgggcgtataagacatgctcggtaggtaggtattttaagttaattaaaatataattcaataataacgaaataaatgtgcaaattttttggtggttggcttttttaattagcaacaactctcatcattgatgtgattttcagagtactaatattttacattttatgtttattgttttctaattaaatcaattggtaccatttcttcttctctgtcctccatatttctcccattatcaagaatagctcatatgttgagagccctagtatacacaccatttccatcaagactaaggttgatcctgaaagtttctacagacaggaagagagtattcctcctctttcaaccactactacatatatacagaattaatttcataaaaatataccttttacttaaaaggactcccaactaatttattgttagttcttagcaattcatataaagattaccaaattaaaaaaattaaatcaaattctgcaaaactataattaacaaaataaaatattaataagacatttagaaaatattattaaaatctacatgatgagatttaactccaaatatcaaaaaaacctcaaataaaaagtctcaattccaaattttctcaggtaatgaaaatattgaaaataaaaagaagagttagttgaaaaattatatcaattatactcgtgattaggtaaatttatttttaagatcaataataatttaaacaattattgaccaatagataagttaaccaagaattttttaaaattaaaatgatggacacatctagagccgaaaagataaagaaataatttatgcttaactatttatacctaactataacaaggcttatgtgattcacttttacttttctattattttttattattatttttattttaacaaaagataatatatgtggagaaatagagaatgtagcaaagttttcattaatttacatgtaatcaagctgcatggatagaaatgtttt

SEQ ID NO: 188009 - DNA, 2109 bp, Cannabis indica
cttactcaggaagcttagtcacacctcagaggaatcagtttcctttagctcgacctgtatctaacatagcaggaaagattatgatacagaaattgacccatggacactcttggaagatggtacaggatcaggtccatcttcaagtaacagtggcttgataagcagcggtgatcatgccaatcttcgggcatctagttggcttaaaggggctgtaagggtgaggcggaaggatctcacatacattggcgctgtggatgatgacagctgaatctaacatcactccattccagtatttttttttgtggagtgagcaagcccctcttcaggtaatctaatgtgttatttgttgtccaaaattggtgccaagatcaccatgttttgtatacctcctctttgacaacagaggatctgcaaagagggaaattttttttggtgggccgccgtggagttttaaggaggaatttggagatatatcttcccatgtcagcccatccaactcggtcttcactaacccttttgattatctctcttccaaactgtgcttcttctttgtgcagtctggaggctgttgtatatatagagataattgtttcattttaccaattaatttaattaaaatctcaaaagaatgacctgtaggagtttgttgtcatttctattcgagtctttaattcctatcccttactgcatataataacatcacacatatgtgtacacctatttgtacatgtatatgtcaaatttgcatgttatgtactcgtttattcttattgccgaagatgagatgcatttgctctggcttttgcccattttcattttttatgcaattgttaaattcatagtccgtttaaatactagattttatgtaattcttagttatcgatagtctcattggacttagatttgattagattttctgtaattctttgttcaggtcattgacatttaaaatgagcttgctgatgtagctgtattattgttattattattattatgaatccctttgcggctcaactctactctagtccaattgttcttgtcagtaaacttaagaataaaatgtctactctgtagtaagtgtttttactcattaggtttgtttggtttaataatttactcattgttcttactccattgataggtgctccaattttaaccgattattatttattaacaacttctaacagatgatttaatcatttaaaacataaaattcataaagagagaaacaaaaaacatttaaaatttttgttgtccgggttgaatttggtatattttgtatttttgcaactgctttgaacttttaacaaagatattaaattagttcaatcaattttatttatttatttacaaattgctcaatttaaggacttgttttacttaaaattattaaataagctatagtaaattagcagaaaatttattcttaaaaaaaatctgggacatcatcgaatatttttagtgtatattggacattggtgctatagccgtataatttagtaattatattggcctattcgttacttttttgttgaagaggaagtattccatgtcaaatattatgtcctcaacagtcaacatgcacattatgaaaagaactaagtattgatcagcatatgaactatatatataagtttcggttttgacattttcctcttgctattttatttatttgtcttcttcacatttgtgtgtcaggtacacaatatttgcttttatattttgtcactcacaacatgaatcaaataacataactcaaaacctacgtacctatttattaaacaacttatttttgagttgacacgctttaatttaaaaatgacacgacaatgatctatgtaaaaatatacactcttaaatttattatatttatttacatgtaaactattttttttagataaataagacgtaaacatgttaaatagtttatacatgtatcatagaaaaattataaacactttaaacttgttataaacatattaataagtttaatactagaattaatcatgattatttatatgaacgtgttaaacgggtcgggtcaagtcacttgtttataaacagagtgagtttgtattttaattttcaacacgactaataaatagatca

SEQ ID NO: 188010 - DNA, 4798 bp, Cannabis indica
aaataatataataaatgtgtaagaaaacaaataatatgtaatatatgattacatattaagttgtcaatatttataacatatagtaaagttagttatgttattaatgtaaaccataattattaccttttatcccatatattagtgactaaagagaaatcccttgagatagatattaggaggaagtgcactcataatggatggaaccaaccaatgattagattagttagaaataagcttatggcttgaaaaaattgcatgttacatttgacaatttcctatgctatggcttagttgttgtattgtacgttattgtaaaaggcattaatgtaatcgtatggatgggtttgcatgttgtatgattaagatatggttcttatcaccctcatctcatgaaaacattgtatgaccataatttgggagatgggaaggaatgtagccatcaaaggagaggactcgcccataaaagacaaaacataaagcgaccaatgaaaacaacttaagatgcatcacatgcagcgtcctatgaaaaatcttaattccaataaaagaaaaaaaaagtagttggattaattgttcaacttaatatctcacaaatatttccgaacaagtgaggttcatctcatatttttttaccaaacacccttactctccaaaccactttataagctagagaaaactcttaacacatacctatccaaaaaaaaaaaaaaaggcaaaaagtatcacttataatttagaatgtcatccaacaaaaaggccaaaaatattacttgtgatctagaaaaagtgagccaaaactgctggttgcgatcaatcgtgcaaaattagtgagcaaaaatatccacctccatcttgaaagtgaatgttggagtcctagagtaaaagtgtgtgaaaacttattaccattataaaaatatgaattactctattcttacatacttcttacttcttaccatacccttgtctttctaaaatatacaaccaattcgtgattaagattggagtattcggtaagaaacaacgtttttgttatgacaaattatgtccagtgttgtctagagtttaattttttatgattagagttttattgtttagacattgtccacatcaacttattttatgttagtttgttacagttgtcagttatctagttattatctaattcaactaggtatgtatatcagtttcttgattatgctacagctaacacttttgatcggagattgagatcacattctatctttcctttctactgttcttgagttcttgcaagtctgagcttgaagctttgtgaatggtgattctaagtttcggtacaggacctacagttgattaggtgcgagctaaaagaagttcagctacatcttcgcaagcagatatgaaggtgtttagatctagagtttcgttgaagggatttcaacatacaagaaacaaggtgaatcttgttgtgtttgccaagggagttggcatatggagtgatttcttatcataagggatttggaaatttgtacagaactggtatttaaaaacttgcaaatcatatagtgaagttacttaccctagttcaaggacccaagcactactcggctggaatgtattttcaatgcaaggaaagcttgtaaattgattgtgtttttctaatttagctttagcaatttacattcaatacatttgaattgaagtaagcgaatgaacaaagtaaaaattgataattgaactcagtaacgaaagaacttaagtctttcaattggtatcagagctaaaaactttagggtaacttttccttcgatcctctcttcttggttaatatgttcaaagatctgattgagttttcttttgcataattacgtttcttgatttctagtttatccagtcaccactaatcttctctaattctccactctgagagcactctactattttggttagttgatatttttctataggatgaaaatgttcagagaacaaggttcttcattaatgccaccgatgttggaatgggccaactatccctattggaaaacaaaaatgcgagcattcttgagggttgttcacgaaagagtttgggtggtcattgaagacgactagaaatgcccaaccgtggttgacgatgaaggtgttaagcctaaaccaatgagtctatggacttcatatgagatggagaaagccaatttaaaaggcaatgcatgctttcttcaatgcagtgtctatgaacgctcaaagtcattgccaactgtgaaattgctacgaggcataagaaaaactgtgattcaagaatgaaaggactgatacgataaagaaatctcgtctacgagcattggcgaaggcatttaagaatttgtcaatagaggaataaaatacaatggcagtgctccatgccaaattgtgggacatctcaaatgagtcctatgcaccgagaaaaacatactgtgatgcaaaattgattcgtaaagtccttggaatcttgcctaggaggttcatgtctaaagtaacctctattgaagaaatcaaaaatgtggaggaattggatctcaatgagctgattggtctctagtgtcgctaaccaaaaattatactaaattcttaaaaaaaattcaagaaaaactattcgaatagaaaagaaaatgttcctcgaaggaaccctaatggaagctttaagcaaggtcagcagtttggtgataagaagaatacgggcattcagtgccaagaatgtgatggattcgaacatattcaagctgagtgtgccaacactctcaagaaagagaaagtcttggttgctacctggagtgacagtgatgaggagaaaagctccatgacgagtgagaattcagaggaaggcaaccaagttatggcctttatggatcaaagtcatcactccatctgctcagaagaagatgcaaactccagctcatcgagggcaaacaatgaagaaaggtggcacacatatgaagatatgtttggacaatgacaatacatgtccaaacatattaaatgtctttaattgtgctaagcaacagctagaatctgagaaagctaaattggatgacactgtgaaaaagctcaccagacaacttgatgaaaatgagaatgaaatctacaaacttactgcggaccttgtgagagccaagaaagcactcgagtttattccccgtgaactactgccactaaccaaacattgcaattggaaaaatcttatggagatagaacattcgagtataagatgctatacaagaaagtggataattttgtaattgaggatccctctacatctaaaagcaataaatacaagggagttggtaattcacctcaactcacttcaaactctaaactccctgattcgactaaacaggtcagtgcctcatctggacctaccaagttgaagtttgaaggaaggaggaccttctcagatggtcacgttcagaaggagaggttttttcccattgtcattattgcaacataagaggacacattagacccagatgtataagttgcagacatatttgaaagctatgatcaatcgtcctaatagatttcgacaatcaaatcgagttaatgagaaaaagactcgaagtgactggaaaccaaaatccaacaatgcaacagattttggattggttgctcacatctcactatctaattttcatgaacgtcaatggtactttgatagtggatgttctcgacacatgactggaaacaagaatatgttggtgaattaccaagaaggaaaggaaggagttgtgacttttggtgatggaaacagaggttagattgtggggaaagctgacctggtcctaagcaggtagctcctttaattgatgttatgtacgtaaaaggtctaaaggcaaacctaattagcatcagtcaactctgcgacaataactacattgtaagtttcactaaaactcaatctcttgcttcaactaacaggtgttcaatcttgacaggaaatagaaccagtgacaattgttatgcactgtacaatcaagttgtgtgcaaccaatcatttcttgataaaccagatttgtggcactatagattaggccatctgaactttagagacctgaagaaaattttgaaattgcaagagttagaggaatcgtagatagactattgtggccatgccaactaggaaaacagacaaaaacctctcattcttctataaacatgcttctaaccttaagggtgctggaattaatgcacgtttacctaataagttctatgcaaaataaaagtttaagtggtaaacattttgttatggtcttggtggatgattactcatggtatacatgtgtagagttcctcaaagaaaattttaacacctttggacttttctcatcattggttcttcgacttcaaactgaaaaggactccaaaattgaaaaagtatatcagaaacgaagcgatcacagaaaggagtttgagaactcaatatgctcatatttttgcagtcaattgggaattcatcatgagttttcagttccaaagacaccttaaaaaatggggtgattgaaagaaaaaacagaactctataggaaatggcacgagttatgatacatgccaaggatatttcaaactggttttgagcaaaagcagtcaacactacatgttacatttgtgactgagtgcatctacagactagcacaactcaaactgcctatgaactctggaaaggagacctctcaattcatcaagatcagttcctctacattcatgatttcttcaacaaaggttacttaagacatgaacctcctaggtaagacttcaaggaccttacaagctagctttgcattagagtatg

SEQ ID NO: 188011 - DNA, 3312 bp, Cannabis indica
aatttatatgaatttttttttttgacaaaattgaaaaatatatagacaaaaaatgtagtaaacagtaactggttaattgggaataagctcggctcggcctcggtataggcggcccttgtctcaatagttgaggggctaaaaaaattttctctttttaaaattatatgttattttactgatattagaatagtatcatatttttttataattaaataaagatacaaatatttttttaatgaccgattatatttcagggttggccctaattggtaattttaatctctccctattttttcaaactatatttttacctacatagtataaaaatcaaaattttaatttaagtcttattatattataaatatgtgatgtttagctatttttatttttgttaaactgtttttcttttgttagttaataactaaaaattgttttaaatttgaaaacgaccaatagcatcatcctttgttacttgaaattcaaaattgtcagtaataatattattgtctatcttttttcacgctgatatgtaatataataagaaagacaatacattccaaaaacactatttaaaattaaaatgatatttttgtaaattgtccatttttgaagtatttttgtaagttttgataaatgacttaattatgtgattaaatgacattgttactaataattaatgtattatgtaaatagctcatggttcagagtattgatgtaaatataggctagatattttgatatgacataaaattggtagaagcgtcactagacacgaaaaaatatgggcttgcgcattattattcgcgtttctaaattaatgacaagcgtacttccaaagcccaaaattagtcaagacggatccattcctaagccaaatcaaattaatgaatcaacccacaactgaatcaggctatagtttcatattcggatacaagcccaacttacaggcatgataaagtcggaccactttggtccaaaaaaggttgtttccccaaaaagatgaaaggcccatcaagacatatccggattctctcatggggtaatctagaaatagtgaatgaagaggcatccggagacatctggaaagcatcctacttggcatctctctgacacaagatcccaccaaattagaggcttagtcccttctgtcagtcctaaggagtgcgtacaccaccaaaaggaaattacttttttgtccaaagccattgtttatcgaaattttttaaaacctatttattatatgtgaaagctaaaagaaattgatcaaagataaaaaaaaatgataatgaggatttttacgattagccttagtccacaagttaataatattactttaaaactagaaaatccttaaggcttacaagaatatctgaactctatatttttgcctgagcaattgagaaataggtttctagccctttgcatgaagggttattcgtgtatttacagtgtgtaggattcttctaatttaacttcttcccactaatgggtagttataaataacacactaacttgagcttatttggtgaagtccgacccatgaagcgcttagtgtatgctaatgtggatgtcacatcatgttgatagttgcctaaaatcgtgcactatcttcatggagaataaagacacattaaattcttgattcctaattactttctttccatatttaggaagatacaatctttggatgagatctttaggagctagttttttatatcttgggtgctcgtaattattgagaattcctctaagttggacatccagatactctctgttcacttctctcggatgcactgtctaatatcttccagatgtaggccatgcaagagggatcattcgtctggacgagtcttctacttattcgaaaagggtgactacttatgggtccagcccagtatttttatttgggtcagctgtttggtctagaatgtatattgttgacctcaattttagctaatgacattgagtctttaaagtgatgaaattataaataataatagaataataattatgagcaataagaacacaaagaattttatagaggttcggcctcgtgatgtggtaatagcttactcccctttttgttgtactactttcaagattttcaagatcagaaggagctggccaagtgaatttcttaacaaccttgattaaagcttataaatattttggtagcataagttctatctccatagtcttaactcggatcccaaataatagaatgactccactatttataggaaaaatataatgaatattgttacttaaaataattgtgaaaaaatggaaactaacattaattcccagaatcactcggctgtatacatttgatcccacaaaatgtagggatttaaacatgccataaatgagaagatatataaggaaaatatctttaagaatctaaatttactgcatccttcttggcgaaggatcctactctgctgactggtgagattctggacagaacattttgaacgagagttgtccaaatgttgcttactaaagtcttaggctaaacgagtctcaaggataaaccctcatggacgaaacattaaggaagcgcagtccgtccaagtcttagaatgctctccacgcgtcaccttgctcagtgccatgtcaccttgtgcaaaaattaggataacatttgcccccaagttcgcgtgggaacaattgctcttgtgttgacttattcagtatgttagttgctcaaatgggtgacatgtgtttgaccccatgcactttccttcatttaaggtaagctatatgcacgatgtaaatcctttgttgtctcttcagtatcttgggcatttaatgcctaccctaggaaataggatcttgggtattgtgaggacaattatggggaaacattcttctaacgcttgtacctttaatgattacttattgttctttttaggggggaaactcgaatttcaaataccattttaccgtaatactgctcgagcaatttatgaaaaggaaacaaagtgttgaccacatatttgaccaaccgacaatggagttgtatatatgactaatatcaccacgtgtacactataagagcaaataaataaaaagggacacattatttttatagaggttcggccccttagttaacgggtaatgacctacttcccttttatttgtactcatattagagataataccagtcaaatcacaagtgttgtagattcttaagtggctctcttaagattacaatagtgagaatcaagagacaaatctcaagttggtgagataagggagacttagtctcttctacactattaggggcgtgttatagagagagagagagag

SEQ ID NO: 188012 - DNA, 1602 bp, Cannabis indica
cgcaccgcgaacacccctaggtaaaacacaaccacttattggtaatgggatgccattcttaattactgctattggtagaagtatcttacaattacctggattcttttctttgctactgaataacatgttctatgtacctgaaattactaaacacttgctatctatgtctcagttaacaaaggataacccagtctatattgagttttatattgatttttattttgagtattgtgttgttaaggatctggttatatggaaggagctacctcgaggagtgcttagcaatgatctctatcaactcaaactctcttcatcttgttttaattcagagtcacaaagaaatcagagtcaatgttttcaatttcttcaaattccaagaagagtcatgttttaagattcaagcaaaatgacattgttcgttttgctcagttcctttttgttcaatctgttaacaccagtgatcttaatgtttggtatatacgcattgacatcctagtttaaatgtaatgaaaactatgcttatcaatacaaaagttccatttaaaagtctggccaaattttgtgatgcatgtcacattggtaaatccaagcataaacactattccccatccataaaaatagcaagcttgccattagaaatcatccattcagatgtgtgggtccctcaccaattttatcaaaagatggttacatatactatgttcattttgtagatcaattagctttacttggatttttcctctaaaattgaaatttgatgtcaaaaacacttttgtgaatttttaaaaatttgttgaaagaaaatttggtctcacaatcaaaactcttcaatcggattggggtggtgaatataaaagtttaactccctttctaaactctctaagtatccattttaggcatccatgtcctcatactcattctcaaaatggtaagttcgaatgaaaacatttccatatagtagaaatgggactcacccttctctctcaagcctcaattccacttctctactattgggaagcattcagtacaatagcctttctaatcaaccatctctcaacacctacactcaagcataaatcaccaattgaagttctttttaaagttaagccaaatctaaactttcttagagtctttggatgtgcctcctttcctcacctccgcgattacaatcaatacaaactcagctttcgatctaccaaatgtgtattttaatgatatagtccaaaccacaaagggtacaaatgcttgcatccctcaagtcgaatctacatagtccaaagtgccactttcaatgaaaacaattttctatttgcttctggcttcactacatctaagtttaaaaattcagaaataaacacatgttcaagtcacatccaatacagtcaatggctaccttttgttactcattttgaacaggaacttgatgaagaacatatagatattgaaaatgaccattgctcagtaacctctacgctatctcttttgactccaatcttgtagccagctgcctccacaagtcatggtaagactccatcctatgttacctcgtactctactataccacttgaaataaaccgaccaatttctcctctctctctctct

SEQ ID NO: 188013 - DNA, 1261 bp, Cannabis indica
atacatatatatcttgacataaatacaaatttataatttaccatgaagcgacttccatacaatatctatctcaatatttggttaaatgcttttgaaaaaagatgtgcaaacacttggcagcaccactacttatattaattatgactatgggtctaaacataagtgccgcataattttatgcaatgcaagtataagtttctcttttattttatgtaaagattccttttaaattacattatcaagaagcttcattttttatgtaataaaatatattctacaaattttgctctccatatttttctactttcattttcttcctttaataatactatctgcttctgaaaaaaatggtgagaacctggggcaaggagcacctgaacaaatcatattttaatatatcagagaataatttgtatatttatattaagatgaaaagatagcagcctaaattacagttaatggtgccaatcataagttagcatctttccttcgccgtaagtgaggactcccaatacatttgggaggaggtcactcatgaacatgtgaactttgtctctttttcaacaacaaaaaaataaaataaaattagcatcaaaacagcaaaagactaaatagccgcacaatatctcactctctcacgaatggaaaaaagaaaaacatcttcaaaaacccaactgtttctttctaaatataaggcccaaaaagtggggaaattactgtggcattaacacaaaatattttgttaatcccagacaagcagttgtgagtattgttactgtaagaaattaaaaagaaatgtagggaaaggcataatccccagttgtgagaaatgatttccatgattaaattccacaaatcaagtcagttccaaccaattcccaacagagggcacaaatcctctaaattttcagccaaacccattatattaggatggtatttaaaaatattttctttgttataaaaatgaagatacagtaccctaattatattaactagaggatatcattttgcagccaatttaatatatcatacataaattgtgccttagccgattaaaaatataaaaaactattacaggtgatgaagcttcagcagtgagttctagcctactgcagttagtagataatacacaagcaacctaattctaatagatgaaggttccccctgtacagcattgccaaaaagaaaaaactaaaaacagaaccattctaagtaaactctttcttaatatattgttttgttactaatttcatccacaaag

SEQ ID NO: 188014 - DNA, 3557 bp, Cannabis indica
aaaaaaaatttgtttggtaagagtgagagaagggagaggagagatggaaggagactatcctctccattcctcctactctctatcctctctaaactctccatccattctaccaaacatagccttaaagtactaatggtcaaaagttcgaagttctttagtttgtaaagggaagaaataggttgaagcttcacaaagggggtcataggcctagtctgccttagcctagaacctgccccactttaacaaaccagaaggataaacgccagcatctctattctaaaacagccttgaacttagatcatcaaaggcttttattgaaattataagcttgtgaaaacactacctatgaaatctctaatatcaattaggggctaatgcactacagtaactagaaacaataaaaacatacaagaggaacatcaatctcttaatttattgaattactgcagaaaagaattatggagtattgtttagaaaagtttctcaacgaagggctcggtatggggattgtttctactttagaaacaatgaaagcatacaagaaaatcattctaatactttttgaaattatcgaattgctacatatagaagtaggaagtatcgtttacaaacattctcattttaccttcgcagaaagcgtgaattgttaacacgacacacaatacatggggcatgctcaagactcgtagcaagaactagggaacctatactttattgtccaatatagggccaaaggagctaagcacataccatattatcaaccacatgaatccagtaaaatctgtaacactccaaactgcattcaaaacaataaagataagagaataagacaccaactataatagatcatcaagttcaaccactcattcactaatttctctttatatttcagtaaagcacataaggtttcaaactcttatttatacccctttatagccccaacaatggtgatatatatagttaatgatgcttaacccaaatcttgaacttaatttgccctaaacctcttatacacaatactcaaatcaatacagcaaagtggataactgcaaagttgtgttgtgtaaattgacagccccaaagcatagattcatcattaaagcttctaataaccatctttgacaagagatttactactgcttagaaatgtttatattgactctgagctgtgtcctatttgtgaggatggtagtgatagtcttcttttagtgtactttcgcaagtccaaaattggttggggcactctacttggctgtggatcatgatgcttggctaggatatctcaacatgaaaaggcagagatcgttgctcttggacattacctcggttgctatggcagctacagttaattatatttggattaatagaaatcatagcatttttttatggaaaagtttatatgactacttgtatagataggttgattaaacagtcgattaaggccatgtttgagtttgtttgtaacatgtagctgtggttaattgagcagcttctggtttggtcatgtgggttgttgtaatgtgttcttgttggtttgattaatgaaatcattttccttaataacaaaagccgagcatgaaacatataagggcttagaataacaagaaaattgcacccttacttttctttttctaaaactattcaataaacgaaaacgaccaaatgggttaaaatgaaacagaaatttgagcatcatggagattttagcacatataaacacactgacagaatcatgacaaattatgcacattctagctataaagaaaataatgaaagaaaggatcgaatcatggtttattcatatactcaaatctactgaaatcttccaaattcgtgtaaatatagaatacacatcaagtgaatttagttcacaatcacaaacaagtaaagcacagtaacatatcgatcgctctacaaccaatctaatcaactctcatttctaaaatttagagcaaataaatattaagttattccaccaacctcctcctctttctcatttttgattctccaaatcgtagagttcatcatcctcaatgtgcttttctcctctgtggctgtctttcagtagccaatctgtaaatccaatacacctgaaacaagaacaatcaaatactcaatctcaaagatcagcttcgtataaaagaaatcaaatacctaaagaagaaaaaactaagatcgatagtaccaaggcgaagacatgagctgctatgagaatgaccaccatcaatggaaccgcctcgagtatccatggccgtgtcggtgataactgttgtttcaccatttttgaaatcagagaaagattactgtgaatttgaaaagccctaacagagggttttaagctatttcttcttctgtacggagtggagtggggaagaggttactacagcaaaatattagaagatcaaattgtatattcagtccccaattattacttatttccacataaggcacatagtttagagagcttttcaaatttacccttgtagttagattattcatttggaattaggggtagcaaaactggtttcgacacgacacacgaccacgacacaaattaatattacgggttaggatcaagaaaattagacgcggattaaaaatagatcgatatgaaataaaaataggtcaaacaagaaacttataacacgaatttgatatgtttgacacaatttttttaataaaataaaataaaaaagatattaataataatataattatataaaaagatatgtttagtgatttattgttgagttaaaaaataattaatttaattttcaaaattgaaaatattataattttttaatttttattatatataaactatatatatagatgaataaaattttctaacaaaatttaaatctattattttctctatagttccagcttcgataatagtaaaatacgtaaaagtggatcaacacgaacacaacacaaattttttagatttgaattaaggttgagaaaattaacacgagcaaaaaaaagtcaacacgcctgacacgaaatataaaaacggatcaaataaatataacacgaatacgatacgatgacacattttgtcacccctattcagttaataacaattgtttttacaaacttatttagtttgtaattctttttagaaactcaggtgtaatgctccttgtataaaaagttagagtaataacaatagtttctctaaaatatataagttttaaaaatatttaaaaaaccgtactaaaaatacgctataaaagtgctctaaatttcttttttattttaaaatttaatagtcatgctctacatttataaaatactattcattgctctaaacatattttattaattgtttttgagttttttttaattatttaaataattataatgatgtggatcaataaaaatttgccacatgtacacttatgtacactatgacatgtttattgtgacatttaataaagttttaaacgaaaggagtaaataactaacagaagtgaagtttagagagttttaccactaataaatcagtttgtggtgttgagtgtaactaaatgtgtaattcaagtagtattgtt

SEQ ID NO: 188015 - DNA, 1041 bp, Cannabis indica
tttttcgtttttgttcgatttttacttctttttaagaaaatctgatcaaattcgtcatattctccacgcaatcaggttcaggtactaaggtgtagcgtagggcttctctttgcttccggctcctctcctcctaatgtggttagccaacgttcctcttctccttcgctatttatatttctctatcaaaatcgatgggattaactctgtattgggtgtatgtactaatcttgttatttttttatgccgatggattttgatcgttgtagctcccttaatctcttttacttttttcacccagagagctcttttcttctctcgtatctttttccccaaaatgtagctcttcgaaattggcctaatgtatctttttccatgacttggttttgtgtttagattgaatgtttggtttaatttcttcttgaagaactgatatagtgatagctcaatttctttgtatctttctgtcattctaattcttgaactattcagtgatatgtgtattgtaaatattggtcagatctatctttattctaaggatgtgcagggcatttggttgggtttggggaatagtatgtccaattaattactggcgaaaatggaattatgacttgactgttaaaaagaagtttgtttggcggaagttctgcgatttctgtcaaagacgaaatattttcaatactttcagaggtcaattagaaaatgattcctcataatatgtactagtctataggcgtgtttgtagtgttcaattgcatatatgctatttctgttaccattcggtgatacgatgggaaattgaagaaggtgccattaggtttctctaagaacacaacttatacaagtattcgctttcacttaactaggggtcctttctttcatagtgagtttattaatatgctggttttctttacagcacgaataaggatgtgtaatgcattaagttagaaccttatcctactttatcgttctcattctaattaatttgcgtcctttaaatccattacagttactgctctgtttatcatgctggagtaaaaatat

SEQ ID NO: 188016 - DNA, 2936 bp, Cannabis indica
tgttgaatttttggggtatttgagttggaatgtttggctaaattttttgaaaatagttttttaaaaaactgagtaataaaaaaacaaatgtcaccaaatgttggttttttattccttaagaataatttttattattttttcaaggatatttttttttacattttctctcactctagggttgggattgggttgaggcctcagttcgaagctggggttgggatcgggtctaggccagagttgggtttgggtcaggttttgagacttggtatgggtcgtagactaggtttgggttagggtctaggttcaggatttggtcagggtttggggttcaggacccgggccaacgtctgtagtccttgttaagatcagggtttgattggtttaaatattaaaaaaaaaaactccgtataaaaaaaaaaattctaaaacagtttatttgggctgcctcaagtaaacaagacattttgtgggttaagtggatcaattcggtctatttgaagggaaaagatttttggcaggctccggtaaaattggatgccagctggtacttctaaaaactcatgaaatttagagaaaaaattgacaaagaggatgtttatgatgctgtttagaagggtaggtttaaagccaaattttttaatacttccctaattgctgctgataaagtggagtatgcaaataatatttggcatagaatgtgtgttccaaaacaccgttttattgcttggcaagcgctgaacatccaactcttgacccgagacaacttgtccaaatttattgtgctcccctcgagcaattgtcccgtgtgtgatgctgaacccgatactcatcaacacctcttctttggctgtgagttcactaaaaaagttgttactgagataaaaaaagtggttcaacaagtttgtgtggcctgccactttggaagaatggaattgccggtgtaacaagaatcaatatgatttaatatccacagttaataatgctatgatttctgccttgatttactatgtgtggtgtaatcgcaatcaatttgtctttgaattagtttgttattctattaagctagccactaaggctagaactagaatgctaatccttgtaactttaaaaatagtgacaaaagtacttggaatgtaatatgtaacttgtagtactggctgtttagaggctgtgttcttttgttcagctgcctttgtttgtattttagattgttagtttggatgaattcttccttctaaaaaaaaaaagaaacatttatcaaacagtcttatattttgaaaattacataaattgttttatgttgtattttccaaaaccgaaaatttaatatagtgccaaaccccttgtttcttgcatgattcactctttaaccactttcacttatagttgtactccgttcaagtatgaaggatgatctcaaatcaagatagtgagataaaagagaaagaatgttgaagtcacatatagagttaggtgtggcagtgctacacgtgtcgtaaaacccatagaagcaaaagaagaggatgactgactgggattgtagtctctagttaactgcagtggaacaatttgaaatccataaatctttaaaaacttactcaagttaatagtgaaaaggaaaaataataaatcctaacccatgtgaacttttattctgatttgctagttgcaaagcctacaatttcaataactaagctatttattctgatgtgaatgaataaaagaaatcaagtcaatatagcttgaaactttctcgtggattagtttgtgtgttgattgtcggggtagctggggtagctgctctgcattctctacaaggagaagaaaatgacttaattagtctccaaccaattcctgatcttgatgtgctatgcttctgttctttcttgtgtttatcagacactccaatggcacttgttctatcacttgatctcttgctaccattggaggttgctggtgatgagcctttccgatgaggcttattcgtcttcgaatgccgctgcttcgattgaaatgggaaagcttgttgttggagcttgccatttgagaccagcagatgagctggagaacacatgctcgaatcggtggtggttgactcttgcccagctatagaaaattcgaactccgggtcttgtttgtgaacttgatggctatgagtggaaggactcatcagtttttgctgttgagtgcataccaagcctgcaaaggaaagtgagtcaagtgaacttgcatcagctgcaacatcaaaagagctcttattttgcgggtgattagccattgaattgaatgtgtgaatgatacactattgtttgaagagagccaacttatattatatacacagcagcagcagcagcagcacgggaggacatggagtagttcagtcattttgtcttgatttctttgttgctatacaaatattctctttgccggtatatatgtactttctacacttgtccgagaaagtgaaagcaaaataattaactcgttaggaagtttaaattaatgtatctgatttgcaatgttctcatcacaacaatcaacttgaaggtgatttttgtaggtgggtggattcaccaaagtaaacccaggatgtaagtggggatataccaaaggcttttgttttatgtgacgtattaaatattagtttgtgcttcaatcccattagctagtgcagactgcagaccctactacatattttttttttcttctcccaacaatgaaaaattctcactactttgttgagataacccatttgaacgagaatagtttctccaattcattaacaggggaacaaatggaatgatcatggttaagtgggtaattattttaagaaactatgagcattcatctcttctaaggatggcaaacatgggcagtggggaaggtcaggttggagcaggtcgatacccccactgctttactttttttttaaaaaa

SEQ ID NO: 188017 - DNA, 1950 bp, Cannabis indica
agattattaagagcatttttacatggtttttgagttctagtactctagcaaatgccctttatagttaagaaaaaaaatgctctttatatattacttttactctagttttaaggcatgagtcataataaatctatagatttcaattgaacctactaaattgagccacgtggttgtacgagtggttggtcaggcacctacaaaaactgatataagcagtaggggtttgactaatctccatcttatacaaccacgtgacataagctggtgggttcagttgacaaaatttaagttcgagattttcttaacattaccgtctcaactaaaactcaccgagtaaaaccctcaaaataattttacgacaaacaaaaaaaaaacattatctgtagtttttatgcttaaattatataattactaagtactgagtactaattaataatgtccaatatttatggcagcttatgcatggttgaagtgcctaagaaaagaaggagaaggagaaggagaagaagaagattgctatgaaattatgagagcagcaaatatagttgggcgtagaggaagcatttatggtgatgaagacaagtatgtaagacttagccttgtaaggacccaagatgagtttgatcatctacttaaccaactcaacatcttcatctcacaagaatccacttccaaatctatttaactattcttaaaataataataatattgttattagacatcaatagtgagtgcgaacaataattttccacataataattattaaataaaatatgcggccctcaatgtttaattacactaatttcatttattttcattaatattttggaaaatttgtagtatcatctttgttgatgtagtgtatgttacacaagttcacttcgattcagcatcaactaaccatgcaagaatgaacctaaaatgtattaatcaaaccagaagacttaacacagaaaagagcatgttctgttattttgttatgtacaaaatggtgtcgacaactgtctatagttgaattacatacccttatatagaacaagagagatacaaagacaagagtattaactaactataacggtcagtgaagaactgaccatgactaacttattagaacacgacatctagactaactaactacctatattaattgtcaagacattagatagagaaacaaaaaatgaccgtgtatatgaaataatataaagcaacacttgatttggtgcttaattaaggtgaaaagcatcatctatatgtatagagagcaaattatgtgtcgtttaagtatgaatattcattttttttaattagagtaatagttgagcatgatcgaacgattctttttaattattggaagtgaaaatatatcgaaccgtaaagtacatttaaattttgatcaaaactatgtattttattggattttatacaatttgtgtaaaaatataatttttttttcaaaaaaaattattttgtgagaaaaagtaaaaatttatatatttatatatatggaaaaaaagtgtaaggtaactaattaatttaactatttttcccttctttttttatttaattttttttgaaaacaatcccatattatggtaaactttttttaaaaaaaaacctatagaaaaaaattctcaaatatcttgttggactatttttctgacacagtgattaaaattaggagaatcattccattttttaacttttttttttttttcatttttacggtttaggttgttctggtaatttttatgtgggcatgttatgtgatttaaattgctccattggttgctatatgaatttttgtaaaaatgtaaaataaaaaaaactactttgaaatataaaaataaaaaaatcccttaaaattatcaatgaatttacaagattagacctcctcacccccaaaataactggactatttgtacactttgggtgtatttggtaatatttttt

SEQ ID NO: 188018 - DNA, 3270 bp, Cannabis indica
catttcgcgatcatcgaataatgttgcccatacattggcaaactctgttattaggttaggagattgtgtttggacagatgcttgtccttgatttttgagttcttttgtaacaacgaatttttcttaatgaatttcgtatttctttaagaaaaaaaaaatttccacaaaaatctagtcaaaggtatcaaaaaaaaattatctagtcatcaaatatttcttttttcattttttttatgaaaaaacaaaacaaaggtaaaataaaatgatttttttttttaatattctttgttgaatcaatctccaattatagaataattatagttggcaaacaagttttttaacgttaataaaaaacaaaaagaaagatttttttttattacatttataagtattattttattcatttacacgacaaaataaaatataatacacatagggttcttaatcaagcacgcgttctgctccacttctcacatcacactaaacagacctccgactaactccattgttatcgacaatctttgaccagttccaattcttattgacaatttctatcaacaccatctttatcgacaatctttctccatatctggcaatgagagagaaaattttggggagtatgtggagtggagttgaattgaattgaggtcggtggtggcgatcaaaattagaattacctatggcgatgcttgcttgtgctgttggctcctgttcttcctccgcaatcctcttccctctctttccaacgctcttattggctcttcctccaagactaaggttctgttagagagtcccaaattgccaatgtgtggaaagataataaaatatataaattgaatggactactcctctcattgccaattgattttgagatgaaaccctattcatcttattcccaaaattctaacatagtatcagagaaaaaaaaaaaaaaaaaaactctaccgattgaagtagagccgaaaaaaagggccaccaaaacccaaaaaaaaaataataatccaagagcaaagttttgtgatttggggatagttaaaaagagtcatctgatcgagttgtccaagatagtgagtaaataaaatagctatcatcttgaggggatattagagagtctaacattgccaatgtgtggaaagataatagaatatataagaggaatgggccactcctctcatggccaatttattttgagatagaacccattcaccttatcccaaattctaacaggttccatccctatccatttcccatccctttctccacaatccaactccaattctaatttttcggtggttttgattttgcgatatgtaacaataacaagaaaggctagaaaaaattcctatgtcggcccaggtccttcttagtgacccttttacgactaaactaatgaccaattgcttcaactatgttaagaaagctttgatggtcttaaattatgttaatggagccaccacatcctctggcatgccatattttgaggctgatgttcctggattaatcttggttggtagctttggagctttcttgtacttatggcgaaaaagaatgttaagttagctaatgcctattttcttgtgtattattgcttttttcaatccttttctggattagttgaagatgattataagaaaggctaaactataatttgaaggagagtttgctgttcatagcatgtgtccctcttgaaattgtttttatgagtaataaaacatagggcagttttacttgatgactaaagtgtgataatggaaaatataataaacttttgaaggaaagaaagtgccattaacagtagttgacgttgcatcaatattgaaatatttaatttaaatttgttggatgagattctgatgtatataataggggttaatcaagtaaagggtttcattgagaatattttgaattaatctaccatggcccactctgattgtctttgtactgaaggctactataataaccataggtgggcttgttgctggtgtagtggtgggttcagcaattgagaatttgttgcaagtagatattgttgtgggtttaacagattttgtccaaagtttgataaaaaaccaagaacaatagacagccaaagtttaaattttcatgtgatgttagagaatgcactataggtatttaaattatcatacaatgtatattgctattaaaatgagcattttcatttatatagatatattattatatgcaataactaaatttgtttctcagttgctgaggttaccaaataatgtatatagtcatccttactttgctttataataaagaactgtgaatgtggttggctcaaactctatgctatgaaatttgtctacaaggggttttgatccaattccagtccaaggattgtgtaacgttgcctgctcaaactctgctaattaattgttctatgaaactctcttccatatgtggttctacagttctacttctcctttattctccccaatttcttgaaaaattgcatgccaatagggaaagagaaaaatccccaccaatgtgtaatttcgattttgtaaagagagacacagagactttagatggttagtgtgttgaaaggtcccaactatgttgtatctagtttttggtctacattggtgtattcatatgaaaggattttatgtgtttcttcgaaaattggaaaaataagtatttagtaaattaattttaaattgtgtttttaataattttgcttttatctatttgtgtgtattattatctgtaaaatttcaccttaccttatatatgtgaataaactaagaatattgacattatgaatttaattttcttatcgtcttaggagcttgccaattgccacgaaatctgttaagaaactagaatgtgaagtcaagcaattaaataagataatatagatattaaagagaaaaatagtagtataagtaatgtatgaggaaaatggtagtaatatagatataaaagagaaaaatagtagtataagtgtgtcatcatattatttataaacttttgacaagttattgttgtttgttggtgctgaccttgaaaagtgatcaaccgacaacggggtcatatagatccgatgcttgccacgtgtgtgcacgaataagaataaaaagtaatagataacgagatatattgagggaattactattcagatcgctataggtgagatctgttatagtagccttaggattacaatgtatgaatcgatgtttggcagaactcaagtgttgaacaacctaggctaggcgtgtgggagaatgaagaagagagagagag

SEQ ID NO: 188019 - DNA, 3290 bp, Cannabis indica
tcatttgggtgttttttacatttcagaaattaataaattttcaacaacatttatccttttttttttttgtttaatttagtgtcgttttctttctttataaccaagtaaatcagtggataacaatcaaattttattgtcgaatttgattgttgcagtaaaaaagaacatagcttttatgatctgtaatagattgcatacaactttattatatgaattttggctcgctttttacatgttgaatggcgcatttcgtagggtgtgtttgattgggatttcatttttttgttataccttttttatatcttagagagtttttctccttattaaagttagtaatctccaagatcagtactctatttgagtaatgtaatgtaacttaggtaataggcatttaagtttcattaacctttcaaaagtttatatactactgaccccctaatcaattcatataggtgaagttcattcaacaccttgtgtatcttttatgatttcattttagataatacacaatacacttaaggtccctttggtagtattatattgaattgtcttatatatcatagtaatatgtttggtatataaactataatgattttgatataaatcaaaatttaacataatattatacaaaaatgtgatgtacaacgcaatttaatactttacaatctaatactgtaccaaatggaaccgtacattaggaattccagttcacttctattatgtgctttaataactaatagtatatgaagaatacataatgtcaatctgatcttccactcgttctctttattttttaagtaccatcctgatgtcaacaagcaacctggagcaactgagaagtttaaagaaatcagtactgcatatgaggtgtgcaatctcactttttggtttgttttgttttttctataaaaggaatatctttgtatcaaagagattaatggcattggtgtctactcacttcacctcctcccacatttttcttttcttttcacatttatgatattgtcttttgaattctgaagtacaacgctatcaggtgctatcagatgataaaaagcgagctttgtatgatcaatatggagaagctggagttaagagcacagtaggaggaggatcaagtgcttatacggtatttcatgttcttgttggatggacatatgggcatgttatttagtagccttgtatcagactagtgacagttagtagacatatatctttgagcaaatcttactcactctaattgtgcacctaatgggaagaattgaaactttcttcttagttttggtggttcaattacatatttctttcattgaaagctctttcttacttaagtgagtataactttttttaatttcttttatgttaaagactgaaacaataggtgtaccagcaactattgaactgtgtagtcaccctcatgattagcttgagtatagaatcctacaactaagcttattctgttttctttttctcacatgttggtcagactaatccatttgatttattcgagacattttttggaccgagcatgggtggattctctggtatggaccaaggtggatttggaacacgccgtcgtagtactgttactaagggtcaagatatacggtgagtactctttaaaatacaaattggttcttcttactactacttgtgtaatgaagggaataataacatttattttctatgaatagtcatgagaaattaattttaagtttcatctgttagtatcttctactattgtgagaatgttggtttggattgttatactaatagcaactcgtacgtgtgaaagaataggtcatgattaatacaattgaaaaagattagtgtcgtcaattgtctctctcattcttacatgaatttaatcacccttgtgtatcaaactatattcactttattcaaatatatgtgcagatatgatatcactttagaattttcggaggctatatttggagcagagaaagaatttgaactttctcatctggaaacatgtgcagcttgcactggaactggagcaaaattaggctccaaaaataggatatgttcgacttgtggtgggaggggtcaagttatgagaactgagcaaacaccttttggaatgttttcccaggtaatgcgtcactatgtttttccatatatctggacatgtttctgcacgatatcgagtttagttgacctgtgctgaataattttgtagtgtagtgtaattttggagcccacctggttggatggattgctattttatttgttgatacttgctcagtcacatccaattttaccattaatttaacaatcttagcttttttcccctcctgcaaactatataggtttctgtatgtccaacttgtagtggagatggtgaagtcatttcggaatactgtcgaaaatgttcaggcgaaggacgcattcgagagaagaaaaacattaaagttaaaattccacctggtgttagtacgggcagtattctgagagttgctggagagggtgatgttggaccaaaagggtatgaagttaacttttcttattataaatgttatgtggaagatcaaagaagaaatttccacttttccttaggtgttgagtgtccactggtttaataatcaatatagatgacaatttcttactcatgatattgattctaaatttggcctctgaagtatcatctctcctcttatctctctaagatcctattatccagaagaaaacataaattttctcctcttataggatttctgaactacttaacatcaataggttgtgcactttatgatacaaatgatgtcactttgttacatggttcagaagctaaaattttaactttgttgttacatcaggggccctcctggagatctttttgtatatctcgatgtggcagagattgcaggaattcaaagagatgggataaacctcaattcgacaatatccatcagttatcttgatgccatcttggggacagttgttaaggtatggtattgtatttttattctaggccattttatacaagtagaagaaacaggtagcaatgctaagtgttatgtgtcattggttctttgtgtgcaacctgttgacggttttatggcgttttatcaggtaaagacggttgaaggaatgactgaacttcaaattccaccaggtacccaacccggggatactctcgttttgtcaaagaaaggtgcaccaaaattaaacagaccatcaatacgtggtgatcatctgtttacaattaaggtctccattccaaatcgtattaggtatagcataagctttccttttctctcttgttatgg

SEQ ID NO: 188020 - DNA, 4780 bp, Cannabis indica
tttaattttttaattttttttattagtcactattttaataaatattaaaatgcatgtcattcaaattattgtatatattactattttagtgtaatgatttattttagttctttaaaaaaattatcattttattatagagtaaaatgatggttttatattaaattttgtaatttcatacctatcttattcatattactatttctatgtatatattttcatacttctagatctgttcattcttatttacatttttctttctaagtaaaacatattttaaagaaattttaaaattaagtattacattattttaatttaataatttttataaaaaatagtagtttacgacataaatacttaaatttaaatcccttttgtaagtatttgacggttaagtgttaaataaattgacatgtggtaatttttaattaatccagatcattacatttttattatttttttaaaaaattagtttaaatatactaataaaaaataacacgtggataatgacttgacatttaacggacaattatttacgaaatttaaaaaatataacttaagtattattaccgttaaaaattaaatttaaatattatttatgcaaaaaaaattattctataacaaattgttaagcaatgtaaatcaatgcttactattattataaaaaattattaaccaatcctaaaccacatctcaactcaccacactcttgaagttatgggtaattgggtaatatatgagtcgtacaacaactcaagtctctcatgagtgagttgtggccatgttaaagcattgaccaatgggctggcccaccatcacgtggctactgattcttgctctttggagagtttgtaaaggccttttctctctctcttttagaaaattcaacatatgggctgaaatttggtaaagaacatgccaatctgattagctagttttaactaataacccaaaaaaaaaaacacaatgcttactattgcttttaatagataagaagataagataacatgataagaaatcaccaccttcttctatgcacatatagaaaatgtgtacatatattggtgtttagcaattagatgatgactgttgctgttttcattttcatttagttattattttctggcttgagttgtccattattaatgtttttattattcaattaaattaaagttcactaaagaacaacagaacaaacagcctaagctaagttacacaagagaataaaaggaaagaataaaattagggttgtgactagtatgtttcatcattacaaaaaagagagaaagagaattgagtttgttatatactctaattcatgtcaacttcatatcatgcttgaaaatagaattatgctcaatccaagttcatctcaatcgagatctcacattacatcaacttatttgtctgaaattttatttttacttctaacttctcagaaaattcttaggaagaaaactattcaatttgatttttaaaattgaaatttattgattatccaaccactaacagaagtatttttaagttttaaaaatcgaaaaaaaacttttaaaaacctaaccaatcaggatcataatactcacgtttttcttgtatgacctttaatacgctctaacattactaagctcgtgacacgaataatattgtattattgtctttttatacacacaatgccctctttatgctcaaatcaaacctaatcttagtaaacattggtaagaggcacattattattcaaatctcaaccctaaagccacaatggttttaataaagaccataacccatgatgcatatttcattaattgactccaattttcattcttcaaaacaaaaggccactaattgaagctatatatatatttagtgactgttacaaaccaagttgtgacactagacaatgctaaaggtatccatatccctctttctagtttcttcacttggcaccacatttttcttatgtaaagccaccaaaagaaaagctaataatatatgcatgcgtatgagagagagagagattgtttttaaaaataaataaataaataaatttaatttaattttaatctttggtgaatgtcagaataggcagtgaatccaagagaatgctcaagtgtaggtggggaacaccattgttgtaatgtagccacatctttcttatttatagtccttttctcttttttttacttgtaatttcaaatgaataatgtacaaaaaacatcaaggactgcttgctaagaattaatacaaatacaatacacaaagtacctcttcttctcttttctactatttctactacatcactgcgtttcttgttgtttcttttgtcgtttcacacactaaaaacgttttagtaatataatgataatgtttttttttttatataaaataaatagttcttcatttaaaagctaaaccacatgccacactaaaattataagagtttttcgctgttaaattctcttaattatcgtttcacgtgcacttaatccttcaaatattaaggtagcgtttggttgagatgaatgaaaatataggaatataaatgagaatgggaaaaaaatcatgcattgaaatggtcttttctttcattttaaaatggaatagtcattccaccaaaatggtagaaaggtcattccattgcaatgacattctaatattttaatatgcaaccaaacaaaagaatagaatgaagattgttacatttcctttccattccattccatttcattacctccaatcaaacaccacttaagtgtcattcatttaattactaatatggactacttaagtataaactattgtacacgtgacacatttatattggtacacctaatattattatttaaaaattataaaaaataatttcaaaattcatattaaaattaagaaagcgataaataaatacacaaataaaggaaaataaaaaaaaatagttgtatttttcagtaaccctaaacctaaatccctaggagcccatctctttgaccctatctcttctgcctccctcactcataaagttagtatattgagaatcctggaacacaaactaatgatggttgcattcttccttcatcatcgtcattcttttactttgaagtaactaggtagaatttgtagtatacttcctccaaataaaaaggtctccacaatcatcatttttagaaagttgtttactcacggttgccagtctcggaagggagttcccggatgtctatcatgtccactccaggtccagttcttgggatagctagcctcattccaggatggagctctagttggctagtcttccttcctggagtggtagttaagcgtgcttgacctggggtaatttcaggatgggtgacctcttgggaagttttcccaagaagcgggcgagtgaggacaaatcacgttggaaagactcgtgttggtttgcagggtcagtcatcattccatgaagcaactagagtgatgtactcgtgtataagagccatcattctgtgggtgtaagggcccaatagaggcttgaaattgggacgttacaatattgtacatattcttgctcaatcaagaaggattgtactgtaccagtatatatcttggtgttgttttctttattttatgtatttattattttttggtttttcattactctgtttgtccttattttttactgtcgattattgttcttgatctattaatattgtcattactaatcgttttattgtttaaaatttaattaatttaattttgcacatttagtcataattttctcacagtaattatttggaaatgaggtttcaaacaagctctagaaataaatatttagttacaaattatgtgtaatcttagttacaataacataatatacacaaagaataaaaattattgtgattaaaattgtgattaaaaatacatttttaatcacacaaaaaattgtaatcatattcataaaaaaaaaaaagaaactaattctttttactacgatttttttagtgatgacaaataggtataatgataaattttttagttataatttttttcactttcactaaaaatatattttttaatgtagtgtaagtgtggcattaaaaacaaatctaaaatattataactattaatttatacatattgagagtttgagtttgactggtttaagagcaaattatgaatggcttaaagaattttgagaaagaaaagtgtgaagaaaaataaggtatgaacggcgttttagtcaaagttatcaataatagtatagtagagagtttgacaataaaaacaagttaggtgcccacttgaaaagcacttggaaaaaagaaaaaaaaacatggaagtagagatggatttgaaaacatcctaattataataattatcattatcattattatttattttaagaagaaaaaaacaaaattcaacttatttcttacttgcaaaattgagtgagaaaaaaaaaagtgtaataaagatatatgcttaatgtttttttaagtgctttaataacttctcaataatggtttttgattacatagagaagaggtggttccccatcatgctagtatagtagtagtagtagtaaaaaccccattaaaaatgaccactaataattggctttttgaaaaatgtaaatagattatccgtttcttttatcacacccaaaatttcctcaaaatcataacaaataacaaaagaaaaaaaactataaaataggaatattatttttgtttttattagtagagttacttttattttgtgtagtcataaatacagcttattattaaaaaaatcttaaataatttttaaaaat

SEQ ID NO: 188021 - DNA, 1953 bp, Cannabis indica
ttttttttttatttttgtaattagaggtcaaatatttttgtcttttcttgcagtcacgaaggagaaatacttggaacattacgttttggacaacgtgtgaaatctattggaaatgaacctgtgattaatgagataactgaggacgatgttaatgatttgagtgatcaaattcgccagttgaaggtattatcactaagcatttttctctgttttgaaaactgctatattgaagttacatttttatatttgtttcttatctttcatttaattattattgcaggaagaacttattagagcaaagtctagtagtactaacattgttgtgagtaagcatgggcattttcaaggaagaaatgtacgtgatagcttgaatcagctaagagtgagtctaaatcgctcattattattaccttgcgtagaccacgaatctgaggaggagttacacattgacgagggtgatgtaaaagaattacaacagcaactgaacaagctacgtaaatcttgggaagaaaatgtggaagatcaattttgcgatggagattcctctacccagctggctgaaatttgtgagaacgacttgaatagtgaagatgatatgaagggaatagatgaagaatcagaaactgatgtagtcaatctggaaaaatctcataatgaactttctcatatggataacattacattgacagatgacatcagaggctccttaaacacctcaagggctgtcaattcagatattagaagcagccttttgataagttcatgcaggccttcaatactccaagagccaacattgtcagagtctccaaaaataggaaagagcctgaggaaaagtgtggctgtttcagcgagtcatttggatgataagaacaatgttgtagacaattctcagacatcaaatgtgttgagacagtcccttagccagactgaaagtatccgatcttctcttcggtcgagcaagatatttccaggccctgcagaaaatttggcggctagcctccaaaggggtttggatatcattgaaaaccatcaaaggggctctgctttaaacaaatctgttgccttctcttttgagcacttgacactgcaaccttgtcctgaggttgataaatcgagttctgctggtcaggctatcctttgtgcttcttgcagaacacagattaacaaaaaagatcccaatgacgtccaagatagtttaaagacatggatagtaccaatcactgaagatggagactctaacaaggtgacagaatatgcaaagatggcattatataagcttttcttttaatatttattctcgttctttactgattctttttctttctgttttgtctgaacaggatgcaacagacataaaggaagaagctactacgagaggcgatcttgaaaaactttgcatggaacaagcagctagaattgaacagctgaatcagttggtaatgttatcacctttggagcttggtgatttgtgaataggacattaatttttgtcttacattatcatctcaaatttgcaggttgagcaatatgaacgtgagaaacatagttccgttttagaaatcagtcaagaaggcaacagtcagaaggaaataatagcatttgatgagtctcgagatggaaatactgtaagaatttttttgtcttctttaattcagcatattcctcttttcaagtgctgaaagttttttttacgatgttgtgtttcctgcagcttttaaggagcaattctgataactatgagatcaaagaagttcagaatgaatcagtttttgatgtgaatgaaaaggaagcgcttctcaaggaaattcaaatcctaaggagcaagttgcagtcagattccagtgcatctttaaacaagtccacagataaactaaggtcatctttattgtcacgatcaatcaaactgaggagaagtgatatcttccaaaataacaatgaagatgagttggagaa

SEQ ID NO: 188022 - DNA, 2233 bp, Cannabis indica
taattaattattaaaataaatccaatggttaatggaattttatattgtcaaactaaagagctaacctttaactgcatgacacgtggcataaaacaacctatgtttcccgtggatatagatgggatacccgccgccgctaataaactactaaagtggggccaaacgttgcaattgtccaatctgtcatattcgctttttctttgcctttgcaattcttaatttacaacttgtctgagtcttcagagtcctaccaaactgcaattccaatttcaacttctcccatcgatcacttccaaacattaacaatggaggattccaaacaccaatcgattcaccctccatcaggtaccgattaaccactctcttctccttaatcaatttaccatttgttgtgtatttctattggtcattttttatttgttatttcgtgtaaatgatgataactcaatcaccttaatattgtattagataaatcacaaacacccaatttgtctgagagagcaaaaggagagatagcacatgttcatcacaaggagacccatggattgagagatgatattgatgtgaaaaccccattggaggatgttagagctcctaatttgtttgagcgagcaaaagaagaggttgaagctttaatccatacaatccatctcaaagaggagtcttcaactcgtggaggaaggtactgtaaaagatccaaactaagaccagagttatatatatatttataaatgttcttgaaatccaatgctattatttggaaaattattgtgatggcagggatgaagatagaaaggagaaccacaatcagcagaaacccatatctaattcaggtatatctcatgaaaattgtagtcattagtacaaagttgttggataatgtttgtttcttcctgtatgaaaattattaattggagcaaaaagaactatcacttagtgaatactgtcaacactgtatggttttggtttctgttctttgtatcaatatgtttcttacgcttgtctatgtctacttgctttgtcattaatgcatgaagatattttgttccactgggtttggtatgcttttagcttttctagctgaacattgtcatgggcaagattttatatgacatggtttgtggtactttttctaaaacacctcattgaagtgaactcttttgagcttttttactaattactgcattgcttgttttttagaatttcctggtttagtttgttgttttccactctccacaccattggttgttcactgaaattttgcagagatccacgtggagacacccaattttattgagaaaaccaagcaaaagattgaagaaatcatacaccatgagaagtctccacaccaccatcacagagaaacccatggtacgagtgatgacaatgacgagaacaccccaattgatgaggttaagggtccaaatatatttgaaagagcaaaagaagaaattgaggctgtttgggagacaattcttcctaagaaaaacctttagaatttttcttttagtcctggcacaatgaaagggccttgaaatttaatagtttttgattatttgtgaagtaaaaatgtggagcttggaatcaaggatgtatagactagtgttaactgatccttttgtaatgatatatgctgtactgtttcagacaaaaatgatgatattaatcaccattgtatcaaaatatatattagccgccctatatacactcttaaaatagatgtagtttaaatttttttctgtttataatttatagttatagttatttaaaatattttgtaaaatttaaataaatttaacatgctaaaaataaaatttatataatttattttacatgtgaattaagacatcaaacactactatgatatattttaaattctttaaaattttacgaataaaattattgaaataaatttgaacaaaatatttgaaggacctgaagtatataatatacataattgtttttattcactggcaatggcaacccctactctttaagcttctctcctcttacccttcgaatccacctagctatggaggtccgatttatgtttatagcaagttttgggatttaccagcatggtgccaaaactggattttctgattatttataaggaggtcttaaccaatagtcgttacttaggcaagtctcatcggagcctgagccttccgatgttggcctcaatcgcttctcgcagaatctatagtctccccttttttgagttctttaccaa

SEQ ID NO: 188023 - DNA, 2542 bp, Cannabis indica
tgttatcatatgtctttactatctcttcccagtacccttcgaaatagtactcgctctctaagtaaatcctgtccgcccatttctctttctctttgtagatcaagtaagccagacccgtctgatcgtctgactcagggaaagccttgtccggaaatgctgacctaagaatacctccccacttttcgtaatcgggagtttgtgggcccatcttggcccaaacatcgatgaagtccatggaccattgacagttcctgatcaagaatacaccggcgttgaggcccgtccaactgtgagtctcgtgaatcagatgggcccaaccatgaacgatgaggttgtgatccttgtaacgttccagtgggagcttgaaatccatgtcagtgaacaacgcgtccgagtcgacccaccagatccactcggcctcagggtgagccatcatcgcagctcgaaccacagggagcttggcccaataagagcccattttcgggtggagcagagcattgttgtagaagatatcatagccgtgaattcggcaatagtcaactttgttcttgaaaaacctaagcaataaatgatcacctattggattcttacacgcggacggctgtgatcccgtcagcatcaggacgcgctcacgcgctgctccatctcctgctccggcgaacgaagggtgcgtcctcagccactcgcgccgcttctcatcccaacccttgaccggcttctcaatcgagtaactcaactccgggtcgtcgtagaaagttctctccaccgagtcctggttgcgcatgttagctccttgcacactcccggcgcattttagcgcttcttcatctcctctggttttgacgatggggcgtcgaaaatcggtgccgcggttgggattaggactcgcaatggagaagagagaccaaacgagtaaaagggcaatgaaaactccacccagaaagagcaaaccgtctgaaatccacagtgaggccctgctacgaagactgggtttcgccattggaggagtttcgtagtgagctggtgagaactcgggggagaccattataaggaatggagactggaaagggacagttgggatttgagtagggaccaatggtacttgttattgtctcgactcgataggattacctaacaaaggcgacgattggcggccattggtgatttgtaagcttctctattgtttttcttgttgggtttgagagtttgggttggtgagagaccgtgtgtgtaataaaatagagagagagagcgtcggttttggaacgccggatatgctataatgcgccataaaggcgtgatgctcggtatctaaagtggggtccccattgatataaaggtgacacgtattgactcaattttaatgttggcagatttaaatgccacgtggaaaataaattaaaaagaaaaaacggataaagtagtagagttaaagtgttaaaagtgggaagtgagattgctttttttaagggtttatgctcgagtttatagcgaaatggttcaaaatgtccccaatttttacgatttagtgtcggcgtctttattcacgaaaatgaaactcagttacttaaggtcaatttagaatagtgaacagagtacgtatggaagggtattacggtaatttagaagggacaatggcatatggagctcgtggaagaagtaatgaaaggtgtattatttgctttgtgttagtatatcaagtaggtcatgactgtgtttgtgtggttacaaaaggatttgcatgcaagattttaaagtgtcagttggaccataccaaaaatataaatgtatgaacataaattttggtgagagatgatataaaagatacaattattactttatatatactagtatgaaaaaaagttgaaaatcatttcatccatttcttaaatatagacaatataatgtgtattaagagtcaataatagccgttcatctttgacatataaagcaactattagaagatttagattatttattttttagtcaaaagaaagtttaagtgacttgcccacattgcaatgagtgcatgtatagtattattctttagtcatcgtaaaatatggaagacccaacaaaggtaatgatgtttggatcacattgatcagctttagaggggaaaattatccttcaatcatgcagtagttcatgccccaaaatgcacataaatatatacaaatatttttaaataaaaaagatttttttttttaatttttgataaaataaaaaagagaattaagaaaaggaaaagatggaaaaggaagaaaagtaaaaggagaaattaaataattccatatgaaaacttttgtaaactattctcagtcatgaatttattaatgataaaatggtcatattattcttgttttgtttttattctatatatttttgctaaatttacgcaaaattaatagagaccaacaagctagtgtgtactggtgggtaaccttaaactcatagtgacacgtacataatcatgtgtccatatataaatgagattgggagtatgtcccaatcctcattaagctaaaggcacttgtcaact

SEQ ID NO: 188024 - DNA, 3803 bp, Cannabis indica
ttattacttaagttaatgagaatgtgaagaaccattcacactcaatattattttcctaataaggaaaagcttactttgcattatgttgtttttattagtttattattggctattgagtccataatcttacaaatcgtattatatttttacacattatcaatataagagttaaaagggagtcttacttgtttcgagcgagagaaagttgccatgcgcaagattcttagacgagcctcatttatcaagttgttgcgcgcattgtgatccaatcttaagcagttcaaaaatacaagctcctcgctacgaacagggaaatgatcccaaccttgttgtgtaagggctaacttacttacagtggacatagttttcaatgatgtgcaaccgtgcgcatcaacaaactctataaacaacggaatctctggtaaggctcgaagattcttacaattgcttatgtcaagttgtttcagcttcaaaagtttgctaatacttccaggtactctatcaattatgcttccacttaaatccaaactttctaatgaggctagcaaaccaagctgctcaggaatttctaacaggctgcagttgctgaggttcagtcgactcaaagactttaaacctacagacattgttggaggtaatgcatttagcttcatgcaaccagaaacattgagaataacaagcttttctaactggcatatacttttcgggatcagctcaagctcgcgacactgctgcagttctagtgttttgagacgaggaaattttgcaatggaagaaggcaaatctctgattgctgtgcttcttagataaaggtgttctaaatttttcattggttcaaagatttcaggtagattcgacaactttgtgcaaccattcaagttgagatattgaagtgatatgaatttttcaaagctacttggtgacaatctctcaagccttttacagttagcaagtaatagtgtctgaagacaagtgagagattcaattgatgaaggtagaacttcatgtatgtttgttccgctcatatgtaatctttgtaaattccttggaagttgtggaaacttgtgtatagaagaacaaccactgatatcaagtgtggtaagcttaggaagatattccaaatgaaaagaagcttcggttaagcttcgacaatgctcaaggtttatagactctaaatttggagcccggatgagactgggaatgtgagtcaatcgaacagaataactaagatcgatcttcctcaagttcacaagatcctgtcaaaacaacaaatgtataacagtcaacttgtagaagtcaagtgtcacttgtatctatgtttttggtattttgacaactcttacaacttttttttttgtttctatgtaacagttaacaacatagatatagacatagatatattttgaactttgttttcggccaccgttaattattttaagtttttaaaaaaaagttgaaatgtctgatatataagaaatcatgcataaagttaaatagataaattcctgatctacttaattacctggactccatcccacattttctccaaattgctataaggcatgacaagttcaacaagatttttcaatgagaagccttcagccaaagatgtcaaagggaattcctcccagtacaaatacctaaccgatttaatctgttcagagaaagattgcaaagacatcattgtgttggtagaagaacggatttcgagcaatcttagattcctcatactcttgaagactttattcaattgaacttctccaatttcagacatgtcaagacatattccttcaacatttagagcagcagattcctatacagtagtaccattaagaaaacatgctattagatagatatggtgaaaatatgcattgcatacatacattactttatactatacagaacagaagtgtctataaatgttttaataattagcatcaactgtttattttcttttcacttactgtgttatgttcaaagatgtgtagaatgttttcattagtaagcaacctactcctcttgttagtatcacgacgaacaatttcacgagccatttcaacaatcaaatcatgcatcttaatatgattgttggcatcaaaagtcaatagaaatttgtccctcagatcattcaccacgttactagtagagaaatctcggccatcaagtatattttccacagtttctcggtccttgtttctgaaaaaacatgcagtatccaaaaatacgcctttttcattgtcgtctagttcatcgaaacttattttcaccacattttgaattcctatgttgggaattcttctcagcttagccaatgctttctcccaatcttgtttgctcttgtatttcaaacatgatgctaaaactctaagagccagtggaagtccttgaacatattccacaatctcttttgacaactctgtgtaatctatttcggagaaatttctttctcttgatgcaatcgaacgaaaaagttgcaaagcctcttcatagttcaaattttcaacctgatatacttcattagctccaatatttttaagcacttgcagacttctagttgtaacaataattctacttccatagccaaacagatcatgttctcttgataaaaactcaaattgatttgaattattcacatcatcaagaactgtaagaactcttttacgacgaaaaccatctttagaataaatactgctactcaatgtcgacccaaaagacaacgaatattgatcatcatcactacttaaactttcttcctcaaacagttcaccaataagcttattccgtagattcattagttcttgactatttgatactttgtctaacatttccaagaaagcagctactttcaaactgagaagcaacacgttcatacacaacacgagctagagttgtcttaccctataccacctgcacccaaaatccctataatacgaacttctggtgacccaatgcgtagcaaggatatgatcttctccacacgggattcaattccaaccaagtactctgattccttattatctaatgattttagtttattcaatttactcaaaacatcttccacaagtaactcaaccaattcggactcagacctattaagaaagtaatcattaatatctagtgtttatgaaaaagccacccattctctttaattagttagtacaaggaggtagtcaaaaactaagaactcaaatgaataagtcaaggtaagacacactaacgtggagtttagttagaggtaatgaaatggaatgcaatgtaaaagaatctatttttgttccatttcgttctttgattgcattttaaagtattgaaatgtcatttaaatgaaatgacttttctataaatttggtgaattggggctattccattttgaaatggaaagaaaactcattccaatagaatgaatatgagaaaagatctaataatatatttatcaatttcttttatgcattttaaatatctttacatttcattctatgcttattcctattttcattcccattcttattccaatttttttattcctcccaactaaatgcaacctaagtttggttcccaatgagagaaatctaaaaaaagtgctacaaagttttacattgacaatgtgtgagagctaatactatatacaagacgtaatttactcttttcattctcaattggggttcgtttgggaagctgattttcaataggcatgctcaacatagcacaattaacacatatatcagccctaaaagaaacaaaacggctaaagattattttccaattctcatttacaacaaatttttgtaaattaattaattttt

SEQ ID NO: 188025 - DNA, 6321 bp, Cannabis indica
aacaatttaaatcaatccagcaatccaacgtaaaaatcactgtagcaaatctaaactataaattacaaaaaaaaatttaaaaaataatatataaaataatttacaaaaaaattaaaaatagataattaagaacacaaacttcctccatcaaagcaccaaaagacaaaatatagcaaaaaaaaaaaaaagcaaagctgtcaaagaaagaaaagttttgtcaagtcataaacttcttcatactatatggagcgtgtacccacgcgcttaaaagctgcgagtatgcaaaataagcaatctgttttttttttttcttcttaatgttctttccagaactacttatgttttgtttagaagatttttatatatatgacataatagataattgatgataataataggctcttatttggccggttcaaatgggaattcatttattcaaccatgcaaacctaaccgtgttgaattaaataataacaaaaaaaaacccaaaaaaaaaagtagatcattcattcatatataatatggtttgtgtatgaaaaaaaaaacatcatgtgaattgaaaaacctttaaagtttcaatctttatttgttttttcatctatatgtcaagctagtttgtctttcttttctttcttcttagccaaaaaaaaccccattaaatccacttaaagtttcaacctttaagtgtttttcttcatctatatatgtcaacctagctagttcatctttcttttctttgttcttagccaaaacccattaaagacactaaaaagtttcattctttaagtgttttctcatctatatgccaaagctagtttgtctttcttttctttgttcttagccaaaaacccattaaagccctcattatgcagttgaaacaactctgcataattttaccagctgatttggatgaaatagatgataatgatgccaaaaaaagtaaccccaccaaggaatatgaggccaataaccaatcccaccgtagttgtgggagtcatgttgttgatttgataagaaattatgtttctgaaatctttgataatatcagaagaagaagaataagaagaaaagaagaacaatctggggtgttgttttttcatgacactgatggaatgcaattgacagataaagaagttggtggtgaaaatccaagaatctttagctattcagagctttatataggctcaaatggctttagtgagaaggaaattcttggtagtggaggttttggtaaggtttataaggcaattcttccaagtgatggaactttagttgcagtgaaatgtttagctgagaaaggtgagaagtttgagaagacttttgttgctgaacttgttgctgttgctcatttaagacatagaaatcttgtgaggttaagaggttggtgtgttcatgaagatcagcttttactggtttatgattatatgcctaatagaagtcttgatagagtactcttcaagagacccgaaaatatggggttagttcctttgagttgggatcagaggaggaagattgttaatggtttagctgctgctctttactatcttcatgaacaacttgaatctcagatcattcatagagatgttaaaacaagtaatgttatgcttgattctcattacaatgctagacttggcgatttcggtttggctagatggttagaacatgagcttgatgagtatcaacagcagcaaccaaagattaaagataaccaatttagacttgctgagactactcgaattggcggtacaataggctacttaccacccgaaagctttcaaaggcgaagcgttgcaacggctaaatcagatgtttttagctttgggattgtggtgttggaggttgtttcgggtaggagagctgttgatcttacttatgatgatgatcagatcatattactcgattggtttcgcagactttctgatgagaaaagagttttacaaggaggggatactcggcttcaagatgggtcttttagtctttctgatatggaacgtttgatccatgttggtttgctctgtacattgcataatccatcatcaaggcctaacatgaaatgggttttggaagagatttcgggtaatatggttggaaagttaccacctttaccttcttttcagtctcaccctccatacatttctttgtcatcaaccacaaatacaagctcaagcaatggaaactccacaacaagatcaatcacaatcacaacaacaaatagtacaacagccatgtctatgtcatcatcatcatcaaactatgtaacagcctcaggtgaaacaatctatgcaacagcagaagatggattaagccatacaacaagtactacaacaaaaacaaacacttctcttggatttggtcatgggaaagtttttcccatggttcaaacaccaagagaaatatcttatgctgagatcatatctgcaacaaacaacttctcagaatcgaaaagggtagcagaattggatttcggaactgcttaccaaggcttcctcaacaactctcatcatgttcttgtgaaaagactaggcatgaagacatgtcctgctcttaggataagattctcaaatgaattgcagaacttgggaaggttgcgccataggaatctggtgcagctgcgcggatggtgtactgaacaaggcgaaatgctcgttgtttatgattactcggcgaataggcttttgagtcacttgcttttccatcatggccatcatcatcatcatcatcatcatcatctgcagtggaatcatagatacaacatcatcaaatcacttgcttcggcgattcattatcttcatgaggaatgggaagaacaagttattcatagaaacattacctcttctgctgttatacttgatccagatatgaatccaaggctcactgcatttgctcttgctgaatttttgacacgaaacgagcacggccatcatgttgttactgactcgaagaaatcagttcgtggaatattcggttacatgtcaccagagtccatagaatcaggtgaagcaactacaatggctgatgtttacagctttggagttgtgatgcttgaagtggttagtggacaaatggctgtggattttcgtcggcctgaggtgcttctggtgcagaaagtacgcgaatttatagcacgacaaagaccattagaggaactggctgattttactatgaatggagagtacaattacaaagaactgatgagattgatcaaattaggaattgaatgcacagattcaaatcctcaatcaagaccgagcatgagacagatcgttcaaatactcgatggcaatgataaaagcttcatggaacagtggcaaaagaaggacagcattgaggaatggaaacacatgaatgctccatctttgttgttaattaagggaatacaagctctaggaattcaatgaagtataaaatcatgtacagtaatggtttttgagttgtgtttttctttgcaactttcagtaaacatttgtgagctagatgtatttaagagaattatgtcttcaaaatcttatcttttctgagaatttttgctcatattatttccaatcaagattacagatttgcagaagaatattacatcactgtttatcacaaagaggtttatagctaaatcgaaatgaaacaccattgatgagctagacatgaattactggctaactctcctcattaacaacatattttagatgtttgaatattaatataagcaagtattgttccacattttcacttaatatcatggaaacttcctgttagaggaacttcttcatcggtgtcaagtccgacccaatgaatgaaagcgaaaagaaactccctgaaactaacattcccattcctgtcccaatccatttctcctgcagagcaaaattagagaaagaagaatgagagttgcattgcatttgctaaagcgaagcaaagattgcgtgttgagtaagaaactcgtactgaatctactcctggtgatgtgtgcaggggatctctctgaagtagaagaatcatttagagccttgaccatgtctttcttattcagttttccatcaccatttctatcaagaaataagaacacttcaattatagtatcgaatgttgcttcgagctctggtgaacccatctttgatgatgtctgaaacacaacacaagatattgtttttagataatgatttcaaagctagattagtactttgaattgaaatgaaggaaaacactcaagttgattgttaataaatacagtttgagagggtgaaggttggtccttcaagagataaatcaggcaaagaagaacaatgaattcattgaattgtatcccttcactcccatcaatatcacaagaatgaaaaagatcctcaatctcctcttcagtcaaacggagttgcaattcgtgtaagcattttttaagttcttcgcggtcaatagctccattagaatcttcatctacaaaatagggaaacttttcgttaaaccgcctcaaaatatggtacaactacttaagtagaactcactcccaaaagttagcctaagaaaagagggatgcccgagtagttatatactactaaccaatcccatactcaatgtagaatcctaggtagttccttctgcgatgtcggccccaattgagggtgcatgactctgatactgactctgatactacttgggtagaaatcactcccagctagcctaagggaggagggtgcttttatagttatatactactaaccaatcctatacttggtcaatgtagaatcataacaatacacctcatttggagccgacgtccaaggctggcctactttgggcctaatccataggtcaccccttttgcaacatcggtcctaggtgcatgactctgatactacttggttagaactcactcccagttagcctaagggaggagggtgtttttatagttatataatactaaccaatcctattcttgggcgaattgggatcttaacaaactaatatgcaaaatttagtaaaaagcaataatgatatgaaacttaccatattgttcaaaaacacttctgatttttttcaattcctctttaaacctgggaaacttcaaaattatgctgttgattgacttaaaattaccatgtccttgtgaccctttcttcacttcaactagcttcctttcaagctttgtatccaatctcttatatttatttggagagccacaatggcaaaaaatgcctcctactttactagataaagactttagagaagggcaaaggttagatgtacctataaaaaaaggcaatatattctcttcaaattcaaacacaaaacaaatcaacatgtagtttaatcactttaaatgttaacaaaagataccatctttactctttctaaacatgattaaaagacttaaagtttcaaattaaatatagaatatctatacattcttaatcaagctcaatgtttatccaataaaacaaacaatcttttggaaaatttgacaacttggaaaagagaaaagttttaacctttttcccagaaaaaacaaaaccaaaatcagacactatatataattttatatttgctcatatgtgtatataaagatcataaatataatacagacaaaaaattatgaatccctaatttaagtcctctaaagaaaaagtagaaacctaacccaatttgatatacactctttagttccacaaaaccaattgaaaaatacattaaaaaaggaagagaaggttagggactcacctggagaggccttcatgggaattgtgagaggaagaacaaggaagttgagctacttactaaagcaaaaaagaaatgagagaaagagaagaaaaccccattaggcattaaagaaagtagaagaagaataatcatgaaaaagggaaaagaaagaaagaaatataccaaagtggagatgccattatagtttttgaggacaagcaagcaagcaagcaagcaagaatattggcttacaaaaacaaaacaaaacaaaacactaccctaccccataacatatattatacatacccatatatcatatccactagagcaatgctaaaaattactagtgttacataatctaccaccatttaaatatttcatccatattattataattaagtattatatttgatatgatttaaaataataatttttataaaatatcatttaccatttgtaagacatcacttattttatagattagtcttatcgagtattgttataatatgatgtattgtgaatgattaaccattttttatattatttatttagttaaagtataaagcattgtaatgaagcgcttataatacttagtaccattataaaatattactttataattaattaacaattttt

SEQ ID NO: 188026 - DNA, 2877 bp, Cannabis indica
gacgttggtaatttttgtaggttttattagctatgtactgataaagaaagataacttaaatgttaatcacaggctgaccggaatagaattagaagaaaacagttaccattatatggtattgaaggaaggtttgaaagaataaaccagcatccagttatgtcttagaatctgtactcaatgtgctttagttttctcttacgtttttttttaaaaaaaaaaagtgatttattaaacctatttatttattttgtaacagaatgcaggggctcattcattttccataggggttactgaagttctgaatacaaatctcttgatagaactaagagcagatgatgtagattatgtttatcaaaggttgatttttctttaaaattaagtgtggatgcctaattataaaattattgtttctcctgcatataatcaaacttttaaaatggattggcatatatattataaacctttttcttccacaaattaatatctattataaacctttttcttccacaaattaactaaataaaatactataatagtgtagggagattctgtgttacaccccctaaaatgggtgtacaaattcacctccttgtgttttcggcttcaagatagctataattctttattcttactattcgaatttctcaaaaactttgcaaatgtcttaaatatctacaacgaataaagtcataaaaacgagtaaagtcataaaaaaaatttgaattataactatcctggagccaaaaacacaagaaggtttatcgataaggggtataccagagtagccccagtatataaacatctcctgtgtatttgtcatggaggccaacttgtcatattcttctgcatatgagagaagcaagcttataatatattagcattctcatttctttattaggttgttttttcttccttatctctcgcagaatttgatctcttatactagtggaagatcttggatgatatatttatttggctgaaattgatacttcagtagtgatagaatctcaaaggctttcatgtttcatgttgtttgttgactctttctttaggagtcctggaaaaataatgagcatcaatataccaacatttgaagccctttctcaatttggggttgctacaataacaactaaaaacactggtgatttggaagcatcgtatggcttaacggtatccccatcaaattattattgtctgtcttaatctacttaaaattttagtaggaaactagagtttctcatttagatatataggccatggatcaaggaactattacttgttgtaacttggtcaataatttttgaaggatgtaccgagtatttcactttaagcttaactcaaatgaattaagtttcttcaagtccctttgaagaatatattataacttttaacgaattaattgaccaatgttttctatgttgcagtttaattgctcaagagatgttatactcatggaggtaaactcatttagaaatgtgtatgtgcatatcttgccattcattgctcatttgcatggaaataatttgataaaggataattatctacaggaacaatattttatcatgaagccaaaagaagaggtgattcgatcttttaaactctacccttcaacagatcaagctgcaaaatatatctgtgctggtgaggacttaacccagtgattacattaaggtctcaataaggagactctagactaatgaattttaactaaatgcagctatactgaaggattctgattataatgaagtagatagagctgagtgccaattttctacaacttcaactgtacttgacaatggatcacaggtttaatggcagcttttaaatcttcaccttttagtatgtttaaacaaacatgagataagaacataacataatacttatgttatttatgcttatatgattgtttgaattgcttttatgtaataaatatggtgcagactactccctttcatccaccaaagaccaacataaatggtttcctggaatccattaaaagcctctggaaagaactgtggaaggatttgaaagatttcattactggacaaacttgcaggtatacatctcttactgtgaattgctagactttttacttttttggcatacaaatgttttatcttttataaccatcacatttggtctggacttaagattgcatccttttttttttgtgtggcagaaggaaatgctatggcttttttgactttaaatgccacattcaatacatatgcatgagttggattgtgatgtttggactatttttggctatcttcccaacaggtcaacaaactattttattcccagggaattagatttctaagttttttgtaaggattaattaataacaatttccttttgagtttcagtgcttgtattactgtggcttttacaccaaaagggtttctttgatccaatctatgattggtgggaagatcattttttctgctgatgatcagaatactcgaatacacaaagttcatgtgcatcatcatcaccaccatattcatgataagaaacatcacaggaaagaattgaaacatcataagcatggagctcagcgaaagcggcgaatcattcacaatgattacaatcacaaccatcatgagagggaattagattacaattaccatcttcatcatgttcacaaagaaaaagacaagcatgggcatgttcggaattcaagggacgtgcagcattttgatgacaatgtagggaagcacaagaggagaaaagaaagagaaacagacagaggatacttaaaatgacaagatttgaggagaaagagaaatcgccttcacactcaactcaactcaaagttgaaggataatagaaacttttgataccaaatgatgatttattacttcaaagaaactatta

SEQ ID NO: 188027 - DNA, 5383 bp, Cannabis indica
aaaaaaaaaaaagaaatatatattctaaagtttcctcacttttcattcacgaaagcaggatgatgttttgttttccttccttgattagaggatttaaatgtgacttatgttgtatgcatttcttacgttaatcagtgcgcttaagggttaggactaacttaattttttgatagacgtatgttctggatgttcaccctttcaatccccggatagctatgagtgctggttatgacggaaaaaccattgtgtgggatgtaagttcagttgcctatgtttcttaaaaaaattgcttgttttttctgtggtaatcaaaacagatttaattgtggttctagatatgggaaggaaaaccaataaggacatatgaaatatcacaccacaagctggttgacggaaagttttctccgtaagtgtcatcattatatttatactttttctttatgttaatctacagcaatcagtagtatgattaatattgttaaaattgaatagctttttatttttctgtttacttgactctattgtattttgctggagttcatatagctattttgtacatgatattgtattttcgtgtgaagcttttattctagttgactatgtttcctaggatgttcagtatcgaattgatactttgtttatttactcttgtctgcactggagactattagttgtctgtttatattactcacaattttcgttctgatatgtagagatgggacgtcaatcatactatctgatgatgttgggcagctttatatattgaacacaggccaaggggagtcccaagataatgctaaatatgaccaggtatttatgctcctactttttatttttgttctttaatctcatttcgctcgttatgcatttatatgatcagttggggatttggtacctctaatgtttgttttacaaaaggaggtttcttagtggtacttatcttgtgtaccctcctttggcagtttttccttggtgattatcgaccccttagtcaagatacccatgggaatgtagttgatcaggttggatgatcacgtttttgattgccatttactagttttactttattctttgacttccatacagattattatacaactaggaccctaatatgttagactctagttctcaattagagttttgattacaagcaatggcgattgttgaaacaggaaactcagatagcaccatatagacggaacctccaagatcttctttgtgactcaggtttctctgttaaagtacaagctgttattattattattttatgcgatttatctctaccatttcattttcttaagccccgtttatactttgaaactgttaggcatgataccatattcagaaccctatcagagttcataccagaagaggcgattaggagctcttggtgttgaatggaatcctaattctcttaaacttgctactggagtagactttaccctcgatccagaataccaaatcttgcccttggcagaccttgacatatttcctgaacctctgcctgagtttgtggatgtcatggattgggaaccagacaatgaaatacaaagtgatgatgctgattcagactttaatgtcgctttagattactttagtggaggagagcaaggaagtttaagctccaattcctctgttgattcagagggcagtgcagaaaatggtgagactgatgacacacaagtgaatagacgtcgaaaatcaaaaaggagaaagcaaaaggctgaagtaagttattgtgaattttggtctttcctttgttttaggcttcttttgaaataattaacctgctgctctgtctgtcttgcttcatcagattgagatcacgacatcttcaggaaggcgtgtgaagaggaggaactttgatgagagtgatggtaatcctctcaggagaaacaaaacaaggaaatcaaaaagtggtcgaaattcttcaaggaagaaatctcctaattcaaagtcatcgagacctcgaagagctgcagcgaaaaatgctcttactttgttttctaaaattactgggacctctactgatggagaagatgaagatgactcgggacttgatacatcagagagtgaatccatacttcaagattcaaacattgagagtgatggatctgataaatatttgcaagatgagcaaatgaaacatcgaaaagggaaagaaatttcaatggatgactctgactcggttaaacctcccgaacttcatgttaatggtggaagtaggacaaagttggtcctcaaattgccacaacgtgaatcaaataggcctctggttcgaaataagatagtgttcaaatgtggtaacgatggtgtaggtccgtcctcaagagttcctcaaggaacaattgaaatgaatgggaattgtatgaactctcaggatccaagatactaccctggcaattatgcaggacgcaacatgattgaagagccagacagagttcaaggaaatagagttgaccttctaaatttgtctgatgattataaaaatgggaaaattagatgggttggggccagagctcggacatccaagcgtcttagatctggtgaagctgcaccagcaaatgcattttctaggacaaactcgtctcttgaatttcgttgtgaaaaacagaataatttcagtcaatttgcaaaaccggagaatgattctttgagtgagctctctgatttacaaacacaaaaacaagagataaagggagatgaaaagctggcaatgaatgggaaagctatgggggatgatacctgtggcatggccaacgggatagagaaattgagttctattgaatgcagggaatacaataatacatcaaactttcatgagatggttgctaagaatgcaactgactctgacaacaacaataataataatatgactgagcttccacaccaagacactcataacgcttcacatgatttacccgccgaggatgacgatgccgctttcattgaaaatgggaacacagatggttttctaactgaagaaactaagatcccctctctactcatctccacaaagttgaatctgaaaaggactgcaaatgattctgaaaacccttgtgagcaggaaatgaaatcttcagtggacaacttggagaatgggaaatataatttgttaaatgacaggccattggtcactgaacaagacttggttgtgcctgaggataaaacagcaaatagattgaatttagatcgtggagatggcggtccattggaatctgacactcagtgtgataagaatgccgtgtctagtataaaggactcggtggagtcccatcagttacctaagaaaaacatgtatactgttgtatatagaaggactagatcacagaaggctataaatacttcaggagggggtggtgaaggcaaaggaggaagcacctcaaatgcacgcaaccacaatcctagcagattggatgtttgtgaagagtcaattgatgggtcatgtgggacacaatccactggattgaagggctctgcatctacaaatgtgactgacaatgttaaactaactgaaggccatgaatcaggctacgtgcttagaaataatcagaacagttccatgagtaagcgtagactgtcacatgaagaatggggatcaagttctaggacgacagttggtttgaggtctagtagaaacaggagaggcaaccatcatcttcgtgagacaagtttaatagatacaacaaggaagtcaaataaatcatcaggaaagggaacatggttaatgctaactacacacgagagaggctcccgatatattccccaattaggggatgaagtagcatatttgagacaggttagttgctcaagttattattacaatattttgttgattcacttctagattggtggtttagttttcaaacgtttgctgatatatgttgaaaatttatttttatttctttcaggggcatcgggagtatttagaacaacacacccagcggagagaacaacctccttggatacaagtcaaaggaaaattaagagatgtagagtattgcaaagttcgagacctcgagtactcctcatccgggggatctggggagagctgctgtaaaatgaagcttgaatttgtggatcccacttccgatgtacatggtagatcttttagaatgaccctaccggaaatgactggttttcctgacttccttgtagaaagaactcgctatgatgctgctatacaacgaaattggacacgcagggataaatgccaagtttggtggaaaaatgacggtgatgaagatggtggttggtgggaggctaggattcatgatgtgaaagccaaatctaatgattttcctgaaagcccatgggagaggtatattattaagtacaaggaagagcctacagagacgcatttgcacagtccctgggagttgtttgatatcgacgctgaatgggagcagccaaccattagtaatgacagcaaaaaccaccttcagtctgcctttgccaaactagaacgcgtgagcaaacttccgaaggtatcaaatcaaatcaaacacaatcttaaatgtgatacgaaagtacatcttttctaaaatcttgttgaaacttatttcaggatcgttatgcaattaatatgttgaaggaactttcacagaggccaaagtttgcaaataggtataatcacattattcattatagatttgttcttatgatcattatggttttagcttccttttccagttaacttttattcttttaaattgtcaggtttccagtaccattatctcttgaagtaatcaaaactagattagagaacaattactatcgaagtttagaagcagtgaggcacgatttcgatatcatgctgtcaaatgttgaaaattatttggggagcaagtcagagaattcggcgaaaataaaacgtctgtcagattggtttgctacaacattgtcatctttgtagcttttttgtttcttttctttatagaaagaaattattactgaggttaagtggcctcttttgtctaatgtatagataatttgatttcttcaaaaaagtttttccttcttaccagttagattggttattggaaattggttaaatgtttagggggtattctttctcaaggggaaatagaaaaatgaaaagagttgatttgtggtggttgtgtagattttccaccagaaagatttgttattgtatagagacacttgatattattatcaccattaataacacaaggaaagaaaaggaaaggagaaatgtccacctaatgttttcttgtttgttttttctacctattttaccttttttttttggtttattattagagaattattcatcttttttgtcttgtatttggtaatggccatttccttgaacttaaattgtgttgtattggtaatggttattcatcttgtttaattttgg

SEQ ID NO: 188028 - DNA, 1514 bp, Cannabis indica
agtgaaacaaccatcattgcaattgaatttaaagagtagaaataattataaagtgtaaataaggagacctttatgattctctgaccaattggtcttaggcataaataaacctcattacaagaaaacacaccatcttcaaaagtgggtgacttgcttgtaagaagaaatgcctgaaaattagtatagtgtgaggtgaaaagtggaccaaatgaattgtggttagtgcaagtaataagagaaacataaggaaatgaatgaaacaccaccaacccaagcaagtagtgaattgtatcgtccctatagtcactcttaaccaaccaataagctctctattattcttctttcacttgaacagggtcttctattcaatttggttccacatgttaatcattttcactttccctctgccacatatctattcctatatatatatatatacatacatataatgcatgcatggcttaacttataataaacccatttaataactaaaacaaacccatttaaaaaatgcatcattttgttgtgaaaagcaatgttttcgattcagattcgaactcaaatccaaataagcttaagctcggctatggcggcagcagcaatgaacggcctctttgtcccaagcctcgccgaccagttggacctgccattcccgactttctcaaacctcttagatgctccaatcacaggtttctttctccactcttcttcttcttattattattccacattgaggtcttaaaatctgatcagcccccaaattgtttggtgttttttcgtgattacagccaatatagcagcgatgaaagaagcggaatcttgaatttgatagaagataaggttaggattgattgaaattgtaaaagttgattgattgtatattaataaaatgtataatactaatattgagaggaatgaatatggtgttgtcgtgaagaatggtgtagtggagagaagggaatgtatatgctcatcagagtcagtagcggcatgttattcgggttctcctccgggtcgaaccgataacccgttggttcacgacgtccattttacgcagtaccagatggaacttgtttcgccattgacacgagccaacctctctgatacaagatttgtcttcaccaactccacatctcctctttgagactgaaaacgaccacgttttgccacctcatttcatatttcataacagattaattgccgatatatattactattattattattgtaattttgttaaaaatagttagggatatgatattatttagattagggatttctttttattttttataaacgttgaattttgtctgtaataggttttttctttttttttttgtttttttttttttttttttttttctttgtaagggctgtaatagggtgtaagcaacatgatttcatcaataaaattgttttggtatttttcttaaattatgtctaactaattatgttttatttcctctattacttaaccacggcttaaacaaaatggctgtatttgctctttttct

SEQ ID NO: 188029 - DNA, 1922 bp, Cannabis indica
caagctcgcgggcctagggtgcgcgtaggactaatgagtttctgtgtaaagatatatgcgtcctattcgagtcgcatatacggataccttgttagcgtcgataactcaagacttgtaaatccttatcgggtcatcgagcgcgttaggtcatttggaccagctcgctaagtaaagaatcgatctatactaactcgcaggagaagtcgttatggacattgcatatatcttggtatatacgaatcttgaacacgaccttcttggtcctgcatcatgcgaagcataataatgcgacttgactctatcaaggtcacatcatctcaatgagtttggttcaggcgaggtttatcctctagtggtctccttctgacaggtcagcaatcctcgaggagagtgagtccacgagtcatctttataagagcctggtctcgagtttctagatggaattttcacactataacacatgcccatagtttcgcgattgacagcgatgtcatgagggaaactatgaaagagaggcaggcgagtggctgtcacgggatggtgacttttggttatcttgtcaaggatttcgaaaagatggatgtagttattattttattcctttgaggtgccacgtcatcaaaaccgttcagggtatgtgcaggcgtgattattggtaactattagattgagagactttaggcattcttttgccacatgtctccatcccaataaatgaggggtattagtatttaaacttcccaatacaaaccaatcatttatccatttccctctctttttcattttccccttctactcagaattacaaaatctcaaaacttccttgaaacttttaaatctctctcaactgggaacggatttcaaaggctacaccacttacagaataacccaaggagaactgcatttcaagactagtgatttactttctctgtaactatttttagaatccatatgcgttctgggtctttaggggtagaaaatgcatgaaatgataggattcactatctgctttctgtaagataggtaaaatactagattttcctgggaaataaatacctaaaacttgaataatcacgggtttcaggaagaatatttcgaatgctcgcgagtttctcgatgagtacttcgaatactcgcaggtttttttatgagtacttcgaatactcgcgagttttctcgaatattcgaatactcaaaaataattttacttaaccaacaaccaagcctttgaccccttttttatcagaatttttaattcttagggctttttagctttttggtcatatgtattttttgttactaaaactacctgagttctcgaaatggtgggtgtgtcacattaacttattgcatgtctttgggatactgtgaaacacccagccatttcttgagatgtgcgattagttgtcatttttcttgcattttattcgttattggaactaattaggttctttgaaatggtgggtgtgtcccttgggatactaggatgcgcccatccatttctgaagacacgtggttagttttaatttgactcgcagtttattcattgttggaactgactatattctcgaaatggtgggtgttttgccgtgacttaatatccatgtagcaacatgacccttatgtcactgcaaaacacccagccatttcttgtgatatttggcgagttccttgaattttttttcgttggaattttacttgggtgagggcacttgttaaaattgcacttacaccacactaaaaagatcttttatcttttagatgagtgacctgtcagatagccagagatatgattctggagaaggagccttcacgaacgaatcacggagaagcgacagtttcatcccaacctcgatgtctgcgaatgaaattcttacacccaaagctcgcgagggctagctatctatagatgagatagatag

SEQ ID NO: 188030 - DNA, 2004 bp, Cannabis indica
gtcatgactggtatgacgttgcccgtgtgtgacttttggataatcaatagaactaggctgcagttactttctttgttttttactaacaaatgaaaaaagaaataagaaaagctcttttgactgtatatacatttttggattgtctttttctaagttgttttttttatacaagtgttgatatggtttactgaccactagatactccatggtgtattattaagttgtcttcactttcaaaagtttctatatttagatcctcttccattgacaattttcttcttattttaattttctgttaaccatggaggttttatttgttttgttttgtttatttttcttggattcttaagtatgataggatattagagtttgatgtacatgttttaatgttcctcagtcttttctcattattatttatttttgatgtattattattattattattattattattattatttaacgatgacaaccttttatgtgcttttgcattagaaaagccttttggctttatgtgcatattgtcttaaaataagggtctataaaaggcagataattgatatagatataactttctgcagtataaaatacgcatgatgtgtagaagtaatgtgtttttcactcctgttttgggatctctgtttgaatttcggagtgaatggtgaataagttatgtgtatgcaaacaaatatatgtgatgcatgtgctttgtatgagttggagttgaattgaaagctctgagactagagtacatacagctaacaactgatttccattgtttttctttccagaattcatattgagtttgttgattttctgaatgagatctatataaaatgagcaggccacttgactgcaaggagcgatgtttacagctttggagttgttcttttggagcttttaactggaaggaggtctgtcgacaagacaagaccaagtaaagagcaaaacttggttgagtgggctaggcctaaactgaacgacaagagaaagttgcttcaaataattgatcccaggttggaaaatcaatattcagtgagagcagctcagaaggcttgcagtttggcatactattgtctgagccaaaatcccaaagcaaggcccttaatgagcgatgttgttgaaacattggaacctttgcaaagtggcaacgatggaaatgaagtgtcatcatcattttcaatcggcaatgctggtccatttgccagaatcccagattatcggatgcgtcagaggtttacaaataatgttggccctggctcaaattgccgatctcctaacccaaattgttctccgggaggtcctgcagcatgcagagttcgatgagaaatgtcattattcgtgtgtatacatgtttggtgtgtttttttccccacccttttatgaaatggaaatatttgcttgttacatggctgcacatgcatcttttgtcacatgtacatgatctcattgtgattccaaacctgtgttaattattacattgttcttgtatttattttctggtcctgctcgtataattgggagttgctcagttttggatttgccaagcagattaaaagtgatcgagtcagcttttcccctaccccacgtccttgtttattttgtttcataatttcgttccactgtcgatagcacgggttttctggtcagcaagaaagatgattaggttgaagctatgttggagaggtctatgattaggtaggtgggggtataattttcatttagattttgaggcagagtcaatcttaataattgttgggatagtgctgcgcatgtaagagtgtacaagaagtctccttttcggttctttattgcaattgaatcaatggcttaatctcacatcaaataaagaatcaatggttctacggtagttctatgatggccaaagaaaagtttgcatatgttgaaacatgttagagcagattgtcatcaatttctgttatttttaaagtggttcatgatattaatgcttcacgcaatcgagtacttgaaaagttgctgatt

SEQ ID NO: 188031 - DNA, 5384 bp, Cannabis indica
ttgttttgtttttctaggaacttgcaactcttattcttattcatgtgtaaacatccttgaaatttagtttggagaatataccattgacaaccttgagctcaagatccagctactttgattatatctcaacaattttgttacttaggacttgagacaaggattatcataaaattcatgaacttatatattgaggggtgtgcatttatcggtttgagtaggttgtccaactggccaatcaaaattcaagttgtacttttacaatttgtaacctgttattttgaaattgtgtccaaactgactggtagattttgatatattgtttaaggaaatttaaactagaaaaaaaaaaaacaaattatctgtacatacataaaatgagtgttcaaaaattaattaaaaaatatgaaagattgtgcatattgtgttacatgttatatttatctatgattaaaactagaaaagtatttaaattaatcttgatcggtcgggttgtgttgtgttgtttgggcatattcgaatcaacaaccaacccagtaaattcattggcagtttattaatgtactttagttgtttgggtaaaaaaaatattttgtctttctagttaaatttggtagtgttgtaaaaatatatgctcacctgtgctgaaccaattatttaggggatgccattaagtggaagacctaattaatagttattatgttcttatcctgtatttattgtcagccttgggatgatcaaatgcgaaatgcgtatgaacaaggaacacttgttttactccagaatttggatccttcctatactaaagaagaagtaaaggtaatgtcagcactggtttcttttgggtgatcttatcttccgtagattgtgatgcagaatacatatttgttgattacattgctgtaaatcctttttaacagaattcatcagatcatctgtatgattggtcattgttttatgttgataaattagtattgaattgttgtgtttatccaagagggttaactcaaacggtgaggcatatggtttcttcccataaggcctttggttcaagcccctcgtaggtggataccatagcaattgccatggttttatagtccccaaatagtgttgggttaggtgggccttgttttttttcttctcaaaaaagagaaagaaagaaatgtaaggatctttgaagattaagtccatacagcagaagatttgtgggagaagctcaaattttgggttgcagcttgagtttataaggctaaagcatttgaggggctatccttcctagaccttagcatagagtggggatgcattctgcactaaattttattgtttttttttcttagtatactctgccttgataagtcgactgtgctgagcaacagagttttttttagcttacttcatagcatttctttctctattgctgtatctccctaattttaatggttgttaccgcggtttccctctgccatatgtgaggcttcctaataaattcgggaggtagtcagtcacggacattaaaaactttttttgcaaaagcatatattttttgcctggccagattatcacttattagcttgaccaagctatttgtttgtcgaggtttcatttgataattgacaatttttcccatgtttgtaattatttattaatacatttttggctattgtgtggcatggttttaacgcaagttgcgaatacattttattgcaaaagcatatattttttgcctggcatgattatcacttccttaattgcttgacttagctatttgtgtgtcgaggtctcatttaataattgacatttttttttctcatggttgtaactatttattaatacattttaggatattgtgtggcatggtttcaaagcaaattgcgaagcaaagatgatccaacggagaatgatttctagtccatattctggtatgagatgattggcttcatacctatataaatgatgattttcctcttttaggctttaagacctgctagtcaattttgtttcacactattaagctttgagatgtattgcatgacacaagtattgtttctcacaactactcagctgaagcatttttcttgtttttctgtttttatatactcatgcttgtcttgttgtaggtcaagcttttgttattttcaagcaaaaggacatagcggagcgggtggttaaaaaattagatgagggttgtttgctattatcgaatgggaggtatgcatgtacataatttctataatcaataatttggtatagtaatattcatagccttgttctttttaaatatatgttagaaatatttatctcagctcgatagattatatgtgtcgtttcaggtttctttttccttcttctatggtggaaggccatcttatttgtgatggttgcgctttcattatataaagttttcaaaaaaaaaaattatataaagaaagtatgactaggaatagagaaacttatcattttgcaattaaaaaaggaaaaagtgcggggaggggagcaagatgtctgtccaagttaagataaacaatacaaacataaatgatcaaataagcaatactattaaatttatagaatttaaatcttaaattctttaaaagaaaatgaactttgtcacaaaatcattaatagtttgtggcacacttgagttcatttaatgaaagcatggatgtttgtttgtcaaactccaatggctatcactttcacaaggttgtcggaccttgaatttgtcctactcttgaattttaaatccttttcatgatgaactcaaaatgttgacttaattggtgaagaaaaagtgtagggagttcatttcgaggcagttcggggtgattaatgggataacaattgaaatagtgtatccttttcccttttctaagcttattttggtttatgagtcggtcaaatgtctttgcgtgttaaaattcttggaagctcaattatcaatttggatcccgcattttcatatgttatgtaaaaagagcactaagcttggtacggaagtcctttctagtcttttcatactttttccttctatcctaaaacaatacgtctttctctcgtgttctcttgaccacatttcttcaagcaaacactttaagaaaaagagctttgaagccttacattttggagaacatgcaaatgagtcttggcttctctctcacaagatgtgacatggaatttcttattgtcccttcattaactacttctatttgataatttgtgttttaaaacttgtttatagtactttgggtgcttgagtaatgttttgtttacacattgcaggcctcttgtaggtagattaggaactccttgcttcccagaaggaaagcgaacattattctatggccatattgctatcgataagcttcgataccagatgccgcgggagcaggtagagcagttaatcttattctcttgtacacaaatacttgcaagtgtgcgtttgtactatcaagtttttttgttcgagtaagttatcatttcaatttctcgaacaattatagaaagccctggtgggagaattggaaggggagaaaaggaatggaaagtctccatgataaagaaaagtatttggaaaagaacctagtctatcactccctctcaaatgatttaaaaataatcctctgattcgtgactagcaataagtacacctcaggaaatggaaacccaatataaaataagcttgtattattcaagaatgaaaaacaatggcaataagaaatataaaccactagagatttgagagcctggcctttcacgacaattcgcaaaattgtcacgatctcttctctaccactattctatttattgcagccacaaagcaataactaactaaagcctctctcccctcatagtacccgtttccctcagccacatgtcacttagtccccattctattattctttcttacataagtgtgtttaaccaatgggctatcatttacccctttatggacattgagtagctcaaattttcccatgagtttggaagtgcttctatgtgaaaaggacttccaactcaccattcgcattgtaactaagatcttccacaaccttgagttcaacatgccattcatgattagccttgaggacgacattgaacaatcgagtcagagtcaacttttcacagctctcatcaacatggatatatgaaagagaaggtgaatatgcattgattggtaggagccaaaatactgtggagacaacatttcattatttcacgatgcttacgacttaatatggtatggtttgagcttgacataaaccatgtcccttagagaaatgcacttcacaatgcttttaatctatcctttccaaaaatttccttcctagtagataaggcttccatttttggcatgctaatacgatggctttagttcccatttctagacaaacggttacatccacttgggtagaactcactcccaaatgcgcctaagagaggagggtgcccaagtaattatataccaccaaccaatgccatacttagttgatgtgtgatcctaacaacacacttaccttgagagtagacgtctgtgatgacccattctattgtggccaaccctgcggtggcccactttgggctttttccataggttgctccttctgcaacgttggtcccatttgagggtgcatggctctgataccatttgttacacccacttgagtagatttcactcaaaaactagcctaagagatgaagttacccaagtagttatttgcccaccaaccaatctcatacttagtcgatgtgggatcctaacacatacttctcactaacaacttccataaatcctagttccatggaattcatgagccatgtcgtgacatgaattttcagacgtccatgagctttccttagtccatcaatcatcgatttcacgcattgaggtcattctaaataattctgactgttaagtttgtgacatgtaaattggaatatgtcgcaaccctgagtgctttctcctatccttgtacaagatgggttatctttgagattatactattgttgatcgtacctcctccatttactcctttggtcggacttgaagcattagaagacttctttcattcagtcatggcccgttggtaagccatttagaacttcacattgataccatttaaaaataggagaatgaaaaaatgtttactgtttcttatttctttagtcataaaatatatgaataaatataaatgaatactaccctatctttccctagcaatctccttccatcgaagagaattattcccatcaacgaaagtttgacatttggccatttattgagaaatacaacaagttaatacacctaaactaaccactcccaaagagcatcaactcatcacatagccaaacaaatcatctctcacatagaatttctgttttgttattaa

SEQ ID NO: 188032 - DNA, 3367 bp, Cannabis indica
ttttcaggacaattgagatggttaaggactctttgggtatagttgaaccaaatgatgttcctgaaagcaagaaattgttaaattcacatcataaacatatgtatgctggaagatatgcaccctatgtacttgaaaatttgacttctctgcctctagtatatcatgtttataagggtcctgttgaggagtttgatgtgacagaaattaagggtagaaaatctgtagaaccaggtgcttcagttccattgtatattaatgatactcctgaggaacaactttttcatttttggcctgctaaatcttctgacaaacttgctgagcagaaattaagtggtgtttctcatcattttataactattcaacttgatggaacttcaatgccttctactcctatatctatggaccgtgtaggacttacgtactttgaggttgattttttcaaggcatataatgaaaatagtggagataatagtacggataccacttctggttttgtagtacctgttgtgtttgatgtttcagtgcaacgctatagcaagctgatacgattatactcaacggtacgtacatcgtcaaatctatgctatgatgtttattaataaacttgaaattcacaaacacttgatatatgcaggttgtactttcaaatgcgacttcagttccgatagagctgcgtttcgatattccatttggtgtatcgccgaaggtatggaccaacaactagttgatttgtacaattaccttacataaaaggctacttatttttgtgatggtattattgccactgaaaattaaatgtgatgtttcagatattagatcctatctatcctggccaagagttacctatgcctttacatttggcggaagctggtcggatcagatggcgtccacttggagattcctacttatggagtgaagtctataacctttcaaaccttgttttgcaggagaccaaagttggattttttagatcttttgtttgctatcctgctcatttaagcaatgatccatttcggtgttgcatatcagttagaaatatcagcctgccacctaggaatagtcctcataccaagattactttaaatacacctgtcaaaagccgtggcgaaaatttgaaaaaggtggatgagtcaaaaaagaggtttattcacgagttgaccctgtgtactcctctaatggtgaacaactaccttcccaaggaagtatcactggcaattgaaagtggcggagttacccattctgcattcctttcaaaggtaatgtaatgctattgctatgtgactagatttgtttttttccctctcttgtatgatttgtaaaggaggtaatgccattatagaagatatttcttttgccatcccttataggtggatgctttccttcactatgttgatccttcccatgacctagtcctggggattagtatgtatggattcaagccaacaactctgaagttcccgcgttcagagacattctgtacaatggccaaattcactggaacaaagtttgccttatctgaggttattgcttttgatccagacttctcaaaaggtaagcgttttcttatgttgagttttctgttcaagtaacaatgtggttggagatctattaatggtgttggttttgctttggttaggtccaatatatgttacagttgaaaagatgatggatgcattctccggtgccagggagctttctatttacgttccctttctgttatataattgctgtggcttccctctcctgatttcagaatctggaaatgaaataaagactgttaagtgcattattccatcatcatatgatatgagcgagcaagagttatgtgagacaaaagacggtttgcgtatgatatctttgcatgctgcagatcctcatggaatagaatatccttcttcaagtcaccttatctctattagggatgactttaatccacgcagacaaaggttctatgagcaattaaatgaaaatgactttgacactggagaaactttattaaagagttcaaagaacagattatcacggtcaggctctgatttgttttcaaggagctctaactgcatgggttatgagcatggaaaagttggagcatgcatgtactctcctgttccattttatgctgctgaggaactaacggtcacagtaagtagagctcatggcgacaataacatgccaaaattgtggtcaagcccatttcttcttgttccacccagtggttcaactactgttattgttccccaagcatcgcaaaatgctgcatttatgatttctgtgacatctagtccagttgctgggccactagctgggaggtcaagtgctattacttttcagccaaggtaacatttttcatttttggcatattccagctttaagttcctgtcttcatattctcagtttcctttccttttttttttctttgggagggaggttgtttggggttgtcaaatattaagtaaaaacaactctctggtaattatcacccttttgacaagaagggacattatcacccatcgagccgcttagcacatttgtctagaatcggcatccaaaattcagcctttctagaaggtcctcccaagttacattataaagtaaactaaaataggaaactacaactaaaacaggagacattatatcacagctaatattagtagtaatgcatgcagtaatgacagattctacaaaatttacagtagtgatacgtggttaatatgccattattggcagatcttagattttctccttacaaaagtcttacttttgcagatatgttattagtaatgcatgcagtaacgacatatgcttcaagcaaaagggtactgaccatgttttccgtatgcgcgtaggagaacattctcatcttcattggacagacacaaccaggtatattgccttgaatatcttgcaagttgcattgtatcttgatcttgcaataagttgaaagtagtcactgagcttcaatgcactcaatttcatttactaattaagactaatcccttttgttcattttttgttccatttaaaatagcctttattttaatgctcattcctcttagtatgtatttcaatgctgtgcagggacttacttgtttctgttagatacaatgaacctggatggcaatggtcaggaagcttcttaccagatcatcttggtgatactcaagtgaaaatgcagaattatgtttctggttcatctagtataattcgagttgaagtgcaaaatgctgatgtttctgttagagatgaaaaggttgttggaagcctccatggtgattcgggaacaaccctgattctcttatcagatgatgatacagggtacatgccctacagaattgataatttttcaagggaggtaagtgtataaaaa

SEQ ID NO: 188033 - DNA, 2182 bp, Cannabis indica
aaaaaaaaaaaacaaatcatctctcacaattccccttccttgtaacataagataaccagtaaaggataacaaccccaacaaaacttatccctacaatatcgtctacaaagaccaatattctcctaatctctcattctgttactttactatttaccctttttagtgttggtgaagtgaatcgctttgggaatctatcgttatctcccaattgttaacattgtcatttaggtgaaaattggtaattgttaatggagagcatcaaaatttctcacactgccttaaactcaagctggtccttttactggatcaacacttcctttccaactcaagcttgtctaaactaagacacatgaaaaactagatgcactatttaagttggtgttctcaatctattttttgttttgttgaagcatttcccaatccaacgataacttcataccctaacctatgttggtactccattctatatgaacaattgctctaatcacttattctcttgatcggtttgtaacttttcttccgagcaagtatgtccacttttgtatagccaaaagtatggtcatattttattttactctcatcgagtgtttgaataaaataagcattcaacaatctctggatagcctgcatttaaagaagccctaatcgttaccttgaagcatttgtttctgtgatgatttgctgacaagagtttggtagagctagaaggaagttgatggctttcttaagctttttgaaagcaacaatggcttcaggggctccatatatcctttcttagcagcctgtgactcccacgaaacttaaggccttaaaagatgttggtagctaatgcatcatgtaggattgttgcgcaaaataaatatttttattatgaaatgtgattatacattgtttggatgctaattttatttgcctcctctagtaaatcagatttttattagctccaggaattacgaagattaaatgtttatatttatttatttaatacgtgttttattgggtgtgtggcgtggaccagagagatgctgtgtctacttcacattgttctcagcctaatacatatgaatatgatatggcaatggagtggatcttactacatgaaagatcagactttctctggaagaagttgttttgggtattgaatttgctcaaaatcattttttatgcagtgaactattggaatctgcttttttaccttagtttgtaattgtattatttgctgaaattgagtttttctctaaactaggaacaagaacaggagatgagaaaactaaagaagaaactcaaagctggaaataaactgatgttgtgaacttggtcttattggtaagctttctgtctaaataaatcgtacacgtccatacttcatattatcccaaatctgtagggtctactctaccagcccacacttatcccctctagcatctatctatgcgttaaatacttgtgcatataattttctgtatgtaatggcacattgaaatctttcactcttgaattctggtactccatgctccaggttttatttttactgttagattggaaatcatgaggcttaaaccccctttctttcgtaactgttttttgtctgggagactcaactacgatgattttcactccataagatgttctagtacataatcggtaacattctgacctttgttttcttttgagcaaatcgtttttactaagacattagtgttattatctcaaatagctaggtgaatgcatttaataatctacatagatttttgtatattgttcttgaaaactatgttctcaccctttgcaggagtaggtataatattttgacaatatcccttgacggacgagcttttacgtaagttccctgttttttttgtggcctccatgcttcatctattgttgaagcatgcttttctttgtcaataactgaaactggttcgagtagtttgatatagtttttcactccatgacgtgtagataatttagtgcacaaaggatgtttagaagttttgtatagtcatattgatagatatcttggtttcgtaatgaaaaagctttttctattaccttactatcgttgagagcgactttaagacaaaactcagtacggtagtacaagtaagaaataaattggtcttttcattgctaagcctgattattgagtactgctatggggcgactaaggtgcctagcacca

SEQ ID NO: 188034 - DNA, 1490 bp, Cannabis indica
gaaactctgtccgcgaatgatgatgaaaaggcgggtgtgctcggtgatgctgagcacacccgcccagaataatgagtttgataagttggaatgctcgggagctgtggaacccccgagcattatatcgactctccctccttgtcaagaatcataggcctactttgctttttttgatggaaaccaggttgaagcgcacttctgttgataggtttaaaatgggctttagattatgttaatggtttttgaagtccctaggaaagtattttagggggaggacttcttcttttgtggggggatgatgttaaatgtaaatattattaaactattctaactaatcatataagactgtattattaaatatttactagtaagttatatatggacatcttactttttctatggatttcctgttacttatcagaagcatattacttggaaacttttgcatgatatttattataatgctgctaatctcccctggttagtcattggtgattttaatagctatctttctaatactgataaggttgggggtagttctcctgatcaggttttcatggattgtttccataactttcttcacaagtttaatatggtcccctctcactttttctgggaacaaattttcttggactaataagactatacgagaaagacttgattgggcagtagcttctgattcttggtgtgatgtttttcctgagcattctttgcatcacttaggtttttatgggtctgatcatagagttcttaagctagtctttactgctcctaactctcgggtcatttccactcctacccgtactcgttttaggtttgagaatgtgtggttagaggaccctactttctatagaactgttgatactgcttggaaggagtggcctaactctctttccatgggtggtggctttcatactttccttgcccagcagaatcactgtgtttctactattcagacttaggctaaaaatactaatcattcgtctcagtctagcatccaatttttgatgcaggaaatcaattacctgcaaaataaggacatgcttactaggggggacaattctaaactcacccagttacagtctaggttagattctttgctttacaaggatgaaatctattggaagcaaagagctagagctcgatggcttaaggcgggtgatcgtaacacgaaattttttcacaagcatgcatcttcacgtaggaaatctaatcgaataaaataccttaaagatgacgagggggtagtgattacactgaagagggcatcgctgagcttgtcatctcttactttttcgaaatcttttctcctcacaaggtagtgaccttgaggctgccgcctatatttttgagtctttgggtccaggattagatgatcctgaaatctcttttcttgctcaagaattcactgctgatgaagttaggaaagctgttttccaactctctggggataaagctgtaggtttagatggccttaatgcttttttcta

SEQ ID NO: 188035 - DNA, 2999 bp, Cannabis indica
tttttttatatgtatttttacgggattcttcatataaattcaaatccaaacccaaactctaaatttagaaaaaaaattaaaaataatatacggataattttcttatttttttaattagatcttttatgagaacataaaaattagagaattatcttcaaattatataaatagataaatatgtaaaatttatataattatttttaattacactcaaatcatattacagccctcattttaaattttattatatattaatgtgttttttgttttattggccaaaaagtgttgtcataagaaagaaaggctgaatttggagaagagttccctccactttgtatttggcacctctgtgaggccaagtcttaactctgcccgggaagttcacacgtggagcctggaagcctattctcctctcttctataccaagccaaaacttccaaaaccaaaactccgaaactcccttccttccccgcaacttcttcttggtcaacgtcacaactccaccgctctttcactctctcccgcctcgttacgcgtcggaatatggcttctccttctcaaacctcaatccctgctactaccagaaccgttaccatttcatactctgacctccaggtaatttgttttcttttctttcttctatgtttggttcccgagaaaaacatataaatgaggaaaattaattaagttatgttgagtttgatcttatatatgttgtgttcattacgttcgcacctgcttctttattattatgactttttggttaaatcaggataagagtatggatttgtcagagaagatcgaggaagggttcgggccaagcgggctaggaattttgtccgtaacagatgtatgcggtgattttctctttcgcttaatatgacttttgtttgtgttattggttttcaattatcttaacaatttcgtaaacaaacactatttgatctttcgtgccatttaattctcagcgaatatgttcagtttttttttttacttttctgtagaattgattcttaaagctgtcgtagaatatgttcgtggttgaaatgatattgttatagcatgacattgtcgatgttaatctttcttttcggttaaaggagtgtagataaatagatacacatacattcattttttgcagtactgccatatgttgaagcatcttttttgtgactaatggatgtttgattcttgttttctgatactcatgtacttaaaagaaaatgttcgatttgtaaattctcttctgctgcctatcggtaactttttttttttaattacacgagttatcctgtaggttccagggtattctacattgaggcgaaatcttctacttctttctcctcggtatgattctgaattcgactttctattctatttgggtcgactgagatatataactctgggaaacgaataactaaatgaatatcaccgtgggtccgttccttttcctttgactagcttactcatttgaaaatctagtgctgtacaccattttagtagtctttttcttccttgcttgtctggattcaactttcacttttgttttctttgttctgaaatggttcaataacaattcattattttcagatgttttgtagctatttagagcttcggatatccttaaaagttattgttagatatattattgttttccgcagtaactcagtttttttgctgtatttagaagtcttgttgaattgaactgtgtaacttgaattaagaattgcaaatttattatacttaatttgaattataatgcaaacaggcatgacttctgttattttttctctgtcaatcgttcgtaggtacaatttcggatggagtcatgggaaagagaagcttgaatctgggaagcttggtaaatttgccattttctttcaaaatggaaagggaataaaatttatcctagcagtgctttgaggcaaaacctcctaggctttgtagaatttttattttcaagacaaatgatagaatttaaacatgataatgatgagaatactcgatagtaatgtgattgtggtaatacttggtaatgaatgtaattgtggttgcgtgtgtattttaattttgtcaagttctgatagcaaaagtgtggatgctaaacattctaacaaggtttaataattttgtcttccctttaggaattccaatccaaatgcttcaacctgatggattaattgattacaattttaaatttcagatatgcttaaaggctctttctatgctaatccgatcttggacacaccaacaacagatgcatatctaattgaaaggtgaggaatctagaattttttttttttgcagtactgcaatccagtttgtatgtatatataagacatcaatgtctatgataacaaataggaaagttgattttgcagatattttgttggtgtttgttgaggattatgccatttttagcacttattgattttccttattaaggtgtgatgttacagatacccatcatactgtggatcaaatatatggccagatgctgctttgccggaacttgaaataggtatgttttcatgacaaaatgattgtagacttttctgattcatcatgagaatcttccttcaggatccctcagtgtgaactcttgttttggacttatcatctgcaatcctttgggagaaaagaaaaaaggaatacaatatttaaagagagagagtatgtgtacagaggagtcttgcaagcaatgttcttatcactgaatatattaagtcagtcttgatttactactgcgtcatactttcatgcgataattaagtttccaaacggaagaatctcttaaatatatgtctatttactgcattctggtctgaatgtaatgttcctcccttctatatgctaattgtttcattatcattattcattactatctcaagtatggattgttgatgtatcaaatacgttcctttggataagcgataaaaattgatgtgtattggtgtgttgtatcttataatgcatttagaatcttattttcatgataa

SEQ ID NO: 188036 - DNA, 2477 bp, Cannabis indica
tatatacaagcaatttatatatatttatatagagtgaagtagtagtgatgtataagaatgaaattcctacacagctcaacattgaccccacattgtttaattaaatcacacatttgcttaacaggctctacctattatttctttttaaatatcataaggactacataaacactcaaaaactccattattagatcttatctgttctatgacattctatcattggtatgttaatgagaataagataaaacaacttgtattaaaatgctaaaaggtatcaagcaccatataaatcgacatattgttattagtgcattttaatataagctcctagtcgtattcattttgaatgaaatataaataaacaagaaatttacacacaatacatctaaaaatgaatttttttatattttcacgattttttattaatttacatttttacgatcttgtgttgtttcaacgttattttcatattatcacaacattatataattattgatgtgaaattaacgtgtgaacaatattttttttttaaataacatgtaaataacaaattttttagaacaacgtgtagtaatgacctataaaaaaaattcctaaaaatataaaaaattagaaacttaaaatttcgtaaaaacgtaaatttttaattatttttgagtatttataaaataatccttaaataaacctctaattaaagggccagtgtgaaggtgctaactaaatagaaatgcccatacaagtaaatataccatggctattggcttttgcactttgtcctttttttacacacaattcgtgctatactttctttgtaattttttttaataaccgtgtttgtaattggttttagatttggggcactttttttcagaaagaaaaaagaaaaattcgtactggaaaaaaactggattcacacgaatattcatgcatttatttgttagttattattatttcaaaaaaaaaactcttgcctttatttactgcaaaatttcagaattaccaaaagtcaatgtcatgaccataattaatgccatttcttcggatgattttgggtaccaatagaactttattaataactttctaagctttcttcatttgatattttcacacactgaaaaagtaatacttctatatatacacactaaactactaaagacattataataaatatattacacatattgatgttattcatttagttcatgtcccagagagaacctgaagtgttccaagtgtcacattgatcataatcatgatgaccagggacaatagtactccaatattggtcatgatctaccatactattattacattcatcatagcatttcatttcattactatcttgctcatcattattagaaagtactgataatgatatccaataatctgataatcgattctcatatggtgaacttgttagttcaaaatctcctgatgataataataatccagacccatcagaacaaccatcccaactactgcttttgcttccccataaattctcatcatattcatcactctcacacttccatattttatcaccaatagcagtagtagcaatatcttctttgcctttctcttcttgattttgtgctaatttttttcttaaataagttctccagtaattctttatctcattatcagttcttcctggcaaaattctcgcgattttcgaccatctgacaataaaaatagaaaaagaattattaggatactaatactaatttttgcattttatcaaggcttgctaataataaattaatcatcatcatgctcaaccagaaaccttacttgttaccccatctctcatgaagttgaatgatgatattctcctcttcagcactaatttgatcatgctttagatttggacgaagatagttaagccaccttagcctgcaactcttaccactccttcttaaacctacaaatcaataataaaggcactaatcaatatcactttctttaaactatttatatactcatatatatatatatataaatgtaaatatatacctgaggctttggctaaggcatcccatctcttctctcccataagttgtacaaaagaaatgagtctttcatcttcttcctcaagccatgtccctttacgaagttgatcatgctctccttgcatggctcctatttgaaaatccatattattaatttgtttgcgacaaaaaaatgagagttatgaagtccctttttataccacaaaagaatgaagcaaaagatttggtgggaaaaaagcagagctatacgtgtgaccagaaacacttactagtagtttttgtgggagctccacccaccattggcttacataatatttaggctaatattattcaataataaggtgatgatctttaatatttaggtcactctcatttgtctaattatatatctttccttgagctaaggatatgggatatgtagttctatcttcccttgttgcatcaccttttcttattttttttttcttt

SEQ ID NO: 188037 - DNA, 1359 bp, Cannabis indica
attctattcctatttttattcttgccgttcctatattcatattataataacaattgtttgcaggccattgtatacgtataataaatttgcaggccataaaagattgaagtgcttttccttttacttttctccctttttaccagttacatattcttttacgattatatataattgtttctttaacaaaaccaatacataaaataatatatttatgtcatctatataaatatatatatatgatgcacacacagctaaaattaaatgaataaataaatatgttatttggtaaactaataataaggtaaagtttaatgatacattagggataagatgagatctgaaaagcaccaaccatgtttcaacaggagaaattctgtcactcaaaaccctaacactcatatctaaccgctgttaataagattccccacaatgattccactccacgcctaaaaataaagttattaataataatttacagagatgattataaataggatatgttaatataataattatcatatacacttaaaaaaaaaaacaaaaagcaaaaccaatgatggtccaattctccaggttctcattggaatagcaaaattaatcatcattttttctacttattctaattgaaatgattaataattattagaaaaactcacatttatataaaaggaaagtagaatttaccacacatagtgctaccaaacgaatcaaattaagagaaaaaacaaattgagtacgtaaggaaaattgatacccaaaaatgatattatattatagtatatatagtaacagagagatcaatctaaaatttctcaagggtactacccaagaaaaacccaatgaagaagagttaattaagaaaaaacaattagtaaatattattatataaagggtcttctggaattgaaacgtgacccatcaacaggtgaagctaccacatgatccgatctttcctcgagcacagggaagtttagatcatgctggcagcttcaactgctgctggtgcacgataagcatcgcctggactcactacaacacgattatttatgtatatatatagagagagaagagagaggtagtctagggtttatgtaaaggagatatgatgagatttttgttaaggtgaagaagaaggggataaggagagggatataaatagaggaggaggaggtaagagaagaatgtctctaactctcgggtattcaagttttttttttttattggtgaatggtgattatgttattattgagaggactcaaaaataaaatataaattttttttatttaaaaaaaaaagaaaataaagtttttggaaagaaacagatggcagtggtccaaacccaaaatcaaagtaaataag

SEQ ID NO: 188038 - DNA, 2859 bp, Cannabis indica
tcttcttcttcttctttctctcattccctttcctccaaatcaaaccccaaaccccatttccccattccatcccatcacttcaccggaatctcaattcccaatcccaattcgtcgacatcccacatggacgggaacaacaactccaactccaacaccaccaacccatcatcatccattaacacccaacaacacctccaaacctctccttatcccgccaccggagccggcggagttgtcccggcggcgccggcgccatttcaccacctccttcaacaacagcagcaacatctccagatgttctggacgtaccagcgccaagagatcgaacaagtcaatgatttcaagaaccaccagcttcctctcgctcgcatcaagaagatcatgaaggccgacgaagatgtacggatgatatctgccgaggcacccatcttgtttgctaaggcatgcgaacttttcatcctcgaactcacaatcaggtcgtggcttcacgccgaggagaacaagcgccggacccttcagaagaacgacatcgccgctgctattaccaggactgatatctttgatttcttggttgatattgtgcctagagatgagatcaaggaagaggctgcattgggtgggatggttgggactacggccagtggagtaccttactattatcctccgatgggtcagccggccggtgctccaggtgggatgatgattggtcgaccggctgtggaccccagtggtgtgtatggccaacctccgtctcaggcgtggcaatcagtgtggcagagtgctgctgatgatggatcctatggcagcggagggagcagtggtcagggcaatcttgatggccagaggtatgtatgtatttgattatattgggtttgagtttgagacaatgtagtggattttaggtatgtgtgtattttgtgtttatatttccaatcatgttaccagtgcccaacagcttctataagtggcacttcaagattggttagcgatattctttaaaagctatttttataagttatatgaggatctgataattaattacactaatagcagtaggagaccgagtacggtgctagacacagtagtgccttttagcaattttcttgtcaattgtgggtgagtaaattaggaggactgtgtagaagtggaactacacttggttttccattccatttgtatttctttccttttgttttgaattgggtattgaggtttggaacaatgtggcaattaatgatagaaatcactgaataagaagcaatacatggattgctttctggttgtgttccacgtctccttacctacctttctgttgtactttttttggtctcaagacaatgataggaaggttcttgtattttcctacattggtgaagtagaagtaggaaagtctttctttggtgattgctttggttacattggttggtgctgactatgaacactattttaatcggagaatgtgccattctggtcacctctttagttttagcaatgccaataccataccatgccaacccaaagtctttttttttaattgcttaacaacaattgttgctttgctgtagattttttctgacagttgtttgaccagttgtataacttgattgatcagctcaataatagatgtccattgtattggaaacatgttgatcatctacaatgcataattgcttactgcatagtcatacactgattatatattttatgaatttcatcaccttttttagtatggatctttgtgtctcgggttaaacagttgaagaattgcagatgcattgagatgggtattctgtggatcgtgtgaatgaggttatagatattgcatacatcttaatgtcatatgtacttattgtaaagaggccaggagttattctgtacttatttaagcacatgggattgattcttaggtttcttatagattgcaaacctcttttgatgctaatctaaaacataatataaaggtttttagtactaggacaacagttttcagatattgcatcttacaactttgtgtgtagatttggaattgtatgttgttggcctagttcggatatggctttagtcactggctattcactcaaaatgtttgaagtcaacaactttgaattcattaactttatgtatgtgtgctattaattattgctttgaaggcttaatccttacctaatagttgtaactaatcagtctaatattaggatgagttcatgaaaaatgtagtgaattgacaaagacagaaacttgaaaaaaaaggtttgttctcttcatttgaacaaatttatgtctggggcttcagacttgaccatttaattgttttaaaaaattatatgattatcaatataccaaactgaaacaaaagaagctttgaaaactcactgatgatctttttctccataaattgcagctaaatgactaatttgcagatgatgtgctgtgtggtttgatggaaggctatattgagctgtgcacagattttctcttggaatttttattcctttcaactgtaattgtttatcatttttttttcactttaatgggatgacttattaattactcctttgttgattgtttaatgtgcagtctttaagagttagggttctcatgttgctaatgctaactgagatgattatgatggtcataatttaccatctcttatttttaattgaaacctggtacattctgagtatgacttcttctgtgttcttacttttatggtttacttactttctaagttattgattaaaaagaaaatctaagtacaaaaaaaatactgaactttcttaaaaaaataaattatttacagcaggttttgttgaaagttattttttttaagttttacgagacctgatatttaattatact

SEQ ID NO: 188039 - DNA, 1136 bp, Cannabis indica
ctatcataccaccacaaattattggtaataacaataataataatgtataatatatgatactttaatttcctatccacaattgtccatgtgtaagattattttagattttgtgaattggttttactgattcttggatttctaagatcaagttaaatcaatatcggaactaataacaaataggtttacacatgtgtacaaaaatattgaagtaataataagaaacaattcccttttaaaagaatgaagaacaaggtttctttttcttacttttgtatatgagtgtgcataaatcgatctaatttaattataattgaccgctaaatattaaatattcaattatgattgaatcaaattaaatgttcgtaatgaaacagtttgagagaaaaaaactttgaccgctaaacattaaatatccaattatgattgaatcagattaaatatttgtaatgagacagtttgggagaaaaaaactttgagttttcgaaatgatggaagaaagaacttctttaaaacgaattacaaacactttggagattagtttgtaattgacattatacaaactaattggtccaaaatcagccataccacttgagtttttaatttttgaaataagagtgattatagacttgtttagcatttccatgtcatgggcataattaaggactcccaagatcacttttgtaattgaaggaccaacaatctctaaataattttagtagaatatagtttaaacttccatacttttgggtatgccagcgttatagagattcagtgcatgcttgaagatttgttatgaaatgctcaacaaattgatccgcgatagatgctatctagttctgcttaattatagtagcaacttcttcattctttaactagattttctcaaacctaatcgagctttcctcctcattggttcgaagacttaattgattgagactacataaacagaaatagcacgataatcgtagtctaaatgttgtgtaatcacatgttcaaacattgaactccatttgtcatttacaaaatacaaatcaagcttctctttaatcgtgttaacttgatgtttacttttaattcaattgtatagacccccttcaaatagcaactcagaaagtaaacaatagtcaagagtgctt

SEQ ID NO: 188040 - DNA, 2881 bp, Cannabis indica
ctatatcttgtttgtgaattttccctaaaggtcttatttgagaagaaaaaaatttggggtttatttattaattgagagactttgtaaggttttattaataaataagttaaataataattttatttgataattaattataattattaaataaatagaattgacatttatagattaaaacatgacatttgtgaaaagaaagacgagttacataaatggcaaaattaaaacctgcggggcccacaatatggccggtcacttaaaggtaatttaagccattatttttatttttattttaatttaatttaaattctaaacctaaccctagtatctccctataaatagaaagagaaggttcttatttttataacttacttcagactcttcagacaattagaaaataaagagagaacatcttttattcgaattccttcttctttctcctcaaatattcgaagcctgtggtgaattgagagtatgcccactcatgtcaaagcaatacttaacatagtgaggaagactgtgtctaaccaaattaaaggagagaagatccaggttcaaatcttgataatactatgctacagacagaaatcaagagctagaatctaaatggaaggagtcattatatttcgctgccataaatgtaagaatttcttaatttaattttattttcatctaaaaataatttatttaaatttcttataaaaggttaagtaagtttagtttttatagaactcaattccaattaaaaacgagagatgagatgaaattttaaaaattccactgcattgagtgttgagcacctccatgcacacgcaaagattcagaaattacaaaaaaaaaaaaaaataatattcttttcaggttcaatccttcagcccaataaggcctccaatgaataattaataagaaaattacactttatatttattttttttatttatattcaattttgtaagtaatatttttattatgtaccttaaaatttttaattttaataaatcaaataaaattacatttagtactataattataaaaaaattatttattaattaaaattattttaaaaagttatatgtaatgggtataaaaaaaaataactctcaaaacttattacatgaatgatgatatgatcttcacattgggcctattcgtcagtcgggaaacggcccaataaggcctacaggaatattaatcatttttaccaatgtacaaataacacagatagagttaagtgaacacacaaatctcattttatggatttgacagcatctaaatttacctgatctgatagttctaacaaaaaactaatttgtttaagaaaagaagaaaaatatcgtcgaaaaagaacattaaaatgcgaacaaaattaacatcacacacacagttcaccactacaacattattcaatacattatataatgctaaatttagttacatgataaaaactcgcaaacttaagatgaaaactaaaacacgtaaatatgaaaagaacaaaaatcaaaataaaacaaatttataatattttatttacccagtgatctcaacggacttgacctcaggcttcttctccggcagcttggggacagtgacggtgagaactccgttatccagagatgccttgacctcatcaagcttagcattctccggcaggcggaagcggcggaggaacttgcctcggcctctctcgacgcggtgccacgtgtcgttcttgtcttccttttcaatgcttctctctccgctgatctggagaacttggccgtcttcaacctccaccttcacctcctctttcttcagcccagggagatcggccttgaacacgtggctctccggggtctccttccaatcgacttgggtgttggcgaaagaggagacgacgtcgtttgatgaggacctgaatgggtctagcaaacccatgtttccaaacacactaggaatgatcagagacattattattgtggactaaaatgagaaattcgaaagatggattgattgagattatgatcactttgttagtgaagagtagaggatcggtgcgtatatatatatatatatatgaatgagtttgagatttctgggttcttcttgaattttccatatttagtattgtttattggtgtagatggttcctgcacatacaagattaccgtctataatgttccacccgtttcagttactaatttaagaaagaattaagtaagaggaagcttctccattattctatgggttttcggcccattagaaactaagcccattttccctttttaacgaaaaccgaaccaaaggagtaacaactatacacagatatgcagtatttttcatttttaaggaaaaatactggaaaatttacaaaagtaattaaaatcagttttttatttttatttttattttttattttttattttttacattttaacagattttttaatttaaatttgaatggattatattttttttttacaactctatttttttaaatgttatttttttttttcgaataaaaaaataatctttaataggcagaaatatccgctaaaacaatagactgaagagtaaggggaacatcactctcagtaaaacgacgacctgactaataacaagcaccacgtgccatacagtgtgcggcttagcaaaccgtttaacatgaccaatagaaatcttacttaaagaagataaataaattgacaatcttgaacaaataaaccaaaaatagaaggcatagataccgaactaagaagataattattgcttgtgttcattttgctcgttttacaatcttcttagatccgttgacgaaaaaccgcggccgtcaacaataataatgcatacaaattttaaaaagttgcatttgtcttaatattttttaatttgagatttgattttt

SEQ ID NO: 188041 - DNA, 2733 bp, Cannabis indica
ctattattttaggtggcttatggctacgcgccaaattagttaagatatcgtatatatagtacattaattaattctgtccttttcagattaaaccctcatgcatatactttatctttccttatcttggttttaacttcttttaataaataaataaataaataaaaatctttttgtaaagggtttgatttgtacaagtctcagaccattttacagaggacctaacgtaaggagaagagaaaaagaaaaaaagtgaaagttgtgtgattctttataatttacagatggccatgttatataataaaaagtatttggattaacaatattaattaaaaggataaaagcaatactttatagcctttgggccactaaattcatatgtatatattccgagaggaacccaaaaaaaaaaaaagagaaaaggggaacaatgatatatattaattataatatatttgtttcatgaatcttacacctaatgacgtttcattcgaatgaaaaatagtttttttactagagagtttgcaacatgttttagtatacctaagaatcaactatatgagtgatcgcgattatagaccatagttcagtaatttcatattttttctcacaaaaataatatctcaacttcaactcatcctaccccaaacgtaaaaaaaaaaaaaagaaattatataagtgattgatataattaatgaaaaatactataccgttactaaatgaatttatagtatttatttacgtattttatgtgagtattgtatatatatgaccgtacttccagtagtttattcattttattatttttcaaaatacatcatcaaaagttttttttgtattttatttcatcatatatttacattacactatatataatacatcaaattttctgtatttttttatacatcatatataatatatttttagatattaattatttatattattaaaataagatcaaagagagataaattaagaaagagaaatgatgttgagaggattatttgtatagaaagagagattctatgtgcgatgaaatagctttgtaatggttatttgagatgaatataaaatatttgaggaaattgcattgtatattcactttttttttttttaatttttaatttttactttcattttcatattctttatgatatactcacttctataaatgatgtctctattataacttttagattaatgtaaaaaatatgttacacataagtagagagtaaggaaatattagacaacccacttataaaagtgagtacattgtaatgaaataaaatataagagtatttttaattaatgtatacaaaaaataagtgttcctcaacttatcccataaaacttactattattaaaaagaaaatactaaaaaattgataaaataaatttaaaatagtttttagctaaatataaagatggatttagctttagagtactcactaaattttaaatgttataattaaaatttttttaaaatatttaaagaactaaattaaaacgcatgttttaaactctttatttactttaaagcttctttaaatgttattattcctgctctaattaataagaatattttaatatattaattagtttaggttttaatttttatttttttataggaatacgagtatatatgaatattatatatttggacgattaaataaaataaattgaaatttgaaaaaaaaaatagaattttattaatatattttaaaaaataataatataaagtataaaaaaaataaaattttaataatgtattttaaggaaggaatagagtagaaaatgaaaaaagatttaattagtgcacaactcaggtagatgttcttatagagtagcttgaaaacaaacaagtttgttataatgaagataattatgacaacactttaactcgaaaaggaaaatgcttgttgacatgttgtccatgatgtaatgcaaatgttagtgtgtgtgcatgaaagttgaaactatttcagaagtaacatttgccatcatttcatatcagataattaaaagaataattagtcattaatttataaataaattacagcttgcatgcatgtaaatattgcaataaattagtcaatagtataatgacatgtactgagaataaatagtttccctcctatgaaaaatcaacacacgcatgaaaaatgatcatcactaatgatttgaaactttgataattaaagtgaaagaacaaaaaagttaacaaatgcaatattgccttggcacataataattacacctagctactgtctatatatatgtttattataaacagcaaattaagtttttagtccattatttgtaaagagagcataggattttgttttattaattgtctgtactaatcgttgcaaatcaataagaacaaacaaaattagtccataaaaactaaaaatcacttttacgtacgatcttataattgaacatgccataagtcatacatataacatggagtgcgttgtcaatgcatgagggactcggaatttaaagtgagcaggatttttttttttttataaaaacagggagggcgaaaataaatttaaaaagaaaaaataaagtgtagttagtggaatttgaacctttacactctaacatatttgtaatctctcttaaatattacatcaagcttaatgttatgttcataaatatcatcttttaatacaaacatatgttgtaactaactaaaataccactacaaaaactcttacttttagtcac

SEQ ID NO: 188042 - DNA, 3106 bp, Cannabis indica
cctcccctaacaccgagatagaactgccattaccaacattccaacgaacaccactagccaccagattttgagcttcaaggatacacgtcaaacatagctcaggttggaccctaaagtaggccgaagtaaaaagtgtcattgggataatatctggctttgaatacacatgagactaaggattaagagttgactaagagacgccaaccttgcttatcataatatatatattaattatcatgtcatttgaattttctctaaaaaataatgtaatatacacatatattatatatatttttctttatataaaaataaaaacaaaaatcatattacaaaaattagtaattttgtaatatataatacggtgcagttggaccgcaattattaaatttaaaaccgcaaactgcattacactgtgcggcttggcaaaaatgcaaatcacaaccgcatcgtaaaagatttcaaaccacatttttatgtagtttggtgcggtgaaagcggtttgatgaacaccctactagtattaaattcagaaacatcttatatatccacatgtcacattctaattgagtaaaaatttgttgtatgttccagtacggactacgcccaccgctactaccatgtaccctctctgttgatgaaattcacgaatacctcaactcctcctcctcaaaactccgtgaacgaagaatctgagtctccgattcgaaacacagcgataaaagtaaaaggttgaagatgactgaggctatgattcggaacaagcctggcatggccagcgtcaaggacatgcctctcctccaagacgggccacctccgggtggttttgccccggtccgatacgctcgtcggatccccaataagggtccaagcgccatcgcaattttcctcactacctttggagcattctcttggggcatgtaccaggttggccagggaaacaagatccgaaggtcactctctttgttcttaaatttcatctctttatgtggggttttgggtcgtgtgtggaattgattaatcttgtgtttgatttgttctacgttagggtttctgtttatttatgatttttaatggtgatttagtttttgaaatgagctttgggaatgtggagtttatttttagggttaaatattgcttcgaattgaaaccctttgtaaatgtttgttctttgccattgttgtcctcttagaaatcattgggattggattatttttgaaaatgttgataaagattgattttttacgttcgagctatatgttattggttaggtagagtcaaattgtgaatgtggatgagtaatagtaacatctaggatgattgtaagagcacttggattcatagttataagttaaaaatgtactaaatccattgtgagcagtaggaggctaggaaataatttaagctttggaaaaatgaaaaggaaaacttttgaagaatttgagtaattttgaggcatagtattttaggaagaatgctcgaggaaaaagtttttgtacttctaatcaaagatagagagacatgtataattgtaactgaaatgatcatctctcattatgaaatacctctatcaatcaacaaagatcttaacaaggagtcgtattatgaaatacaagtgagtttcatttgtttagtttaagatgggaattcaaccattgaacataatatggaaataaaactcttttatgtggaaattataatgtggtgatatgtgttcggagttcattttatagaaatatcatagcaaacagcaatatctagttggtgtttattgcttaattttgctcacggtataggtgttaatcatctttccctcgaatagctgtttgtgtctagatttctaggaaggttttagaaatctttctatgaagcttcatcctaactctcctaggaaggttgtatgcgaaaacgtgtctaaagaaggtagtagaaaccaatcaagattagagactaatgacatttctttcactcttatctttagttaggttccaacacggggactagtaacgaaaacatagataagtcaaaatgtgtgtattgggtactgataggtgatagcacttggccattctcaaatctgtgatcacttgagctatcatgtattcatgaataagtagtgatcatgttctctatgaactttcaacttttctaatatgtgtcgtagaggaaagtctactaactaataggcaaacaagggtcatttcgtagctcgtagttgtacagtttttttactattgttttcagtataatagtgggaaatataaccaataatatatggctcatgttttggacacaaatggtatgcttcattcttctatgactgagacatgtatttgtagaaaaggtttaaaaagggtattttttatgatgttctgcagggcgctcaaagaagaaaagtatgctgcccgctcggccattttgccagtgctgcaagctgaggaagatgaaaggtgaacgagttacaatcagtttttttcttcttccaattgtctctgtccccttactaagctgagcattattgtgattaaatgtactgattagtttccctttgaaacattccttagatttgtccatgagtggaagaagtatctcgaatacgaggctgacgtgatgaaggatgtgccgggttggaaagtcggcgagaatgtttacaactccgggagatggatgcccccagcaactggggagctccgtcccgaagtctggtaactgacacacatattgattgcaattgtttttgtcattgatgtttgataaaggagtttgtatttcccttcaagcatgtttcagtgttgccatgtctctggctattatgtccttagaaataaaatgcagctaaaataccttttttcacatgttttaaaaatgtaaaacagtgcttatcttatttcaagtcctttgtcatgtttgattcatcattctaaatccacaacggtttatggcagaaaaaaaaggtatttgtaagtaatgattaaagcttgatcatatcttttgttgtgtttataaaagattccatatgttatatgttgataatggtatttcataatatcaaatcaagaatgaaaaagacttcatcaaagtgagaaaaaccccacactatcaaagtgga

SEQ ID NO: 188043 - DNA, 5026 bp, Cannabis indica
ctctctctctctctctttgggttcaagtccataatactcctttcctcaagtgaagtgaaaatttagcctccctggtggcctcgcagttaggtcctctacttgaaatcgataagctttctcttagagaaacttggagcccattatttcgtgttagaatcatgtttgatatttcaaagcctgtgtccagaggaataccaatcaattttcaaagtatcaaaaaggttgtgtggctaaccttgaaatatgaattgctgccaaacatttgctttttctgtggacgtatgggccacagttacaacaaaggggttttgaatagatgaaggcctatgatgagtctacaacccctccttatctctgttatgatgagaaaatttatggtaaggttcgtgtctttactaatccactccttgagaactctaacaatttaaattttgaacctccttcaatgatttaattcatgtcatccaaccctgccagtggtttatgtgtttcgaatcaagttagcccagtgatttcatctccattacaactgacaaacttcatagcaaactcggtctctactcaacctaaaggtctttattcatctgccaatgccacaactgaaaaagccccttacattggaaaagcagcaatccatcccatacttcgatgcctcaactaactccacagacagaactaactccttctttcattgccttgctcaatggcaccatgaacaacatgtcacaccaacaaacttctctgattacgagttctagccattcttcctactcgagttcttcgagtaattcctccaactccattgccagccattccattgccctactttcaccctcaatcccgctgctggacacgagtaaattctttgtgggaatgccaacctcttttacgatgggcacttcggcaactccaccaaagaagcccaacaaaaagagagccaattatgtctcaaaggatagtttcaaaaagcaatccattatggttgatggagtttcccgttccatgatcaagtgtgtcaagtccaacccggttctagcatcgacatctaccgtcctgctcttgaacaggtcttactcttgagcaggccttcctacaaccatgaggatcgtgagttggaatgcacaatgtctagggagtgattgtgcattctgaaatctctcccatttagctaagagttgtaatcatgatatattatttattgtggaatctaggttagtttcaggttctattgacatggttaaaaattggcttagtttctccaatggtttggaagttggtagaataggcaaggggtggcattttgtttctttggacttctaatgtaactgtcactttattgaatcaatctttaaatcactttgactactatatttgttcttcctctcttaatgttccttcttttcatttgacatgttttaatggtgccccaaacattcaagatagaccaaatacttcaaaattacttcactatattggtcgaaacaatgttggtatgatcattggtgactttaatgcctatcttaacactaatgacaaacatggaggcaacattgacaaaagtccctcaaacaatttttgtcatttcatcgacagttttaatctcggtcccctagagtttgagggccctatctacacttggaacaacaaccaccctaaccatggaaacattcaagagtgaattgattggtgtgtgactaatgatcattggactgaccttttcccaagtaccactctcactcatggaggcttttttggctcggatcatagagctttaaaagtccacctcatacccctttctaacccctcgatggtttcttaagtccaacgctttcttttcaaaaatgtttagctccaggagcctagttcggaccagcgtattgttgattattggaaatcaacgggtggtaattctgatcccataaactactcaatgaaaattcaagaacactacactttcaatttgtaaaagtagaaccacaaatccactttccattttgaaagatagatcgatataacttctaaagagcttgaattggtccgttccaatttgcattgggatgataaaaccagagatcgagccaatatactttagcatcgtctcgatatattactttatcaagaagaactgtattggaaacaacgatctagggtgaattggttgaagcatagagaccaaaacacaaaattcttccacaaatttgcatcttagaggaaaactttcaaccaaattaaagaccttattgatgatgaaggaaaggtcctttccttagaggaggaaatcgagaattacttcaagaatcttttctcttcctctgacccttcttttgaggatatttctagagctctccacggcattaataaggagctttcttctctagtcaaggttcctctcctagaaacttttttggaagatgaagttcaaaaagcttttttccaactgcctcttgataaggctctaggcattgatggtttcaacacaattttttatcggatgaactagaaccatgttaaacaagatgccctcaaagttgttcttagcttcctcaatcggggggaggaaataattaacttgaataaaactctaatcactctcattcccaaggttaaaccttcaaagaccatcaaagacttttgacctattagcctttgtaacatcatttacaaaatcatatcaaaaactcttgctaataggcttaaaccgacactcaacaagctcattagccataatcaaagtgccttctcccgggtctcctcatatcaaataacattattgttgctcaggaggtggctcatgctataaagcttcggacaaaaggaaggaaaggctggatggccttaaagttggacatggctaaagcttttgatatagtcgagtggaatttcatctggtgtattatggaaaaatttggctttccccatgagtttatacatctaatcttcagatgtgtctctactatcacttaccaatttaatttaaatggacgtgtcttgggctcagtttgtccgactagaggaattcgacaaggggatcccctctctccctaatattcctcttatgttctgaaggtttctcttccctcattcgtcaacatgagcaatcaggtcttttgttgggtttaaaagtatccagaaatgctcctgacactcttcaccattatgagctagccacagtacagtgtgttaacttggaaaaatcatctctctatctttcaccaaacacaactctcagggaccgcacccttatttcagattatttacaaatgccaatttgtgccaaattcaaaaaatatcttggtcttcctcaatgtttcggttgataaaaaaaaggctttcaactacattaaagagagagcctggacttacatcccaaattggaaaaacaagtttttctccaatggaggcaaagaggttttgatcaaagcttttatgcaatctatactctcttatgccatggcttgcttcaggcttccagttagcatttgcaagtctcttgaatccatgatcgcaaatttttgttgggtaaccaatgctcaaataactcgaagataaactagattgaatggtccactctttgtaaatttaaaagcgatggcagtttgggcttccgatctcttcctcatttcaatcaagcgatgcttgctaagaaaacttggagacttttaaaacaacctcaccctctggttgccagaatccttgcagctagatatcatcctcattcttctttccttaacagcacaattggtctagccccttctctagcttggcatagtattaattggtggaaggatttgtttaaacatggcctaatatcaaagattggaaatagccaaagaactaacccgatgcatgactactggattcccaatactagatttgtaactacattgagagatcccccatctcatgtggctcactttataaatgaaaatatgacatggaacctaccaagactctcccaagttttcccctaagatgtgactcaaatcatccttaacatcccccttcccttatccccaactaaaaactctcttgtttggcaacacacaccttctggctcttacaccgtcaaatctagataccacctaagctacactctagatactgtaaggtttgagccttctccttcctagccccccacctggtggaagttatactttggaaacttaaccttcctttaaaagttaaacactttgcttataaagcatcaaagaatactctccctactttggtcaacctccaccatagaaaaatagtcccatccccattatgccctttctgcaaatttaattggaaaaacacttgtcatgtcttattcttttgtaattgtgtcaggaagcattggaaaggtatgcccttttactctattcttaaagattcagttcatattaagttttttgacattattgtttatcacagtgcaaacttatttactaaagaagaggtaaagttgtttgtttacttgtcttggttaatttgacatgagaggaactcattcatagcaaaaggaactccaacaactcatcaaaatctctgggactttagccactctttgattcaagagtttaaggaagcaaggcaaatggaattaaagatgaacttgtccatgctgggatacaatctcggagtggatagttggatccttcctccccctggcctctccaaactgaacacagatgcaactattgacatcaactctaacaaatcagggtttataggagttcttaaatatagcaatagagatacgataacagccatagagatcccctacaataggacaggtgatcctcacattcaagaaccgaaagctcttctcttaactcaatggtttattgatgaacaattccatgtcaatttcattgaaacagactgcaaatcaatttagatgcactatggaaggatcaagattacaatagtgtctttggggacctcttatcccaactcaaggtgcgactttctactctcccaggtgtctctattcgccatatccatcgttcagcaaatacaaaggctcatgatgtggcaaaga

SEQ ID NO: 188044 - DNA, 2729 bp, Cannabis indica
gtcttgtgtaattatctctttttgtttataaggagtgatactgttaacctcttattacaatctcttaaccctctaccttaaaacacaagcaaaaaaatcaaaaaatcaaaaatattttttttacaaaaaaaaaaaaaaaatcaaatgttcattatacttacaacattatctgctttaaaaaaaattcaaatagtttacattgtcaaaattatgtttgaagtttttaaaatacacctggtaaattgaaatgttaaaaactctgtttttgaattataaactattcaaaaaaattccaatatacgtgtaatttcaaaagtgaaggttgaccaagatatcctaattatcactcattattttttattgctttaaaacaaactaagtacttgatagtttacgaaattgtcctcatttgctgcttccctcgatgatagttcaatgtgtgctggataaaaataaaataaaaaatcagcactcaaaatctagtatcacaccacttgaatttatccggcctttaaggcccattagtggcccaagtcgacacactaaagagccacattttcgtgtaaagtttcctagggctactactatacgataccagtcacaccctcgaactcaaaataaaaaaaaaggaacatctatagagggcttagactgagtctcaccgtattggaacacaaaagcaaatagagcagtcagccggtttgttgacagttcttttcatttggtcaacattcaaaaggggcaacaaagcatggaaaaatgggttataattgacatcaccaatcactatttccttccactactatagaaagataatcaaacaaaaacatgttctaaattctaattcttgaatccaagcatatgattatctccaaatccgccacaaacgatgttacatgtattacatgcactaaacaacatgggaatgggattagaatttagaaccatacagcttaagtatcaaaatcttaaaagggttgttccgttacacagaaattagtgcaaaacacataattgaaactctcaaactcctcattcacttgctttaatactacctcagcaacagcagcaacttaccaaagttccctcacgcaacataatacacatattccagctcaaatagaagtgtttgaaaatgagacttaagtagattgactatgtttcttcagtgcctttgaagcccgttagccattaaaaaacctatgaaacccattgagccacaaacttaagagcatcaaatgaattaggttgtcttatcaaacttccagctgtgttttgttttacatcaatcaaccatggaatatggatcaagttcttcatgcttgttaggtttccaagaattataacaaggaaaataaaatccgaaaacaaatctatatcagaatctaacaaaattaatcattctctactcccattcaatcacaccatataatgcactttcaaaatcccaatcaaacaaatatagaaaatagaaacaaaagtaaaaataaacattaagaccaaataatgtgtagagctcaattttttaaaaagattttagttttacaagtagaatgggttcagtaataagttgatgaagaagcccagatatcataatttcacaacaaggatcttcataatattttttttttctcttctaaataaaaaaagaaaaaaagaaaaaaaataaaagtaatttctcttcaaacaacattccataagttcattttaatcataatcttatctgatttttttgtcatttttttccgcataataatattagaagaaaaaaagattgaatcattgatcataatcacgatgatcatcatcaaaggcatagagccgtacagtgtagatcgggaccgtctgtggcgagctcaacctcatccaacggtggaaaattgagatcaaagggaaagggctttcgaaacgatgaagaagctatatcaccattaacgtcgtcgataaccgaagacgaagagtcacaatcgctatggcaatcttccggaacaaccggcggcgtccgtggataccgccgccgggacgacactgccggatccaccgttccggtagacaacggcggaggcctgggcccgctaaacgattccaaggtcgagctcaagctgcttgacgtaggtctctgaaggtccacctgatgatgatgaggatgattctgatgatgatggtcgtcgaatccaccgttggatccatacatacgatgatcggctaacggatcggcgcctacgccggtgggatgattctggtaacaaaaagggggagcaagcgagtaagccgccgacggaaaatttgtcttggctttaggtccacggagggtacgagctgccgcgtcgtatgcacgcgccgcgtcttccgctgaatcgaaagtaccaagccagactcgggtcttcttccacgggtctctgatctcggctgcgaatcttccccaaggtctcttcctcacgcccctgtacctaacctctttcaaacccgatccgttgttgggatctactgccggcgtctccaccgctgcttgagtcggcggagcaacccctctcccggtggtggctcctctgcctcgcctcatatctcaaatcccaccacccccaccccaaaacaaaactcctcctaaagaaaaacctcggtttagacaccgatttactcgatcagagcctgattttcatggaaaatttggaaatgaaaacccccaaaaagaaacaacaaaaaagttgaaattgttagctttgtgtgga

SEQ ID NO: 188045 - DNA, 2889 bp, Cannabis indica
ataaaaaaaaaaaaaaaaaaaaaaaaaaaaaaaaaaaaaaaccgtaactacaccatagtgtgcacagttcttctttactctttttagtgtgaaaagaatttctccctcgttcttattcttctatacataaatacatatattcatcctcttattaaatactcaatcatatgtctaaaatgttattcttctattcagtcttttttttctaaaaccatgagaatgaggtggctctaatgttattatcaatgacttaaaactacaacttggctgaactgaactgagaatgagatccaggtatacctcctgcagatcgaatacagaattaaaaataaaatttttttttagaaaatttacactaagtacgtaaaattgtactttttttaaacttttttatggacttacgctttttaaaaaggaaaacaaaattgttttcatattgtcgcaatattatactatattaacgcaacataaaaacgtgtaaacatcttttaaagaacaacctaaaaacaacactctaaattttgattgtttttgggtatttcataaataatcttttttttttcttcaaatgtaataatttaattaggtgtttgccgttagatctttccaaaaaaaaacattgaattaaatgttggtaattgaccagttataaccaaaccatccaaagaagaaatatattcacgcttttttttgcatagaaagttttggaaaaatccatacaccacctatttgtctcaacatatatttctgagtgatttcagtgataaaactaatgttcaaacaatttatttttatcaaatataattatgtaataattaattagatgtttgtgggtatatcttttcaaaaaataataataataataataatcaaacggtatttgaccaattacaatcaaaatacacataatgatgtggcaaacatagtaaaccatccaatatatataaatattcaaacgttttttgcatacaaagtttttgagaacttagtgagtgattcactgccaaaagtaaagttcaaaccatccatttcggtatatacttgtgagtgatttcaatgcgaaaagtatagttcaaacaattcctaccacgcacataaaagaaaaataatcgcacgttcaacaaaatatttaatttttattttcagcattataaattatttaaaattttaaaaaatttacaaataatcctaaataaataagacatagtgtaataagaaaacaaaaataggacaaaaaattctttggttgttgaaacagaaagaaacgtattaaaacgaccctacaagggttatactataaaattatccaaaaagtttttaccaattttaaaattacttcgcggtaatacatcatatttgcttacattctttagaataagattttatgattaaaattcatttatacgaactaaattatatacgaagatcatatagatatttgtatgaaaaaaaatattaatttggaccaaaatgagataaaaatatccaaatattcatgaaataaatataatgaaaaatattaaactctcaaaaaaaatttacttttaatcgtagatctaactgcaaattacattcaagaatcagagatctaatggtttttgtaaagattagctcgagaacagcatgttatccattgaatgatcatgtataaataatatctgacaaataattgctaaaggaaaattaattacctgattctttttctgttatgaatgagatttcaattcattaatagaccaaaccattcctaagcagaaggctgcagatcaaacaccagcatgttaaaaaaagcgcacatgtgaaacactcatttatatttccaagaacttcatttgacaacattttcatgtacaaggcacggctagcaatatcagtggcagttccaatgaagaaataccttaactgtgctaattttacgaagttggctcaatatcttggcaaagtccggaggaggctggcatgtgaaatgtataattttccctgtatatggatgcttaaacctgcaaaacaaaatcataagcattattgccactgagttgagtaccacttttatcaatcggtatcaaaatggaaaaccatgatgcaaacacatgtatatcattttacccaagagccagagcatggagacagggcctttcgaatcgcgagactagctttaagagttgaccatgaatgtcagagggagttctaggccgaagcagtgacaaagccatgctcttggtccctccatacacttcatcacctaacaaaggaattcccaagtactttgcatgtgcacggatctactacaataaatggaggatgaaattgagaatataatgcaacaacaaagacttgcattcatgtttattcttatttttaactggaggcaagcaactattctattatgtaaaacaaaaattagttgatgcaaaacttcccaacacaacataaaatatgcctattagttataaacataagtatgcatacagaacagtagaatttgataaagggtgttgtataattattgaaagataaccaaacttcattaataggccagaacccagataaacaacaaagaccattaagagtaaatacagagtattgtgcatagtgaaagctaaattatgagcattcctaggacagttctcaaaagaaatagcaaaaaatatttaaaatgagcaatgtcagcaaaaataccaaaagaatagagacctccataccaaaaatgagcaatgtgcatagtaaaagataacttagcaagtggataaagggttattctattgacacccattactttttcactttctccaaataaagtttatttggaaaaaaactctagtctttaacaaaggacatgcacctcaagcctttaggctcaaggtgagcacggactgggttatgcacgaa

SEQ ID NO: 188046 - DNA, 5642 bp, Cannabis indica
tttttgacaataaagtttaatagatattggattatggaatggggttgttcaggagcttctttttcgcggtgcattattgccacttttcggatttgattggaagagtgtctttgtggttgctgccctgtttggtgttctacacattggaggtggccgaaagtattcctttgctgtctggtattcctaatatctgctactcacagctcttataattttgtagagtgacaacggacgccactttaaaattacaatctttttaggctatgattgactatcctagtttcgatcatatattctgatgcttttcagggcaacttttgttgggcttatgtatggctacgcaaccattctttcttccagcttgattgtacctatggcttcacacgcattgaacaacttggtcgggggaattctatggcgctatgaaaatcaatcaagttcatcagaccaaaaatgatcatatcatttcatgtagcatacaacataattcaagcaaagacattaaagattcgaactagtcagtctgtagtgcatccttactttgtatgtaatgtatagacagccacagccacagccaccttcattcattttgtccccagagaaagctgcttgtacacataaacaagtatatataaaaaagtcttacaattccttcaaacttagccttatagaatagtcatagacatgatttttaatcacatagaaaagaaaaaacaaaaaaccccacgttgtttatgaaattgttgttgaacttttctagaacatagtttcacttacaacctcacgcgtaagaagttgaagaaagtggggccttttgtatttatatgacttgttaatattttcattaatatggtaatacattggctttcgaaacgcatagtttgaaactttccatctttgtttggttttattatttgctgttttgtatggtatttgtatttttagtggtgaagacaggttgtgtcccgcgttaaagacgagtacacatcgtggaaatccaaaagttacacaagaaaaaaacagaacgttaagcctctaaaaaccctttataaaatgactgtccttctctatctttttcaatcaaacagtatctttctaaatcattttgcttttttcttcctctactctacggtacccaactgaacaataattcgaatcagctccaatttttccaatcatggcaactgtaagttctttttcccttcattctttcttttggaaccttttctggtttggttggtttcaatgtttatacagtttatgagagaattttgattaaagggtcttatggggttttaataaaaatgataaagttttgttcttttctggttttttttatcattaatctgattcatgtaaatttgcagcaacaacaacatgggaatgggagacctcttcctaaatttggggaatgggatgtgaatgatccagcctcggctgaagggtttactgtcatattcaacaaagctagagatgaaaagaagactggtgggaatcccaagggtggggcaatagcatcaactccaaaatatggtgaccttaaacaaaaccatgaatcaaagtactcaaaaaaggtaatgtctttatagattccctagttgaaaatttccccaaaggaattatatcttcattgaagttctgatctgatgaaatgtacatttcaaatgcagagcaaatggtggttttgctgtggttaataaatcccccggatgaagagacttggtgaggattttgagtacataaataatccaatcgaagatggaaagcagaacaagttccatacctcctaactatatgaattagaattttattcttattttttttaaaaggccttttcgttgaatgtatacgaagagagtaatgtagatagacgaatctttatttttttgggcaatgaattcaaaaaatttgctctttctttccttctttctatatcaatgagtatcagccatgtggttaatgatgatgatgatgatgagtgacaaaaagattgcccttttagattttggaaatattataatggataaatgggatagctttctgatgcaatcatcttcaaacactacctacctagtaaaaaaatggcagaaagaagcaaactaagcttttgggtttgtaataaataattttatatattaaaaaaaagaagcaaaagagaaaaaggtaaattgatgattccaatgagtcctatagacaatgtttgccaataatattttatgttcatatgtcgttaaaaacccactgaattgtccactttttccacagtcaaacgtgacttgttaaatgggttgttgtcaaaaatcaattttttttttctactttttgaagtgatattttgaaaattgggctgctttgctttgaacttggagaaaggggaagtgtggtctcctccctcaagttgttggaagccaatgagtgattcacgttttagatcaaatcgagaccagagaagcgtagagataaagaagaggagttcatagatggaataactcaaaaagcaatagaatggcaagctgtgcgattaaaggaggctgccccagtgactacatagccattgttgtatcgaccctttgcatgattctgtacgttttgtttgttattttctactgttttagttttgtggatcttttttttattgtttaactcaacaaacttcaattgggtctttctctgatcaagtcaaattcacctctgaacagttccaaatggggtttcttggtatactgttgattcaatagagaagccccttttttgttttttctgaccaaaaactcctttcttagtgtttgtatatcgtattgacaccacaaagatacttcttttttggctccaaagatgatttttttttttattttattttattccaagtgggtctgtcttattgaatcatatatatgaatcctgacggttagttgtataatttgttctggacttagttactgtgttttctttaaattgaagtgaaaaagaccttctttctcgaatgaaaagtaaaaatctagtttttgaagaagtgattagattggtaagatgaagcgtttatgatgttttggtgatattacttccagccatgtagttgggcaaagcggattgttatgaaaggaatagtaatctggtgataacaagaacagtttaaacaagtcatcatttatttgatcaaggttaccaaatgaagataatagttttgattggatttaagaattttttttcactgttttcttatgtttgagtttctgttcaagctattgcatatgtgctctctgtttaagctgtaagatcaggcagtgtagcgttttacaatcggttaagtactgattttatgatattcagcaaaaagattattcccattttatgttttggaattggatttttgtctgctcaaatcatctgatgtgtgttctcatataccattttctatagctgggaaatctaatatctatagttcttgttgttttggtatttattggtgtttttgccaggcttctgtctcgattaattgttccctttgctgttcacaagattcctcgttcgaaaggcagtggattctggattccaacccttcaagtttttgctagttttaatcttatattgtcattagtggtacattatgaatttcctttctgttgccttttaatcattggtcgtttcatcttagtcttacaatattaatcttaatttgtgtttaatgcagctttcagacaatttcctgacatacaaaaggagatattggtggcaatcttgctatgtttgggcaggttaaccactgcttcctttgttaccatatgatacactatagtaccaatccagtgcttgaaagaattagaatataggcttttattaatatctcagaagaattacaaaccttccaaacttcggtatctccccagaaagtataggatcttaagctgtactaactctctaactaactagtaacttattcttgcacctaaatatgtatttgaggcctaacaccatattcatctcaagatttgtgtactttgtcattgttatatttgcattaatataatctacttttgctcctaagtttcttaatttctcttctgctttcagtctggattgagggtctatttggtttcggtttgttgttgagctgtcgcataacgcagaccttccaattatattacatttttgtcaagtaagtacaccagtttacctacttaagagaaatagttgttggattgtatgagtaaactctgagatcacttgcctcttaatcactgatattgatattgcaggaggtgtctaccaccaatcagatcttataatttcctgccactaattctcttgccatggattgctgtctctgcatgtaagaatatctctgctgagtttctcttttgcctttatcacactacataattttcaccacttgcaaatttcttaaacattgtttggtcttgaaatgattgttttccagtttcttcttgcttaactaacaagtctattttcttttctaccatagttatacatatcagaaaacctttgaattatcggtgtcatatgggatttcaatggataatcccagtcgtgtcactccacgctctatatgttattgttttggttggcttcactggagccatccgacatatcgagttcaggtttgatgaactcaaagacctctggaatggaatacttgtttcagcctcttccatcggtaggtttctacttctggctccatacaaaattcctttttattctttcagtagcatagtcatagacagtctcattacaaagacacagaatagtaagttttttaattgggtcttaagttggcatattctgggtcattgcaagatttgtacttcttacattctgatccattgatatttttgtctgaaaaatgaagcaaattcaaaacccagaaattgaacctatgtataaacaaagtttcagttagatgtgtgatcttgtaatgattgatcttttgtgctaagtaactggtttgtttattgattccaggtatttgggttgctgcttacattctaaatgaaattcatgatgatatctcatggcttcaagttgtttccagattccttctactggttatggtatggtttctcttttccctttttggtacactgtcaagtccttcaatttgtgtattttattgacatatttgtgtatatttttcaggcaggtattcttgtattgactttgttctctatatcaagctcacaacctctgctctcacaaataagcttaaggaggactaggagggaacctctagaatttgattcaatgggcaaagctctaggcataactgacagtgggctactgctgcaaagggaactaactgcagtaataaatcccaccgaaccactcaacgaacttcttcttaacaaaaggtttcgactttccttcatggcatttgcagacaggtcttacattctctccctaatttatttacatttgttttgtaaacacaaaagggatctatgatcctgcttaaacacttggaaacacaaaaataaaggacaatttttgtgaaacatatatgtaattcttgttgttcttttttccttctgattcacagttgtttggcaggggagagtgtgcatttttacgacgaggtacaagaacttggtaaaatacctgtagaggaccctgttagaaggatttac

SEQ ID NO: 188047 - DNA, 842 bp, Cannabis indica
aaaaaaaaaaagaataaacataattttgtgaagaaataaccagtcttatcgcatactaatgtataaattatacaataggaaagtgagtgtcaaaattcaacatgcattcttcgagttagtgtgaaattagtgcatttccttcattttccatttatgagaatgatattacatatttgtagtagctacacaatactaacaattttactattaaccctttatactttttacggaacactctccaacccttaaaatcattttatcctcgaaatggtaaaattaagaagataaaatgctaaccttacttttcaatgtaaaatgcaggaatggaaaccaatattaaagtatgaatagccaatggacacacaataatagttatgaggactacacatgcaacaactcaaatactaatctcaaccaattcttcactaaataacctagttgagttgataaaaactgagataaaatataacgaaaacaatattgagatatcagtactacaaaaaggtttattctcgtcggtcctcaaaacgaatttttttgaggaccgtcgttaataaagctacgtgactgtttaaaaccgtcaaaatactccactatcccaattgttttaaacagccgtttagaatctccgattgtacaaaacagtcataattttaaaattcaaaactgagttaaaatagtatccccaaagattttaaaccgtcgaaaataataagttaaatatataaaaatccaaaaaaaaattcattttgttcaaacatatttcaaatctctctctccctttcatcttcaaaccctaaaacagaaatccaccaccaccaccatggaacccaatcacagtc

SEQ ID NO: 188048 - DNA, 1964 bp, Cannabis indica
ttttcgagtcaaaaaccttgaaagtctttctcaagagaaaaccttcataatcacaaacaatcttgaagattgattattcacagtcaatttgacacaatttggatgaaggactttccatatgattatttggattaatcgtttctttggacagaaaattagttcacgcatataatgacgagtgaataaaagtaagtaaaaactagaaagtagagattgcaagatgccaataatactttgtcaatcttcaaatttaaatataaaaagcagagagaaagaaagcatgtaatgtatggcattattggggtgtcatctacaataaaagtaagacctagcacaagtcacaacatattaacagaaaataaaagtagcattaatttgggaattcttcctttaatttaggttagttatataagtatagtttatacattagttctcatcaattttgaagtaaaattcatggatgacaaagttgttggagattgcaagatgaatgatgagaccacaaaatgacattataagaggtattaatagtagttactgtattttatatacatatatataagtgatatatatagcattttttcaggtaggagttctactgcaaacgtttgtatttttggttaatagatttttttttttttttgatgtatattgtagttatctcagatatttgactaattattttaaaaaagttccaattagttacacatctatttgttatacgtgtaaaacacattgttgaaatacagtttttggcaccataaaatatgaaaaaataatttgtaaaaatttgttaggatattggccaacccttttaagaaacacattaatcattattaattttttggaaggaatatataaacaaagaagtaataaatagacaatatgacttgtcccttaaaataaaatattgaaattttacattagagtattacttctaatttagctactttcatattcacttttaaaaacatcctaaatgtggaattattaagtgcttgaacaattatagaacaatatatttcttgaaaaatgctttatatcacaattgaatttataccaaataaaaataaagagaacttaggaatcctattaacacctctttcaattaatgcactggtacagattcagaatgtgaatgtctattacacacctcttcaattttattttattttattgattttatttatttattttgttgaaaattacaatatactcttcatctttgataacgctttaggccttttcatttaaatgtatatacccaaaactttttttttttattttttttttatgaccagattactctagcattttctcaaaatatattaaatgaattgaaatccttgatttatttatttatttttaaaaataatccttggtatttgtctacatgcaggccttaaaataaacctaaaatagtaacaaatataaacataaataaaattgaaataaaagccatatatattggagatacatacttatcataaatatcataaagcttcagatcaatatctaatatggatttttaccatttataagagggaagtacaacttggtcaggagagcattcttagatttttttttactcatagtgtcaaacatggcaatacaaaatatatcacaacaatatatatttttcatattttttttttttatagaatatttagattgtatacatttttgtattacacattcagatcccatatcttcatcagatactattaccaacgtttcaaatcatatctatatataataccatagactttcaatggcaaaacatgtggccaatcttgtgtgcttacatatttgataagctctcatttctattaataccatttacatattcatagtacaacaagaatccatatttcttctgcataaggagaaaaaaagaaagagaaataaaccatggaagaaggattgctaaaaaggtccaactatgatgatgagccattgccaag

SEQ ID NO: 188049 - DNA, 746 bp, Cannabis indica
attcttagataaaagttttatataaaataatgcgaaatacatactcaaattgtacacatttatatacactaatgtgtaataaatattagctaagtgggactaattatgagtgtatggtagagagattaattatatatgagtgtgtcccaatctttcctatatatatatttacttcaatgagggtcaccactttagaactaattactcctttagttcattgatgtagtgtacttgaattttttcatcaaattataagcacaaaattagatgatgcgagcattgttcaaatagagttaaatcatcatgagaagggtactcatgaattttcgatgagagggtgattgcatatttgtcttcaagaatatacatccaactaattagtgcagattattagtcataatcacatggccagcttgcgccagatgatcctaattaatacacacacctttttgcccaaaatatatatgctgtacgtactcatttatttctttgactttaaactttaggtgtatatatataccttcataaatattttggggatctggtgatccacattattccgaccgcaaatagataagtaaataagtaaatgtaataagaataattatatatgtttgctgcttatctcaatcatatgtgaaactcataatttgatcttctgactctctacacagaaagaactaacttaataataatacattaattggtttttttttgtgaaaaatgtaaagaaatgagtcatgagg

SEQ ID NO: 188050 - DNA, 1146 bp, Cannabis indica
acattgttatgaggtacaaatgtgcttaacactattataagatagtatcttataattaattagcagtttttataatttttattaaattaaaataaataaaacctgatattacattatattttacaaatatactagacaatatagatgtcttttaacatttatctaaaataatagagagagctttttgatatttgactatgtcaaagaaggaatcccactaatttatgcttatttttattaatttagaatgtaactatgctttcttgaaaaaaaatgtaaatatatttttgctaaaaacaatacatgtaattatttttttaaaatgagttctaccttattagttgatatttcaaatgagttctaccttattagttgatatttcaaatgagttctaccttattaacctaacattaataaatccatatatatttttaaaatgtactagaccttttgattgtttttaataaacttgttacctatccataaatatgaaattaaaattaaaaaatatagaaagaaaattaacaaaatttaaaaatatggccacactaatatgagttgtcccgtaccaatattttaaagggcaatcacaacacagcctttcacattttcgtgtcgtgctcaaactcgtatcatattttactcgggccaacacatttttcataaatggcaacaagtgctacaattgctattgattcaaagagtttccaacaagaaagagcttttcttacccttctcttacttaatatcttgatataataacccatggttggaactagaagactcatgccaagacaatgagtagaaaactagacatgtagcaagtaattttcacagaacaattctaatgctagtaagtttgtaactaaaaggaaaaacaaagagggccaatgataagtgcagcttaatatttttatcgtaaaataatgcaaattgtgaattggaggaagtctcgatccattaacaatcaaacacatagcctaccaccctccacggtgtaatatcgctattagtacaattaagtatcaaattctgtataataacttttaaagaatatcgttaaccaatagtgctagataccacttgtgcccaatagcaatggtataaccaaactctaatcctacttttcattggtaatatgggcag

SEQ ID NO: 188051 - DNA, 1337 bp, Cannabis indica
taaattttattctctgggcatagccccataaactaagagcgattcgaaaggattgctgataccacgtataaaatattgtcattttattttttttatttttactttttgcagcatatttttgttccatcaaattctatgtctgatagagtagttaaattttgttcgaacaatttttattacaattctacattatttaaattgtttaataatttcacttagtaatcataaaaacaaaattttaattggtattaaagtgattcactaactcttagtgagatcttatatttaatttcagtttaatttgtttcttatataaaatatctttctttgtagaaagaagttcggtatctcatcctctactactcaatgactcaaattatctctactagaaagtgaagatgagaactttcattaaagccgaaaataatagtacaaaagtaaaatttgaacttttgtggaatatagaagaatttaaaaatattaacaatctaacaaaaaaattgtaggttcataaagtgccattggaaagaataaagtaattaagtgtaataatctactcacatcaatggtaatcaaattaactattactaaattaaaatatacactttatgtgatttcacacatttggcatgatataacacgtattagttataaaataatgccagaccaaaaagaaaaattctgtataaaaaaaattaatgtgttcctaattattaattggtgtaattattaaatagataaaagaaaaaattatttttattttaattttttaaaataatatgaaaaatttatgtgctcaaccaaacaataaaattcaattaataaaaatataattacatagtactctataaaaccgaacacaatatacacgtttccttacaactatattcttcttcataatattttctataatcaaattatttcaaaaatgtaatgtaactaatgcaatcaaattaaaatgacaataagaataaatattcattatttaaattagaaagctttttcgggtaattaactcattcatatctcattatactctaaaaagaaactaggaattcatataaaagtgtgagggtttatcaatattcaacataaaagtgaacaagagtggtgttgaatgaattcttgcttctgaattatatcaatactcacaaaatttgaaaaagaaaatatttagttctttggtataacacttgcatcattacaaacagctcatacaatttgaacaaaaatttacgagtattggaagatcacaaggaaggagaattatcactattaccaaaattatggaaaagaaacttactcagagtaacagcaaaaatatacacattcgagta

SEQ ID NO: 188052 - DNA, 5936 bp, Cannabis indica
  modified_base (5782)..(5782): a, c, t, g, unknown or other
tttttttttttttatattgaagtataatgagttgatattttgaccattacaatgctagtaaatattatttctagcttattgcgtctgtgacattgattacgatcacgatatttattacggtcaccactaagatcacaacttatttagttattagattgtaacattcccttaaggaaaaaatgcaaatttaaatggggagtaatttttagtcataactttattattttgttataatactttaaggtatgaaatagtatcttctataatattgttccatgtattgctgctgcaacataggagcacatttaagatgtgaaatatgttacttctaacattggctagcaattatttatccacacaattataatttaaaagtaatattaaacatttatacttactaatttgaaatcttgtaatacaaattgcaatttttcatgttgatcaattgtattacaaatatatatttttttaaagtttgttaaaaagtaaaactattttttatcgttaaatatttagattttaacctgtttgtaaatataatgaagaaaaaaaaaatcataattttgattttattttgttgtttttggacacataatgtttaagtggatttcaatattaaaatttcataataaataatttcttccatttatgcaaatgagaagagaatgcaaagaaaataagaatttctatccttcttttcttttatttttaataaaaatacgatgataaataaattaatgtgacaactaattgaattattaactttgatgtttatgacatttaaatatataatattaaaaaattttacaatttatttttggtgtagcatattctatacactctgtatttaaatgaatttttttttttataattatatatattatagttatttagacatttattaaaattttaaaaaaatttaagacacacaaataactaataaaagttaaataagtctattattatatggataaacacgttgttactttattttttttaattattattattactattattattatttaaataataaaaaatgtattgtttaatatgtaagaggttcattgtcaagaaaaaaaaaataaatatgtaagaggttctttctctatgtatatttatcattttatttcttttatttttcctaaagtttggtttgggtgtgtgtagttcctttccttttgcttgtggtaactagggttctcttctctctccctccgattaaacgccgacgttttggaaccccgtcgtgcatccccattctcgccgatatgaagctcactgtcaagactctcaagggcagtcatttcgaaatcaaggttcagcctaccgatacggtcagtaatctcatttccatttttgtttttttttttgttcttttggagctaaattattattactatgttaaagaaagctgaatgaaaatgaagaatttgcgattgtttcaacccttaacccaattaaaattagttatagcacaatgatgtggctgaattgatttgaacttccaccgaaaggcaatgctgattcgctttttgttctggttaattttgtgattgagtaattggtttaattgttctgtatttatagtcaattacgtttcttacagtcttataatttggttattttatgtgtaaatgtatttttatatgtttgcaaatgggtagtattgcttcaataattgttgatttatggtcataaagttatttttctcatttgtttttatttcttgttatagacttaatctcattgttaggcatatttgtttaaatgttcaatggtgtttggtataatactagtacaaaatataaattcatggtattttttagagatgtgtagtttttggcttggaaagatgttgatataaatgatggattggttgaaatgtggctttcatgtgtttaagattatggctgttaagaagaacattgaagatatacaaggaaaggacaattacccatgtggacagcagttgctaatccacaatgggaaggtcttgaaagatgaaacgacactagccgagaacaaggttaccgaagatggttttcttgttgtcatgcttagcaaggtacactatttatttttttcttccattccataatagttttttattaaagtctttcttgtgtttggcttgggcagttcgactttaacattaccattttgatttttcagttgtttgatgtggagtttcttttttcattctgcatatctttgcttttttttttttttttgagtggtggtttgaatatggatttttcatgtttgtaggattttcttatcttttttggctgttttagaaaacaattacgataaattgctgaataccttcaagatatttgttgctaaactgatttagttggtctttttaaaaaaaatgaattgaattttatgatttgtaacttgtctcaaccttaatcataaaatgtgaacacatgctacttgtttattaattataagtatgttattattctttttcctttactggcaatgttgcccagcattattttgtactccttaattaagttaccattttttttaattacaagtctgtgacagttctctttcccttactggcgaggtcacctaattattctgtacaccttaccttaattaatggtaggtactgatggagtggaaatttttttttttcgtgatactcttttgtaaccattaatatattatagaggatgtagcaagtgataaagaaagagagaaacatgggagaataggtaatggaagaatttgtacacaaaaaggaaacctgtggtaacacttcatcattttaggaattagttagagtctgagtggtgaccacactcaatttatgatgtttaacctaaaaaaaaaagcagtgccataatttaagttaagccctaacaatgtaacttattggattaatttgataattaatttcaatgtgctggttttctctggttcaaatttaaaaaccttattatatcaaagattagtctacattgtcctttgtgagacatccgataaaatttgaaataaatctacattaaactatgaaaacacattcaagtacttctaatttgattattattgctattgttgttgttgttatcttgagaagaaaaaagaggaatatggcgatgcatattgctgtggggtggctatttagaattttattatttgagcacttaagacttaatttatttagattttgtagtttctttgatgatttataacttctatctatttgctagacttggtattaatcacagatcattgacaatttcctcttttaaagataagattatttgttttttctctcttttcttcttcacctctctgctcatttatatgttgggacagcagtccttgaatgatttcacagtgcatttgtttacttctttcacattttaatgcatgttggtgctgctttgttggtaagataattagtataatgtctaggagggagatattatggataatgatatactgacattgatgctccaaaaatattttgtggtgctaaaattcattgctgtaaccttctagcaatcttgtttgtttcctgtgtctatttttgttgctcctagtttttcttacttcctttctgcgtgtctacagagtaaaactttaggctccggctcagctggcacggcttcttccacccaggtactgttcttacctgtcataggcttatttctcacttctgttatttttgtatagtcacatctctttctacctgtccgccacagccatcttctacaaatccttctgcagctgcaccaacctcaaattcttctgctcctgctcctgttgctgctccagctccagctccagcccctgatactgctacaattccagcccctgctcctgctcctgctgaagctccggtccaagccccgtcagtgtacttgaaaaaatctttttttagattgattaatcctacatgtatttcgtattttatagggttgatattctggtcatggagagagcatcacgtcacttatatatatgtatataatgtttttatatgacctttgttggcattaatattgaaaagtgagactaaaattagatgaacgccttgtgttttttctctgtgaggacttgttatgtgctttttttgtcttccctttcatgaaattctagtttattatgggagagaaaaatgacagactggaaaatcaggttttactctttcagattacatggtaaaataagcgacatttcattctcttatggaatggtcccattagacttttaaaaatatataggttttagctagttcttggtttgagatgcatagagatccctttaggtgtgtacctagtctttttgcccagctgcttgatttgccaaactgtcctacttcctgtcacccgtcatttgttgctagatttagtaaacaacatgtcctccattcttttgtttctaaaatcttatattaaaatgatagctttgtactagtttaccaaggaagaacagtatgtgtagaaccaatctttttgcgattggtgtggtgctgatttatcgttacataggtggaatacatatgtaaataaactttaatgtatgatttaagcagtcaatggatatggtaatgatttacgtatatgatgcattgataaaactagatatgttggagcctttacttaggtatttatattactgttagggtcctgggatatatttgactaatttgcatgaccttgtagcttttctgggataggatgctcaatggtttactattacctagaattttggatctatggaagtggtgcactggtagtgcctgtgtagagttgaactaatattgcaaaataaatattcatgttgttccctaagaaatttgcttaccactggtctatattttagaaaattagattgagttatgaggtcataaaagagtaaataattggaaacgatactattacacattgctactttttgttatgcagaaaaaataaataaatttgtttagtttaggtggttaataggagttgatgttagccactcctaaaaaaattgatgatcaaatgggtgggaatattgtagtagtttcagttaaggggatggctgcacagttttgtctagacttaggaaatctagatttttttttccctttcttttgtaagttctataagtataatctgttgtaaacaacggtactatataatgcttgtcttgcagtgatactgctgatacctatggccaagctgcttcaaatttggttgctggtagtaatcttgagcaaactgtccaacaattaatggacatgggtggtggaacttgggacagagaaactgttactcgtgcacttcgagcagcatataacaatccagaacgcgcagtcgactatttgtactctgtatgtttaaattcactgaatctgatgacacctgttttatcttgttttaactattgatgttttctcttcagggtattccagaagcagcagaagttgcagttccagcggctcatttccctgcaaatcaggcaactgagactggtggaaccactgctccagtgtctggtgctcctaactcatctccattaaatatgttcccacaggtaagatttctgatatataaggatctttcttgcattcttctcttctgtgtgtatgttcaaattaaactggttttcttcaggaaacacttgctggtgatggtggtggagcacttggaactcttgatttcctaaggaacaatccacaggttggcttcaagtaaaataatttttcattgcttttttgttataattctgttctgccatattatgggcttttcacaactgcatacccccnccaagcaaaagcttttttgcaagtagtcttatgctcctcagtgtcattgttgaggtctggcaactgaatttttttttggtctttttcaaatttcagtttcagctttacgatcaatggtgtcaatctaatccacaaattttacaggtctataatc

SEQ ID NO: 188053 - DNA, 3024 bp, Cannabis indica
agccttacgttacagccactagtcgatgtgggatcctaacaccttccttcactactaaagttggcttcgttgcttgatcatattttctgattatcgagatcaagcagatcaatctaaaactgaaaaagattctatatgaagaagagaatatggaccaaagtttaattttaagctttcatgtcttggtaaattctatggtctttcaaacaagggagttgttttagcaagaaattgacattagaatatttaataagtatgttgagggaagcaatcaaagtaaactagcaaatttgagtaatgatttgatacttaaccatccaagtgagtaatatttggaagttatggattctaattacaaattaacaattaaaaagatgatctttattagttccaacgagtaaatagtatgcaatttcatgtcccaacttaaccaaattgattataacaaaagtctaaccaccaatctaagcattgttacaaaaaggttatattgcagtctgacaacctattccaagatacattattatactcgaatcgtctttgaatctcaaaaacacaacaatcatttccggataagtaatttccaatagtttgggaagattacgaggagagatggtgctcgaacaacgaagccatctcgatagctgtcaaagcagcctcggcgcccttgtttccagatttaccaccagctcggtttaatgcctgatccatgtcgtcacaagtcaaaacaccgaatatgcatggaattccagaatttaggccagctgaaagtactccagatgcggccgagttagcaacagcatcgtaatgggttgtatctcctcttatcacagcaccgatacatatgactgcgttatactttcctgactttcccaatctggtagcagccaccccgatttcgaaactaccaggaacccaaacaacatcaatatcttcttcttgaactgagtagttcttgaatgtgttcaaagctccctcgagcagagcctttgtaacgatctcgttgaatctggcaaccaccactgcaaaacgaaggccctgagttttggtgacagagccaacaagatggcgaacggcggcagtgcgtgtaggatggtggcgattggtgtcctcaattggtgtgggtgcacccatacaagatgacgaaaatgataaaggggaattcggtgattgtctcttcacgaaattgagcggtgaggttcgcattccaagctcaagttgatggtgattgtggcgggaaactgatagttgggagtggacggaacttgctaatgaccatgacactgatttcgccattttatgttcttttggcctttcggtctcctttcacaaagtatcctcttctgtgcacacaattgaaagaagaaaagaatacatttcacatataagcatttccaaaactcagaaaaattaacacagaatcaacatttaatttatataaattaagaaaatgctccaaattttcatagctttaacagttacataaattcagaaaatattcagaatttccaagaaaaaagaaaattctggttgatatataataacaaatatagaaatgaaaaatttgactccaaaatatgcacagtttaagtaaatgaagagcaccattcaaataataagttaatagctaacaaagaaattaaaaaacaattgttaaacttggtgaaatatattatcttcacaaaactaatcaatagtaaatgatgaagtttctcaagtttacaagaaaaagatttcacccatggcttgtaattttgggtgatcaaatggagtgatgttttagtacttgattagtgttgtaagcataagcataactgaattgacactatagattaacattagcctgatactacattttctaattcttaaaactcactagtaatgaattcaagatcaaaattacttacatacaaaactataacagaacccacaaagataatgggaatatataacaattgactaatcagactatataacaatacaaatcatcaggacgatagccatattagataaacacaattgcataaagagaaaaaattactctagaaagataactgatagtgttgggtgaactccgagatcaaatccgctgtgttctttgtctcatattatcactgtttgtattctcttatctatcttatttctgatattgtatttgtgtatgttctttggtttcggttttggtgagtttcctgggttagtttttttggatttgagtgctttaggctgaaagtttttcttagttttgaactgaaaaaggagcaagcttttctgggtataatttttcgggttagaacaggaaaggtaaagaaggaaaacacttggaaccctaaccctattttcgtgtaacagaataagagaattagaaaaatcatagaaccatataaaccctattttgaaggtttcatttctttgttgggtcgattgatctcatcatataaaccctattattaacacatattcattttataaaatttcaaatggcaataataaacacaaaatttctaaaaatcttagactaattatgaaaaacctaactattaacagctaaaataaaatccttgtactctaaaaagaccaagaaagaatgccaatgtacaactctatatctatacaaaaacacagacaaagtttcccatcttctctatttgaatttaggctctttctttttcaacattacatatatatatgtataatacatgtataatcctcattattaggctcaaattcgtagtacctgtgagtgagtgagtgaagtaattgtttatccggacaatgaatgaacggaattcctccgatctccgatcaattaggataccgctgatgatgacttagtgatagagagagagagagagagagactacaattgactttggaacaatgaaatgaaacccaattgggctttgggtctgttatcatattgggctttgggtctgctaacataattgggcttcttctcaagatgtccaccatttctaaggaatttgtcataattacccccaaaaattacactaaatacctctt

SEQ ID NO: 188054 - DNA, 3307 bp, Cannabis indica
aaaaaaaaaaacaaaaagaaaagtccacattttttgtttctttagtttgaattaaacaagtttaggcaagtaaataaattcttaaattaccaaaatgactccgtaactccaaatacagaaacattaaagagagagtgtcataatcaaagtcttaccaaatagtgtgtaccccacttgtaaaacaattttttttttttgataaaattattttattaattcagagccttgtaagttgtaactgagaatttttttccgttactagtattgtatcttctaaaataaaaatatatattaaaagtttttgtctctatctatggattctctggttttctgtgggccccttcaagtcaatggatatggacatgcccctcctgttctgcaaagttgaaattcaggttggggagttttcttttcttctctctctcttttttttttttttaattattattttgtttgaataaagatgtttatcttcttcttattattatttttgaatctttgataacttgcatgaaacatgcgtgagatggtaaaagacttctgctttgtacaactttctttcccattcactcactttactgataaataattaattctagtataatatactttttgtttcttgttttttttcttctatataattaatataatttatatttataatacttgtataaatgggttgactgtgaaaaataaaaattgggtattaaggataattaaacacaaaataaaaacgacgaagtaaaggggttgtgaattagcaaaggagtggtatagtggattggattatgcaatgaaagactgaaaataaatgtaggtctcgatataattatatgccatatatgatatatgaatatcaaagcttgatatgataatgagaggctttaattgagaaaatatactaaaagcgcctataagaatcctaaaatttaattattctttccccctgattgttttatttattttattattcttatttatttttttaaatttctcaaaggcaaaaaagagagaacaagaaaatacccatatccattaatatttggtatttcattgtagatttactatcaccaaattctttcttttgaagccatgatggtatgagctcttcagaaaagaagactgaagagtagtcgctagtgggtctagaataagagggaaaaaaaaaagtcgaaatcatcatgacattatctccatgggatttgcctcttcttgctgatcaaaaccgatactccaattttgagagctttctccaatctgtcactcccattattccttccaagcgcattcccaaggtaataactctttctttctctctctgtttgataagtaaaatgttgatgagaacaataggtaggtagatgagtcatgagtgagtgtgtttttgggttttttttttttctcattagttttcatgactctctctctacccatttcaaagatttttttttcttttggaaaagatttgggaattaagagcagggctggatttgaacttgtagtaagattgaaggtttttttttttttttttttcattccctttttataaaatattaatgttatttaatgacttgaacccgcgaccggctagctcggttcaaacttgggcgagggtatttgaggctcatcatcctcttctaagctctcttactaaaataaaatggggaggttaaatatatttaaggatctatgtgaaataacattactttttagaaggaatagaggtcccatatcattaaaagaaatattttcttggtaaaaattgatattaatactatatgacaatcctataattgagtgaaaacgacaaattacactcgagtacacaattagttgtatgtaacacgtatgtaatacgaccggtttatgaataatgaactaaagcataaacaaattgcatgataaaaaatgttgcaatttgtttaaagaaaaaactaatatatctcattgttattcttattaatattctagtgtatacataattattcataattgtaaatatttttgtatttaagtaacattttacaaaaatcctaaatgtgcttcctcagtcacatgctgaagattttgtggagtgcttctccttaaatagcctttggaaattcttcactgaaagaagtatttatggtgttggtgtcccaattcttttgaacaatggtgacagtgtcctacaatattattgcccatccttatcagctctacaaatatatgtggaaaatccctttgtttcaccaaggtactccaagcgagatacttcttatttctttttcttctctctttattgccaaactttgaattttcatccatgtttatttgtaagtaggattggtggaaatattaactcttggagtgatgagagtgaaaatgatgaactattatcgcagtctttgagtaataactcgagtaagagctccgataacacttcggatggttccaacactgaccatgaagtctcttctcaacaagtcgatcgcttcggggacctgtatttccaattcaacgagacatctagtccttatgacagagtccctctaactgaaaaggtaaaaacactgatgacaataagcaatctaagttgaattatagttttttcaactcaactctagaagattattaaactaataatattacatgttcagatcaatgaattagctcagaactatcctgatttgctgaagtttcaaagcacagatctctctccttatagttggatagccattgcttggtattcctctccctctttctccttaataaatttatcatatttgtttgtaacactttactaatttttgttctttacctctatgaactcaaactctcaaaccaataaaaacagtactgctattcgttttcaagataaatttcatccaattacaaatttagatatacttaaggaaacatatttgaaaggtttttatctatcacttattttattttttttcctcaattttattcatattcatatgctttgttacaaatttgtatgacttgtttttactaggtatccaatctatcagattccattgaccaagaatgtgaaagagttgtctgcatgttttgtcacatatcataatctctcctccttccatggtaagttactcttaactagtattttgtatgaataagaaagagatacaaataaaaacattattgtactaaaacatgattacattcatgtatttttgtttttgtaaaggtgtttcgaataccattccacatgaagaagctaaaacttttgcgtatagaaattgtgtggtggggagtgaaggaagcaacgaaaatctaaatgaagaagaagatgaagaag

SEQ ID NO: 188055 - DNA, 2493 bp, Cannabis indica
gtaaaacacccaacaaattattgggccttcgtcgttggcccagcttgatatagtccagcccatgctttgatgacgctgaggttgcaatggcttctctctctcctttcccagcacatacacatcacttactaaaaccccacaaaacccaaaaccctaatgagctaccagtctccattttacacagaaaaccaccctccgattttcgccgccatttaaaccctagagaatcgctcagccatgtcctccgtcgaggttcgctccgagaagaagaagaagaagcaacgctccaaagatgacgcaccagacacgcccaaaccagttggtgacttggagtcgcagccggctcagaaggacaacgatttcatgatcaaaccacagagctacactcccaccatcgacacttctcagtggcccatccttctcaagaactacgatcgtctcaatgtacgaaccggacactacactcctcttccttccggttactccccgctgaaacgcccccttgccgagtacataaggtacggtattatgaaccttgataaaccctcgaacccatcttcgcacgaggtcgtagcttggattaagcggatcctccgtgtcgagaaaacgggtcacagtggcaccttggatcccaaggtcaccggaaaccttattgtctgtattgaccgagccacaaggcttgtcaagtctcagcagggtgccgggaaagagtatgtttgtattgcgaggttgcattctgcggtccccgatgtcgccaaggtggctcgggcactcgaaaccctttccggggctgtgtttcagaggccacccctgatttctgctgtaaaaaggcaacttaggattagaactatttatgaaagcaagctacttgagttcgacgcagaaaagcatttggttgttttttggatttcttgtgaggctggaacttatgttaggacactttgtgtccatttgggtttgattcttggtgttggagcgcatatgcaggagcttaggagagtgaggtctgggattctgggtgagaaagataacatggtcactatgcatgatgttatggatgctcaatgggcttatgataattatagagatgagagttacttgaggagggtgattatgccacttgaagtgattctgacgagttataagagattggtggtgaaggactctgctgtaaatgccatttgttatggtgctaagttgatgattcctgggttgctgagattcgagaatgatattgaggctggtgaggaagttgtgcttatgacaaccaaaggagaagccattgctttggggattgcagagatgaccactgcagttatggctacttgtgatcatggtgtggtggctaggattaagagggtggtgatggatcgtgatacttatccaagaaagtggggtctgggtccgagagcatccatgaagaagaagttgattgccgatggcaaactagataagcatgggaagcctaatgataatacacctcaagagtgggctaggaatttgattttacctactggcggggattcaatggtggcaggccttgcagctgcaagtgaacccaccattgcggagaagcagacttcagtggtggaggatgtcattggtgaaaagaaggagaagaaaaagaagattaaggataatgaagatgacgggggactcaagcgaaaattgatgcagtggcggacgagtttctgagggcaaagagagtaagaagaagaagaaaaagaaggataaggagaatgggcatgtggatgatggggtcaagtctgagaaggtgaaggatcataaagaagaagctgcctcacctgtaactgaaaagtctgagaaaaagaaaaagaaaaagaacaaagaagctgaggatgctgctgctcaatctcccaaagtcactgtcgatgacaagggtgacagtgaggctgataagagtgagaagaagaaaaagaaaaaaaagaaaagtaaagatgctgaagaagattagataaaaaaagatttgatttttgtttgtattgtctaaactttttttttctttgttatttcttctgtagcgaattttgccttagaagcattactgtttttgaattttgagcactcccctgagcacaacttaattacagtttgcctccttaatggcgtaattagtacttgaactcagggagtacatttcctactatgtggaaaaagagagctcattgtcatggattagctatcttttccatttgcaatgctttcatagtagttaaagtgtttacatttttattttataactgcaacaatttgatggaagagtaaatctcgcactctttcttttggtgatccgcatatttcattgaatttttcacaggaatctccctatacagttcccggaacatttttaaaaagttcaaaagctgataggggttgaaaaatggggattaaaagtttctctgaatctttagcaaaaaaaaaagatgtctcttaatctcccaaagtcacgcgatgacaagggtgacagtgagg

SEQ ID NO: 188056 - DNA, 7319 bp, Cannabis indica
gtgaaaaggatggagttactgaaggagaagctagctggtgtggaacttgcacaagaagaagctaacagcctctccaatatagtccactacggacaatgtaaggctagagcacgacgtagctttctcaaggcagtgttggatgatacccagaaggtaagtcatcttagcattgactactactctacattgattatcttatatacttgtctctgatgaacaaaatgctggtgaatactctttaggaactgcaatcaacaagaggagttcttgctggtgaacgagctagggcttttcaattacaggtatcacgtctagttataatcaagtattgtaactaaaatctgatgctcatttttactataattgtcttgtgtgttaccatgcaggttgaagtatttcatctcaaacaaagattgcaatcaatggagaatcgaacaccaacacctcggaaaccattccatgtttagtatagaggagaccaactagaacattttttttaatgaccacgagccgaagctgatacgaagatcctttagattcccacctgagctcggaatcaagtacgttgtatttccgtagcaagtactgtacataatgtaaccattagatgtcagatgtaacattttttttttgccattttctactttgttattgtttagatgccgttccattaattatcatttgtaaagtaattgttacactaaaatatttatggttaaacagtttgactttttttttttatttcggagtaatttcacaaatgagtagaatcagaaaacagatgggctattttataaataataaccacgtagaaataactgggtaatcaagaatacaataatctcttttttttttctttctcgtaatgagaacgaccactcacctcactttatataataatacaagggcacattgagacatacaaagtgaaaaataaataaaataagagcaccaaaagaatgagttaccaagagcatgagatgtatcaccattgttgggaagatgaacaactctgcaatagtcaggcattgaccaatattctttcctgctttctgtcatctggcacctcaactcaggcagttcatggtttcaagttagacatttgtgagtgcgcatccttgactcagtagatagatatgaaaagacaaattctgttctctaaagaaaactctgaaataacagctcgagagcttgggacatccacggcagttcccatgcttgtgctcagcttgatctgcaaagtgtcatcttctcatttcagcaaatcttgaaatgtaagaggaaagtcctcatataagatctgtctcttcttggtccccatcaacatcctctacatcgttttcctcatcttcttcgggtgcatctggatccaccccctatgaagtgtcacaaatatcaaaattcaaatgttttatcaagttattgatataaaacagcactaattactccctatcatacaaggaaatgtgaaagaaaaataaaactttggagaaaaaccttcatttgtttctctaatctatctaaacccttcttcgcagcttcattctgagagtttatcctgcaatgtgtgaaaatatatttgttagcatccatgatggaaaatcttttcactaactgttagcatccaggatgcctgcaaaaaaaaaaaaataatatatatacacatatatatacatagcatttgatgtgaaaacagatatatggaacaatatattataaatatgcacataattatcaagagagagagtaataagtaataactataagaccaagcctttgtttcgcatgatttagattttgaagggtgcaagtggaatagcagattaatacttgacaaaaagtaacttcggatgtaattttatagagttctctaaccttaatgctgcttgataatgtgacagtgcctcctgcagcatattggttgcagcaaatacttgtgctagttttacatgaagggagtcatcagcccagtctttgagatatcgctcgaggagagatacagcatctccatttcggccttcaataacatgaagctcagccagagctaatgcagctccaaggtaaccaggttcaagcctaagggctgactcatagaacttttttgcctgttacaaattcagcctcaatatgatgtctcgaaacaataataggagataagctctacttatgaactgacgctgagatgattaccttctccctgccacccgagttactagcatgtacatcaccaactaattttagagcctttgcagattgaggcatggccttcatggcctccctcgcagcatacaaagcctctttgattttcgagagagccaaataagaatgcaccaaacctaacacaaatgaatttacaaattacaattgttgtaagtattataaaattctgggtatgtattacttgtaagagaatatgtcgagcttgtatatacacaacccaggttcaagatatgtagatgagtgtgacaaaccttgatacgaacgaatatctggtctcaattcttgagctactctgaaagcaattacagctgtttctgctcgcttcattgttaacagtaggttaccctgataaaatcaatccttgcaagtattaaagaaaaatcttgatttattgggataatcctaacatgaatttctactcaaaggttattaaagtaatgaagaatcaataccttcattatataacctggtatgtgtctctcatctattcgtatgctctgattgcaaagaaagagatacttgtcagatatgtaagaacatctccaatgaagtgccaaataagtagtgcaatgctatattttgatatttttgtaaaaattccttctccaattgtgtgctaacttgtgccaaatttggcacacaattaatacaccttttttatttacattattgtcatttaacattaatgagttactttaatacactttaagtacaaaattgtcattattttttagaaaatatatttagtttcttgattattaatgataattactttttatgtcaatttgtatcttaatttgctattatgcattggagcacacttgcaaaaagtgtgctaaatatagcatttacttatttttttgtgccaaatttagcacattttttaccctacgcattagagaatagagatggtctaatggaagagaaagtcaatttagctaaaccaactaatataccttctcagcataagataaagctcctctctcatcttctttttcccacagcacagataaagctacaaaaacttctggccttgtaggatcagtgaccaacaaatcgtgtaccaatttatttagctttgaaaaatcggactttatctttagaagcattgcatactcatccatataagtcaccagatatggatcaattgatcgagcctgcatagaccaatatatataatttaataatgaggatgggcttgtcttcatcttttacaagggtgatagaaaaatgaagagcactccagcataataaaaacatgtttaccttttcaaaattcaatatggcctcatcatttttcccaatgattgcttcaaccttcaaaacatttgttgttcacacagaagtcattgaagaaatagagcaacaaaggaggcgtattctcattaattttgcatagaaataacacaaatttagatttttctttacacagtcactaactacatcaggcaattctcaacacactctcaataacgaccaattcaaataaggccaatatccacctctcaaaacaaggatttacaaagcacagatagctatctaatgtagaatatgagctacacaatgtaattatttactaacctttgcaatctcaagtaataaatgtatattatttgggaaacgctgtgaaagatctgtaaatagttccagaccacctgcaaacacacatggaaaacaaaatgctgtggttcaaattaagacacttgcattatttttaatttttatatgatgcatttacatagacttgaacccaggcatctcaccagcacaaccacttaaggctaagtggctacacttggatcttggttacctgttagaatttctaactttacttggagtttgaagtgcatatgtcatgtttgaatttctcaacatattagacatttgttgtatataaaacttaacctttggtcattaattaacaacatataacttacccaagcaatttatttacaggctatcacttatacacataaaggatttgtaagttgttacctttgtagtcatttgaagcaacgcaacactgggcctcaacataccgctgcacggaatattgttgtatgaaatgtgtaggaaaattagagagattaataagttatagtctattcaaagctcaaaaggcaagttgttggaagattaaatgtgtcagattagcagacaaaaatgcttatgccctttttacagtagcaacttccaatattctccaactgtgttgtacaaaagaatgctgatagttaaatatatatgtacaactacatatatttatatattaccaagtaccaagttgtagagtacttacttgaagccaacggcttgagtccaaacaatcaaagggagccctagaacttctgtttgcagtctgaattgaacaatacaaagaaaataaatgttgcagtggaagaatcttaggttttcacattctaaaactaataaattaaaaactgctctctgataaataaacaaacctgaggagacagtgaaacaatctctttggcagaaaccccaagctctgctaaagctgtgacggcctcaatgacatatgggcactgcctgtcaaaacggcacagagttgaagcagcaacattgttaaagaactctaaagattagaaaaagaaaactaggtgttgcagtagtattatttatcaacccaatttattcttcctaacaaacaaaataagttaccgatctataaggtaagactataagcttaattattaaaagaatagttacataaaaacaatagcagaggcaaaccttaggcattctttataacacgtaatagcagaacgattatttctggaatatctataaagctttcccattaaaagattcatctgcaagtttcttcctttgctgatttgctccatctgcagagtaataggaatcaaacaaatttaacctattaaggagtaaaagaaaggaaacggctactgacaagttaaatctatcaaattccatttagagtcttgatatttcacaccagattatcaaaactgaaatactccatgcaatacaaaagaaacaagttttcttactttaaaatgtgtgtaccgaaaaacaagtctcacatttctattttctcgtattattcccaacaagaatacatgagtgtgcatacctcggcaagtgcttgtctattctcatttatcgcacaatggcaagatgcaactttgaatttcacctgtcaaataaacaacggaaaagaacacttctttataagataatcttttgcactaacataacataacataacaaataatactattatgctcaaacaaggagaaaatataaaaaaagtatgaaataaacaacctacctcattctcattaatagctgatatgttaaaagaattgggagaagaggacctgttcgacgataacgtacttctagaactggttgaattttgttttgcaatcttgtaatgttgcaatgcttgcttgtacgtgtgctgtcaacaaaggaaaaacattacaatccatccatataactcgaagcataaaccaaattcatgtataagtgacattcaattacagagatccatcttaaagcctactgccttaatcgatgtaaattggactagagtagttattaaagcatactgccttaatcaatgtaaattgaattggagcagttatagcttaacatctataaaacttcatccaaaaactcttcaaaaccttatgacataataatagcatgaatactctctctctatgaaaaaaaaataggtgagagcatgaggtttgctccattcattggggcatttcttgtatttggtatgtagagaaattataaactaatttttttatatgacgatgtaaattatagttataataggcattctatctgttttctaaaaattaagaataatttaaagtgccgaaaataaaagccacttagccttcagttgcacagtgtttgttttattttacgcacataaaacagactattttgaattttatttttgacaccgaaaaagtaatcagaattgggatataacaactatgaaaattagaaatcaccctacagtaggagcaaatcccctatatatataaatataaattgcgctgatattcttacaattgctcggcgatattccctctcacgaaacaatgcatcacctaacagaacctgtgcaaaaaaagtaagaaaataattaaaaacaaaaaacaattgaaaaagggtaaagaatacaatacagaaaaagggggaacgaagttcaagatccttaccaagctttcagctttgaggtgtggattggtatcggcattagcagcaggtgaggaaacaagaaaacaactctattcaaaaagagaagaagaagaagaaggattagcttttataatttgaaaaataaaaagatcgaaaatagtattgaatcaaggttgggaaaaagaaagagaaaataatacgagcatttgagctgagttgtagaggccgaggtccataagggtcgcaatttgatctttgggaacctccataggtgagagatggaggtcaggtatagaaaagccgaggtttgttggggaagaagatgaaagctttgaacctatttttgctgtcactcactaaacacagtgaaaagaaactctttttctcaaactcaaaccccaaccaaccgctctcgtttgaaaaccccttcattcaatatcaattcaacccacttttcttttctaaattatctcttacaccccgcaattattacataatcataaaattatacacacccattttattaatatttattttatataaaaatggcactgatgcaccctttatatgtttcgttttagaaaaaaaatttaatttaattttttttcatattcaggtacattatagttatttaatatatcctacaaaattttataatttacaatataaaaaatagtgttcaaataaatagtcacgcgtacaacacaatatttgaactatattttcagttattttttttttctgaatttcttaaaattttataaaatttcttaaataattataatttacatgactatgacacaaaatttgattaaaaaattaagatacgaaaacaaataaaatgtatcagtgcatacattgaaaaaaaatttctagaatatatatct

SEQ ID NO: 188057 - DNA, 4881 bp, Cannabis indica
ggaatttatggttgttctacgctggatctggttttattgtggttgcatagaagattggatcaatgaaggtttcttcatcgtctctgttcgtgacgtgcgactgaaagtatagggcaggtggtatttttttaattttgttaatgtaggctatataaatgttaattgggccatagtaatattgtaatattttaacgtttttgaaattttaatttttttttccctttaacatttgagaaatgctattagtccgagccatgtggatggaattttttacatacacgttattcatgaatcttcctctcctccattattattacgccacttggcaacttcagtatcaggaaaaaatatgactgtgtggctccgtacagactgctgctgaagtgagaagccaacataagaaaagagatgctgcttaattacattctgaattccccgttaatgtttgtagaactacatcagtatagagaaaaagaagttgaagattagtgttctccgatagaaaatcccaccatttcggcaccacaaaaaatttcactgaataaaaattagtagaagaattgaaaacatgtctatgtcgtttttatcatcacctcaacagagttttctggccaacgctctgctttcatcaactcacaagctgcaaaccaagattcccacttgtgctcactccaccatctcatgcagataccaccaagatgatcacaaggattctctcaggtaatatatttgtgtattgtatagcatttgaaacaaatgatggggtttctttgcttttgtccgatttgtaatatctcttcgtatatattttgtttaaattgttgtccatagtgaaattgatatggagggtgtcatggtttgattcatataggaaaaatgagaaccaattggcgaagttggctatggttgctttgacagctggggttttgactctgggttcagtttctgatgcttcagctgcgaagtctgccggtagagtcggtggtcaagcttttcggtcagctccacggtccgcccctcggtcgcctcctagaatcaacaaaaggtttttttttttattttttcttggtacatagagcttttgagtaataactataatttaggttgtatgaataaaggaattcgttatggtatactatcgatgaaaattttgaaattgtttggacttgttaaagttgttttgaagagattattattattgttttgaatgatgttttgaagacattattgatagtcattccatatctattttaatattaggctaagccatatcctactcacttagaactctccttaatagtaagtgggtgtaggatgcactagttacaaaatggctacactaggttgttggatcatcaaggacttcaatttggtccattagcattttggggtttatttttatgtgtaatggaatatgttttacttttgtagttactattgatacttggtagtttctatctaaacaagacatatcaagaacggaaactttgttcttgttacagtgcatccaaaatatacacccaaacatttcacttttcagccatttatctaaaatatccactattttaagaatcctagtcatgatttgggtgcacacatcattagtctatttcataactggattttagtagaagtctgttatgggatttactgatatggctttattgttctcacaactcaataaagtttcaactcccaacattttttgataaccatttatttgtttattttctaataaccggttacactatgattgataagcagcatgtcatttctagaagttcgttgctttgataatctgcttatgtatgattttacaaacaacatatatatgcatgttaatccgagatgcttgtttcgcaggacaaacatatacataaatcctcccgtagccccaccattagttggtggatacggctatggttatggtgtgcccttctttggaggttggggatggtctccattttctttctttgctccaggtcctagtgtggccgttggcattgggggtggttttgatacgttagttctgttcatgttgcttggcgcggttgcagctgttgttcggagattcgctagatcaagagacgaagatgaggattactaattaacttaaaaaccttttgataccagtgtaaaacaacgtaaatagttagtcaactcaaaggctgcaaaacatgtgaactagccctcttttgtattctatgaatattttgccacaattttatgatgtattgtaattatattatttacgatcttccatctttgctctttcttttccattgctaaacttgctacttgagattgagagcagcaatagtttttgccttaaaattttaatcttgacactgctcagggcttatggacagcttgcacgtaattaagtcccaataccagagaaagctgttgccaatcaatcaaggctggcttttaatttttttcctttgatatttgaagtgggaaattcgaacttggacctgctctttgtgagcaacaatcaagtcttacttgttagggtagtaaatatgactaacatgaattcttcttcttgattcaacaaaccatgacagcctttgtaaaaaaggaatgtcaacaataaaaaaaagcagaaagtgaagatgagaatgtgctggattaaaacttggaaaagccaataacttctcagcctctccatttcacctcacaaaattctcaactcttattaattacatcaagaagtaccgacaattatcatcttatcgctcatcttggagaaagagagatatttagtgggtgagacaaagtaatacacatggttattatcattttcatcgctattctcattcccaaaacttactctcccagataggtagagcggaaacagatattaagggccataacaaattgaatacatgtttaattacacttttttcttcataagaaatcggacctctaaatggtttcctatgcttgtggtagataaagtaagtgatttggtatatcattccgtaagctggacagcagcaatggccggaattttttcccttaatttttgagttagagcaacccgaactgtcataaccccagctgcagggccacttaaccgaactttgactacatagtcatcaatttgtacaagttcaagtatccctcctcctgtccctgcaagataaggtctaatctctgcaagaacctgaagaaaaaattatggcaaaaaatagccatatgttagtataatacaaagagggctaaacatgctatcaacgtttgtacactcaagtcaaatagacacgtataaaaaaaattgctttaaaagaaatgtttaaatgaccatatgaacataaccatgtatttgatagacagtgactaactagtgtagctactaactttctgagactgatttctacaaatttaatccagtgaaagcttaattggcatttataatgagatagccaatcatttcatagcaggagacacatttgtttatggacgttgactcaattccaacaattaataattcaatggtgagttggctcaccttctctacattgtcctcatttagctcaagaccagtctcagtgtccagaatctgttccactgccattatttctggaatcttatctcgaaggcgagtttcaattcccatcttcaacgtcatagttgaactcggacatgagccacaggctccttgtaacttgagtatcacaacaaggccatcaatttcgtgcaaggccacattacccccatcagccatcaaccctggacgaacctcatccaaaaccttttccacattttcttctgtcaatggaaggacacaccttggtgatactacaaatccttcattattcaaaacaaaacgttaacgaaaaaggttctgattataattttctttactttgtgatttgagtgtcaagttcaaatgtctattaaaagaagaatgagaatctatgaaccatgttaatgctttaatatgaactaagatcactgagataaagtctcaacatagtcatgaatcatgataatagcactgtggatgatgctacaacaaaagaaactgtaagggtcatgaatcatgataaagtctcaacattttgttgtatttttattattctccacatactaaaattaacctaaatgtaacactcccaaagaggaagataggagacgacaaatacttgaaccaccgttgaggtttttttctacaggaaaagcagctggaatggtcgccagttgccttgaactggggagaaatgctaaaagacatgtgaagatatctccttccacatattttaatttaatagcgattatacaatactagtaatcatcacactattattgatacaaatcggttctacatattttatttttaatttaaaaactgttaacacaatattgttaaccattggcatgagactaccaatatcactattatttctagagttaaaaagaaaacagagcgtaacattatgaaatgcaaatttaattatctgagtgaaaagttaaaagttcacagtagtaagttagttcacaggcaatacctgtttgctttcttcttggagaatgaatcccaatgagctgtctagtaaaaaattgacctctgagaaaacaagtattttttgaagaaaatccactggaatccgaaatggggttctgcccaaataataaaaacatgaaaaatgcggaaatcaaactctttaacacgtatcaatacatcttatttctgctattctacgacaagtaaaatgaactgtaaggcataccttgaataaagataaaagagaagatgagaaggctgttttagaggaagaaagagatgggttatacaaagcgacagtcgttggcactggttttgagactacacccaccattgaattgttacagtggggaaacccacctccacca

SEQ ID NO: 188058 - DNA, 4628 bp, Cannabis indica
ttaattagctatatgtcatagattatatacgaccattgttacaaggcagttgaggtattgaaaatggttacagtaatattttttaatagttattatataaaattacgtgatatttaattaaattaataattaatatgataaaaataatcatactttcactttgtagcatttttcattatttactatatagctaggtatagcagcaacttaattaaacacattattaattattaattagtagtctagctagtttcctcccacatgtacatacatacatttataccaagctaatattaattctgttcaatcatttagcgacagagaggttttaaatattaatttctaggaattaatagtatataaactattgaatcatattgagttagttgtcagatataagagtttcacagtaaggggaacatctattgttataaaataaattctttcattttcatcaaattttatctttgtgcaaaataattatttaattaataaactatgttagttaaatatatgtagctctctaatatctatagctatgcataatcaaatgaactaaaaaattatattgatttgtatatcttccgatttatatatagagccagtaacatcatataacatatgtgtccaatatataaaagttgaaaattttgtttaattttataacaattgctggttagatggcagacaaaaataattagccgattatgcctttaacaaattaattaacccttgtcgatatctccatggctcaatagtatatatcactagatatctctggctatcaatgaagggccatccctctttaatttgttaaattttgtttaagttatttataatatatttttgttcttcttattaatttattaatatatatgtactatcaatacaaacagctctgatataaattaattccaattaatctagcctagtttattatgtaaatatataataaactatcatcaatgattgaatagtgagtgggtattatctatatatataattaataaactatcagtttcgaccataacaaagaaaagctagttaaccaattaatgaaacgtccatatctacacctctagatcacgatgaaattaattaattagctagctagctagtatattgttagttcgtcaattcaattattaattagagtaaatatattgatgcaaacaaaaaaataattaatatttgattaggccataatatacaaaatatcaaaagtactacagtacgttcaaacaaaatatatatttatatatatatatatatttgctgcggtgaccgatagaaacatatgcagcaaatgactcattaattgccttcttatattcatatatatatataaatatatatatatatatattagatagcccaagaatctagctccttgtgtattaatatatatatacataattcttttgttcactcaattctcaaaatatatagtgcaattcatgcaatttggtttttaattatataaattattatctagtatttaattaatgtcacgcaagctctatatcttccatctttgaaaaagggccggctcaaacgtgacagcaacgtaggtatttttctaagccctctccttcaatgaaaggtctcacgttcatatcatatataaataaatatatatataatatatataaacgcaacccccagcacattatattaatatatatatatatggccagatattctcaaaattcaaggtttgtgatctataatatatattatatacaaacgctaattaaaaataataactcatacatagttcaaaaaagtttctaaaaattaataattatgaaatcatttaatttcatcatggtgttctaccgattcaaacattttatcttaaacaaatctttgtgtttttttattttcggaatatattcatattattaattaattttgccatgcaccattatgacatcctatatacatgtgcaaacatatcatataaattcctactctagttaaagtatatatatataataataataaattgttttttttttcgtagatcaacatatacattaacgatattcataggattccttcaaatgttattgcaacttaagaacttgggccaattacaaaatctgcatacagcatcatcatattctacttctaccttacaaagaaatcgttctgtgcgacacataaagtaaaaattttataggtaagggtaagtactttttctttactggttcttttttttattactttaaaataaattataattcaatatttttttatataataatgtacaatagttatagttatagtaggtcaacaatattgttttgggataatttagtatctaaagtagcgtttaaatatttaattacactagtaattaactaattattgatttttattacacatgtgtaatgaactactttaaattctgttaattttttttttcaatatcataaattattcttaattttttaaaatagaattcatatcataatataatatagatcatcatataaaaatataaataaattataaattctttaaatacccaaacaaaaacattcctactatttacacccccatacaataattactccatgtttatatacatattaggctaatattatgtgaaatgtgtatatttaattatattttggttatgtatatatttttttagttgtataataaattttttttttaatgatttactcaataacaacttcattttttattaaaaattatttaatttgagtactatttataaaaaaaaaatataataatattaaaaatttgttgttaattattagttttagtttatctgtaatacttttaattattttagaaatattatatatatttttttattttaaaataataatagaaagatatatttttagtatctgcaatagacaacgacgtacgtataatagaaatataattttttagatatataaattaggtaaaaataagaatgataatagaaagatatttaaatttgaattgtaatattaaaaaaatactttacattataaatttaaataagagggatatgtgtaataaatttaaatttaaattatcatatttaaatgttactcaaaaaaaaattattatatttaaaaaaaaaataacacttataaatctttctaaaaacatgatcatagcgaagaaaacaatgtcattgtatagccactgtcatgacatataaaaccaaaaaataataacaaaataccttcccccttatttctagacactatgaattccaaccaattaaacacacagaagccctccaaaacaatatacaaataattcattttttttaaaaaaataataatatataattaaaattatcgtttattcacgtgatgaccttgcgaaaccacttttgtttttcttttctgtgtgtctcactatcattatccctacgtataatcctagtcacataataaatttatcgtttttttttcaatttaaaatttgttctcactaccatattataataataataaattattctaaagggctatatatgttctccctatcacatgcatataaaaactaagcacaaaatctcgtctatatatagcttagcatggacagtcacacactgaatcaaataaacaagagaaaaaaaaaaatagggtagagccggccgggaacagtgtaagtcgaaaatggccgcgtggtacggtgacgaagaggttagccaaaagcccgtgatgatctggcaaaagaaatgggcccacatgtcggtctccatatagccctttgacgtgtagtgggcccaatatgtcccctcaacagctgtcaaactttgaaacaaaaatattatatgtcgggctagaccaacgtacagaggactcggcccactacgctcaaattacactataaaaccctccaaccctcctcccaaaatctcacaacaacaacaacaccaccactactactctctctttctctcttcaaaaagagatttcctattctgagcctttgattttctctctttataacatttttcttagttcagtactccctataccatttgcccatcatataagatctaatcctatcatcatggccgttgattcagtaacaccttctcctttgggaccacctgcatgtgagaaagacgctaagccgcttcagttcatagaggacatgactcgaaacattgaccccgttcaggaaaagactctcagcgagatactgagtcgtaactcggaaactgagtacctgaaacgatttcagctcaacggagctaccgaccgtgactccttcaagtcaaaggtccctgttgtcacctacgaggatattcagcctgacattcaacgcatcgctaatggagatcgcactcctatattttcatctcatcccgtttctgagtttctcactaggcataattttataccgaaattttattcattgtactttttgtttagggtaaattataacttgttttattgtttactggaatcatatatatgcagttctggtacttctgctggcgaaagaaaattgatgccaacaattcatgaagaattggatcgtcgccagcttttgtacagtcttctcatgcccgttatgaacctgtaagagtctatgtcataatgaagttaattattagttgagtaattgacttaatgaat

SEQ ID NO: 188059 - DNA, 1278 bp, Cannabis indica
tgtaataaaaaaaataaaataaaaaattacacaaacattatttttaaaaaaaaatgttataaaatgtatttattaataatatacaaaaaatatgatataaatatagtaatatgaaaaataaaaatgtaattttttattcattaattcatatgaaatccttgtaagaataaatgaattaaaataacaaaataattactaaagtcgactaagggttgattaattataggcccatattatcaacagctgaaaaaaccagaaatggtaagagctattactaaggacaaattaggaaaagaaaatcaatataaaattaattaattaatgttttgtacctctattaattaatttgctcaaaattaataaactttcccaaatttcaatcaatattatatttgctcaccaattcgatatattatcataaaaacaaaatagctatatatatcatgagattcaaatcctttttcctttacctttggtactatatagaagaacataataggaatgttaatttagaaaatctatatcccatgatatctaaaatttatttaattacaatttgaatattgatggaaataaaatattatacaaattgaaatctaaaacctacataggcattgggttatttttcttctcttgtttttctctttagaaattcgaaaatagaaaaatgagcgcttctttaaggttaataaagtgtgttatagttggcgatgaagccgtgggaaagactagtattcttatgtcgttcaccaccaatacttttcacacggttcgttaatttcaattatgattttaattttttttaagaaaaatttgattttttttaatatattatttgaaattgaattgtaataggttttctttgtttggtcttctttctaacaatgattgatttttcttttctttttacttttaagaatttttttaatttggagcttgattttgaaaaattgagatttatttgttgtaaatttaaattatgttgttgtataactgaaattatatttattttatattggaaaaacaggattgtgtgtcaactatttttgacattttcagtgtaactgtggttgggaatggaaatagtataaatttatcattgtgggatacagcaggtaagtattgaatggctaaaatttacagtataaattttcttctttgagttctaaaaattttttaatgtctatggtaaaacaggagatgagggatatggacaagttaaaagcccttgagttatgtgtgctgatgtgtttatactacattctctctcattagcaa

SEQ ID NO: 188060 - DNA, 2530 bp, Cannabis indica
aaaattagagagagtttctttattgagtgaagagcttgagtccaacaagtttttagcattttattgtgttattctgtattgtttcttgtagaattattcaggttgaacactttggatatcgttcatcaagcttcgggagaagtcttgttcatgaggaaaagtacaagttagacactcttcagaaggaaaattgcaagtgattcactcttccaaaggaagagtgcatgcgtttcgatttgaagggagtttaagatggtagtacttcagaaatttgactggaatagtagattacaacagttgcgtcaaattgaaagaaggagtctttatttgtataagctaattcagttttataattactttgacattcttctaataaattttattctctaggcgtggctttgtggactagctagtagcaattcgaaaagattattgataccacgtataaaatgttgtgtcattttaatttctgcatttttactttttgaagtatatttttgttctgtcaagattgtgtctgatattatacctttggaaagtggtccatttaaaattttggaaggaaagtttattcttttagagaattaattattagactaaatgaaacctagaaaaatttgtattgaccattaaaggaagtttgaagtctagacatgtggtttagtttttaatagtttatgaaaattttatttttataatgtgatgtgtttaaaatataataaaagtagattataaatttgtgaaatacggttggcaatttatatatatgtttagagtcattataaagtgtcatatcatcattttatatttaattttatatatataaattaattcttgactatatgtgaaggacttcttaacatctcaaatatttaagtcgtataaataccatgtaatcactgccatggctttttcttgttacgtggaactaaactttcccacatgatctgccaaacaaacataacatattaaatgagcatgtgcatatggatttccatcttcccaccctttactatcaacatatattaaactccccatccttcatccatggacaaaaataaaggaagaggaaccaatactcctcctgatgaatccgccgtggtgaaggctgccgcctgggcatggtaccaccacggctcgggatcagaaggcggaaactcggcccgcgaatacgacgtcgcgatgatggcacgccacgttcctcggccctctcgatacaagcaagaagccacaaagttaagggcaaatgttgatcatgatgtttcatcaaaaccaacggtagagtgcttatcactctttgactcgtacgagctcagaagaatttcaatgcagttggattctcttatggattgctctaatgatgaggaatcattctcggataatgatagtgttattagcagcaatactaggaataaaaagaagatgaatttgaagaaactgataagaggattttgggtaaggcatgctgtggcggtgtgtagcactggagaagatcaagtggtggacttgaataagaggccggggtatcgacaccgtccatcgcgaccggtgacccgtatgcatgcatcctccaacaaatcgcccctagaattatgatatccatggatactattatttgatttgaacatagctacatattttgtctaataatttcattgatagtagatctacatatctacacttttgtgtgcttaattgtaagaaaaatttatataatttaatttttacatcagttagtaatattctctaaaaattatttttttaaattagatgagaatatttagttacactaataattttatcacactctgaagaagatgctagacactaataataccattaccaattctataatacaaattacatattagaaactttattattattttattaatacaacagtaagacaaacttgtgacatcaatagcacttgaggtgcttgtgtcattattacgatcaagcgatgaaataacatttcatccttatttcttacttttcaagtacatgaagaactacaagctccttactcttgcagcctgcctgatctgtattggccatctaataaataaatatctataaacaacatttctatatatattttttatatatactagttaggacactcgtgctagcaccgtgagatatatttattttttaaaaaaaaacttaattattttgaaggaaaatataatattaatattattattaaaatatttttttaaaccaaaaataaaaaaaaaaataaaaaacaataaaataaaaagaatcaacattacaaaataataattttttagatattgaagtttaaactatatgtataaattatacaagaaaaatgtataaattagttcatttaattaatttatttattttttttgtaaaaaaccacatatagttaaagagctttcaaataaatattgaactccaccaacatttcacctagcaaaaataatttaactttatatgttaaagtttaaactatatgtatatattgttgtaagaaaaaggcataaaccactttatataacta

SEQ ID NO: 188061 - DNA, 3132 bp, Cannabis indica
cacttgttctttgaaaggaatttctttacaacggcccaagtaaaatattaagcaacacgttatcccgttataacacaacaccacccatgcacaatctacaataatgaataatttggtctagatattcataataacaaaacatatataataataaatattggtgaagaaaatacgtgtattatatacagagaaataatttagacaaatagtaatggaaaccccttttaaaaaatggaaatatatataatatcgacataaacttaatgacgttcattgaaataccaaccacacgtacaattattctataactattaggcattattaaaatatggataaatttgaactattataattgtaccatatatttgacaatcctcattacaactactccttaattacctaattagtcctcactatatgaaataattatactttatcatttttatatatatcatataatataatagatacaggttgagaaatattaaataacaaaacctacaaacagaggcagtggcacacagtacggagtaagtagtagtagcagtagtccgctaattgcacgactgaaaaaacaaaaaacgtacaaacaatcacataaagtagcaataataataataagggtggcgaaacggtgcgttttggttgtgaataataatagggccatacctaactgccacgagtctcgtccaatcgattgatcatgtaaagcgcgttactggtgactctagcaacgttagtgatcttcctcttcacctcgctcttcatcttcattcccagctcttcaaacccttcaagacacgtgtcctcgttcgtcaaagccgcgctaacccacgtctgcgcgttgctcatctgccaccggaaagtctcccaccgcaggtgctgaagttccgacagagtcttgctcagctcctccaccgagtccgagatctgctccacgcaatctcccagcgccgatctctgccgtttcgatccgaacgatcccttcgccgttcggcttagaaacttcgagactcggcttgcgcgagccaagctcacgttgacggcggcttgagctagatcccgaggcgttctggcgggacccgcgtaggtcgagagtgtacggaggcagagattcgggtagttggcgtgaacgcaggatgtacggacgagatccgatgccggagtttgggggtcgtgttggtggtggttatgtttcttgccggtgacggagtacggcggtgatgagagaagaaggagggcgaatagaatgaatgggaggagagacattgtgagtagcgttgggagtgtaataatatgtcactgagtgagagtgtttggtctcttcatttgagttttccttttataaataaattaaataaaattaaaatggagaggtgtggcacaagttgagcggtgggttgttttatagtttttttttttaattatattttttgatactgtttgatggtcttgggtggtgatttacaatattgcccctacagagatatgttgctattaatggcatttaacaactgtgtctccttacattttaatcagtacagtagaagatattattaataatgtcattttatgatgtatacatataatattagagcacatttatgtaatctatggttgatagaaagaaataaaaaacttaatttctattttatcatggtcgataacacgtatttagcaaaagtatgagttacaacatgttaaggatattggttagtttacagttagttaatcctgttaactaactaaggtgttagttgagtgtgtttgtagagtctgttagagggttgttatgtcattttgtattttcaataatacacttttcatctctaaaagatattaaatcctcacacaacattaataggtgtagagaaatataaaactagctaataccattaaaattattataattaactatgtcttgtaaaacaagagccaaagacaaatccagaaaatacttgattaatcttcaaaacaattttcagacacataattttatcaaatttctgatagccattgcttcagccactatttgtggattatatacaaattaaatatttatgtatatttttctttttagtaatacgattattatctatatatatattaataatttatactaaatgttgttcagaaaagattattataaattaaagttaatctaattcatatttttgtttatataactttttttttttttgttatctctataatctataactataataaagtaccaaaaattttagtcctctaattattaatttatcaaaaagtcctttaattattttgagggagttaatatctttctctcactatatatatattattaaaaaatcctctcaatataatttatttctaaaaatatacataaaacaaatttattatgtgattgcttttccacaataataatattgataaataactatttacttaaataaggagatataatattatattctcattctctttaatttatagttaaaactaaaaataaacttaccaaatataaataagtatatacaacacaaaaattatgagatattaaatataaataatcaaagataataataaagcaacactataattaatttaggaaaattttatagtccactccctaaaattgagtatattgatgcacttctttcatatgttcgttattttcaatgtttagatagttttaatctttctttttagaggataatgtacattgtaattttttttgaacatcctaaattttttcgataaatttagaattatttaatacattgaaaacaaagtttacataatttgttacgcctgtcttttttattttatatgcatgtgacattgaacatttgaaattttaaaccatactttctgtgttataaattattctaaattttttaaaaacataaaagtatatcttaaataactatatatacatctagggccggcccaagcattgggcagcttgggccactgcacaaggccccaaaattaaaaaggcccacttttttatatccctttatatatactatatataatataaatataataaatataataaaagttaccacataccactaacggacggaagaaaaaaaaaaacgaaaaaagtcaaatacagtacactatacagtacactacacacac

SEQ ID NO: 188062 - DNA, 3001 bp, Cannabis indica
agaaattttgaggttgaagtgtttatatgcatgcgtagtgtttctgttcagcatattgttctgacaactgattctcatttgattttcttgtttggaaggatgcaggtgcttttacaggttaatgttggtgttgaatttttgaaaaatcctgtccttgaaattcttcaatttgagaaatataatgacaaagatttgatttctgagaaccagacgaatgcagcatctgtggaccaggacccatgtggagacctgttaaaatggttacttcctttagataacactcttccaccaccagctcgtccactttctcctcccataagttccaatacaggatttggaagtacagctcaaaaatccaatctcacttcttcgtccggttcacaacttttctcttttggcaactttagaagctactccatgtcatccctgccccaaaatagtaccccacctcctgcatctgtcaaatcttctggttctaaaccaagctttaatcctgaagattgggatcagtattcatctcaaaagcttcggaagagtcaaaagactgatgctgaagagcttttatctttccgtggtgtgtcattggagcgagaaagattttctgttcgctgtggactggaaggcatctatatgccaggaagaagatggaccaggaaactagaaattatacaacctgtagaaattcattcttttgctgctgactgcaatactgatgacttgctctgtgtccagataaaggtgcgaacatgttttgaactgagtcacattgtttcataagcagatgtatacatgttctgaaatgcagcagctaccatatctctttgtttgtttgatgtgactgtcagtctaagccttcaaatttcaatcaagtttttgcgttgttatgcagaatgttactccagcacatgcaccagatattgtggtttatatagatgctattacaattgtttttgaagaggcttcaaaaggtggacaaccactatcacttccaattacgtgtattgaagcaggaactgatcacagcttgccaaatctagccctcaggtatcaggttgttgttaactgtaggtattctattactttttaattcgcaccaccctgcaatctgctgaggcaaatagtagagaagactctcaacactttctccagtgtgatgaacactgagagttatcagtttgctagagtggtgttgattttgaagcttcttttgtgagaactacctcaattaggtgtctgatatgctcagagtacctgtgagtaaattacagcaaccaaaatatttcagtagagtagaaaaatgggagaaaaccagagaaattgagctattattgaagaaaaggaaaagacaagttccacaggtgttttagagacctggggctctcctagatgcagtgaatttcactcaattcatgcttagctcattctctcacacaaaggcctctaaaaccactcacatagccaaatcagcagttacaaaattaccctctccccacgctggcttcactgaccaactacccttgggcatttggcctcttacctctcctagcataaatgaagcgtacctcaagccttacagtgtctccattcttctttcctcttgttaaaagcaaggatggattacggattgttttggaagaaaatgtaacctatcgatgtgctttcagtagatgattagttttttgttcggattaatagtataagaaacactatgaagaagttgattggacaactggataagaattgcttagtgattatatcatttgttaattcatatatattttcttcgatttcgaagtgattttctatcattattcagacaaagagttcatttggtttcctgaaatcactatgttcatctattggaaatattgtacaggaggggtgaagagcattcttttatcctcaaacccgcgacatctttgtggagaagcattaaggcaaatggtgaaaaaagtactcaatcatcacagttacctactggaattacatcaagtttacatctttctcagactgttgaaggaaagagaaaggtttttactgcagatcaatatgctattatggtctcatgtcggtgcaactattctggtaatgtaaaccaattagctcactttacaaatgaaaattattattcactgtctcttggcttattgtttttgtgcttgctctagaatcaagaatgtttttcaagcagcccacaagttggcgaccacgtatctccagggatcttatgatcactgttgcatctgaaatgtctggtcaacaccggcctaacggaggatcttatcagcttcctgttcaagttaaaatatgttttacattgtatatgttggtgtttgcattttccccctaagcttgtgtaattcatctcatgtataattggtacaatttttcaggtgttaacgcttcaggcttcaaacttgacatcagaagatctaactttgacagttcttgccccagcttcatttacttcaccaccctcagtggtctcattgaattcttcacccacttcacctagaagtccctttatcagttttcctgagaatacaagttcaaatggggataaacgtttctctacagtgcagaggttgagctcagcacccgcttcatctggaaatcagaaactggatgatcatagtggagctcgatctgcttcattcaatgagttggcttctcccagatccgacatcattcctagtagcagtgtaggttgtacacacctgtggttacaaagtagagtaccgttggggtaatttactaatactttactctcatttcttgtatgtaattattgtctgttaaataatttttccatggttccttcagatgcgtaccctctcattctactgcaaccatcaagcttgagcttcttccgctgaccgatggcatcaatactctggacaccttacagattgatgtcaaggaaaaaggtaatctctttctgcttatgtcttgctctgctttttttacagccccaccattgaaacaccaactccattattgc

SEQ ID NO: 188063 - DNA, 6217 bp, Cannabis indica
ttaagtactttaactattagagaatgtgtttaaaaaaaataaagtgatcattcaatacactagcactgaattaatgattgacaatcttatgaaaaaggcttaccaccgcataaattcaaggatcatatagagaatatgggacttgcttcccttatataatttttacaaataaagttattattactgaaactcttattttgatattttctcatatattttatgctcatcttagctttaaatttgagaaaattttagaggactagaataaacatatataaggtttggggtttgttcgcttaagtacattgtcacataaagtatattgttatataatgaatatattgtaacacatagaagataatactcgatatataatgaggacctatcattataattcatatatttattatgtaatgagaaatattgtatttaattggtaaatctaaatgttaagtaagtggaaaaatattagaatatttttatatttgtaaaaaaattattcaaattaattttctaggtataaagataatgttaaacatctctctaactttatttgattacaaataaatatgtgaagtatgaatattttaaatatggtcagtttttgatttactgaataattcattttctgttttgattttttaaattaattgtcaaaatattctaacaatttatgtggcacagatattgatgaagtatctcacctataaatatagagtctcgatcctcgagttcctcactcattctgtgtaaatagtaaaattccatctaaaagagtagaaagagcttgtaagccagattacccattccgaacaaacactgggattggcgctcaaaatatcaatggctggtggtattacgatctcttttatcgtttgcatataccctcgatatctttatttttccacattgcaaatcgatcttatatacttttatctttcatagaataatttctttcaattgaatctaatgatcaataataaaaaagaaatttaagtctttatgtttaatttaaattaattaaataaaaaaattatcaaaatatatcaaaatatatctctttcacactatattaaaaatatttaacatacactcatttttttatcattagttatatatattgaaccgatatatgcatgtgcaccaagacatataaaatgtgatatttatatttacacaaacaagtggaaggactatataggaggatgtttcacatgcatgaatatatttaatccatttggtgattctttaattagcaaaatccaaatttattaaggtatatgtttgatctttaattaaacagttattgttattaatttaggagttgcaatttttattttttttgtgttccttgttgtagctttccattgtgttgactaatagtatccatccaatatatcttgatttaatctctattgtcttattaatcatgtatttctattgaatacaaagaatgtcttatgaagaatattatgctcacatgaataaaatccaattttattggttcagattttttctctaatattaagaatataatattaaaatattaatacactccactattcaaagtgaggtttaaatagcattttatggatatttacttaatgtgtttaaatttgaattgaaatttaaaacaaaagattgaacatattaaatgttgaggtttatcacttaataattaccattaacttttctatatttaattactaatgccttttaattttctcatgcaggattaaatctaaattgtttttcaattttttatgctagtacatccaattttatcattctcttatttatttttctttccttggatcatgtgccaatagcaatattattggttaaagatatgcttcaaagacaattgttggtagctcatttttggacatttataactatgcaacacttgatcaacacccccattaaaatactatccaataggcaatgccacgatgaaaaacccttatttaataagaaaaacattttaaaaaaatgtaaaccaatacttgtttaataactttaaggcaaattaactaagttcccttctgagatttgttcatgcatattttatttgtgtgagagagagaggagtactgacgtatgcttattaattagatgtgtcattatgctataattaatttaattaattaagggtgttaattataagagaaaatgaacaagtctgagaagattgtttccctgaagcaaacaatttggtcaaagggggtgtatataaacatggccatgtgattgccaaccaattatttcattgttagaatacagaaaaataatgtgtaataataatactattaaatcttacccattgcagatgggtattttagataaggccaaaactcaattaatttagcattcatgtactaaccaccacctgttcaacaggctgaatcaccctgttgattctttgttcatgtgaattaatcgaacatatattttcattgacattgtttatatataatatatgtgctaataattgataaaagaaacactttactacaacatcaacaaatatatctatgtatatatatgtctttattgattaatttatgttataattataaagatatgcatgtatggctggattcgttggtgtatggtttattggcctctacttacacctactaatagaaaagaaatggctgattatttagaaaaggacaataatatattaaaggttgtaagagagttattaatacttagagctcaaaatttcaagactaaattcaatgttcaaatgttgccaaatgcatttaacgttttggttttactatttattcttcttcagaagatattaaaccatattgattcaaaattcattggatttgttgtttttcctaactttataggtggactcatatataaataggggtgaccatttttaagtaccaaaatcaagagcttacctaagtaacactaaatgcacttaaaactctctgaaattgtcctttaaaaatttcttctaccaagtcacacaaaaatctctacttacattctctttgctggtcacaagtttgcagagaatataccccatggaattggatatgtaaagataaatagaagggtgcgggtgccttctaatagggtcttagaatagaataattatcttaggtaagctttatactgtgattttttctattaatccatttactactagcttggtggaagtagtagtgtgcacgtgccaaagaaaataaagaaacatttcctcatatcacttggtggaatggaccccacacagtcttcaaattgggaccccaactgggcagcttcccccacccttagaaattgagtattttacaaggattctccagcttcttgtcccaactccacatggtttctgatcctatcccatcatgccccatatcaacctatgtatgagctgtttaccaaaacacccttgatgaaaatggattagaacaaggtgagatacatgagaaggaaatgagaatctaagattgttgccaagcaaaggtaaggaataacaatatctttaccatttaatcttgaaagagattgctggcaactgtcttatctggcgagcttcctctttgtttctttctttctttcgtcactacctaaactagccttgcctaatcgacctgacaaagacaaaaccattttctctttgtgaaagatcttccaatatatgacttgtttctttcttagtcttcctctttagcgtttgtggtcacacaattatgcttgcttagaaggaacttggtttgacaaagatggggaaaacaagcaaatggctaagaagtatcttgacagggaagaaggacaaggatgttaaggagaaggagtattctccccttgccactgacagtcccaaaactccaatatcaataccacaaccaacaccaaaggagaaaagaagatggagttttcgaagatcatctgccaccgccgctgcagccactccaaaggagataaattctacagagcagttctccatgactccaccaagtgttctacaggctgcaattgaagccgagaatgagcagaaaaagcatgccatggctgttgcagtagccacggctgcagctgctgatgcagcagtggctgcagcacaggctgcggctgctgtgattcagttaactgcggtagccaatgaaggagggaatgacattgcagttgaagaggccgcagccataaaaattcaatcttatttccgctcttatctggtatgagaatagaaattcatgtcttttaaaggtagaatgtgaatacatgatgttagagattgataggaactattttattggtggcatcacaggcaagaaaagcattgtgtgcattgaaaggattggtgaagttgcaggcattggtgagaggtcatcttgtaaggaaacaagctaaggctactctccggtgtatgcaagccttggtaacagcccaagcacgagctcgagctcagaggatccgaatgaatgatgatacaaaatctattactaatcatagaccttctactgcacacagaaaatcagtacaggacaattggctcaggactaatccatataatgtaagagtaatcaatctctttctcaatcttcaaagaacttttatttaataatttttgtaacagatagaaataaacccttttcatatttccttaaaataatgatgaatttttcattgcgggattctttcaaacaggacacagacataggcatggaagaaaacatcaagatagtagagatggatctcggcggatcaaagggatcaacaaagagcagaagcagctattcaattcaatcacaaacagaaaataagcaattttcatctaataatcgacaaagctcaagacaagaaaattaccaccaccaccaccagcaggtgtcaccagcaccatcagcacttacagacatgagtccaagagcttgcagtggacatttcgaagactacacatttggcacagctcaaagtagtcctcattactactgtgcaatttccaaacctgacccatcaaagctaccatttgcctttccaaggccagactatgaagaagaagaagacgaagaatcactctcttatcatcatgactacccattgtatccaaattacatgtcaaacacaaaatcttcaattgccaaggtcaggtcacagagtgcaccaaagcaaaggccagagacactggaaaggccacccagcagccggcgcaggacatctatagaaggaaggaatgtgccaagagctgtgaggatgcaaaggtcatcttcacatgttggtgcagcctctcaaaactaccaatatccatggtcaatcaagcttgacaggtcctttgtttctcttaaggacagtgagtgtggctcaactagtacactgctcactaacacaacaaattactactgcaaatctgttgtggcctatgatgtgagtattgttactattaccacttaaaatttatgtgattatagatattagagtctcatcatattcaatggttatttttatttatttatttatttatttaccttttttgtgtggctgcagtctcatggaaataggtactaattgcccaacaataccaacaagaagaaatatgcagattttttattattgttttttcatgacaatgtggtcaaaatcttgacgcagcttaatttctgactcaacccatctccgagtttcttttttttttttacttaaaaaaaaaaataagaaaatacatattttttttttcattgtaattgcagaataattgtgtatcccgaagtgtactttgtagagtttgtttcattttggatggtttataatgcaatttggccaaaatgttctgaagtaaattgtaataggaggtaaaagtttaggaaatttagctctcatgtgtagaaattaatctttgtaatttcagcaaatcacactaaaataaataaaagttaaattaaaataaacaaatcaaaaacaaaaaactagcaaacacattaaattagaaaaaatataacatagatgaatctaaatagctttcagacacaacaacacacgagatttatactagttccgatcataagttcattgtgaacttggttatactccaatttaaaagcattgccatccatctttattgataatgagaattagagatatctttattgataataaactaaaaatatgcattataactaatgcacataaactaaaaaaattgttgttacaataaaaaaaacaacataaaaataaactataaaaatacataaac

SEQ ID NO: 188064 - DNA, 2524 bp, Cannabis indica
atctttgaacaaatctcaaacctttttacacatttactttgtacttgaggattttctcctctctgtctggcctactactgtgggattttccagatttgttctcactcacctctgatctttcatttaattagattttgtttttccatagttaacactactgcccccacacagtctctcctctcccagtcccagcttctaaagggcccatctttcttaatctcactgacccaattagtttcagaactccttaatgttataaagccttgctttttgttttcttggtcaattggggttttccaatagaaatgacaatcacaaattttgcatatgatctctttctgggttttgattataacattgattttcttgagtttaagtatcttcatctcttttcagatataagaatcagactgttgctgttaaaattgttcatagaggagatacaccagaagaaattgccaagagagaaggaaggtttgcaagagaggttgcaatgctgtctaaagttcagcacaaaaatttagtgaaggtttgttttatcaacaaacttactgtgtgattatgtttcaatgatagttataatgttggatatgtgtaatgtgtaagagggtttttgatttgtgttttgcctgttatcaatcagtttattggagcttgcaaggaacctgtcatggtcatagtgacagagcttctgttaggtgggacattgcggaaatacttgtttaatatgcggccaagatgcttggatacgcgtgtggcagtcgggtttgcgcttgatattgctcgtgcaatggaatgcttgcactctcatgggatcattcaccgtgacctcaaacccggtgtgttcttatttccttttcggttgaatgatgacattatttaaaagctttttacaaactgtgtgttgtctcagtttatgagtcactttgcatttgatttctaaggccttgtcttttgagtatattagcttaatccatgagatggattgtgtaaaagtcaccagaattgattgttataggttcttctagtaagtggatagacaatgtgcctctttaggctcttggcatttctagtaaggatcagtgattgagtttactttagaatctcataattttgcaccccttttcattgaattctactaaaattctaatgattttgttttctttttcctatccagagaacttgattttgactgcagaccataaacggtaaactcgccgactttggcttagctagagaagagacactcacagagatgatgactgctgaaactgggacttatcggtggatggcaccagaggtaaaaatgaaattcgattctaccattgtgattctctctctctctctgtcttaatctgtcaactgaaggctgtttacatatgatccgatggcagctttacagcacggtcacattaaggcatggcgagaagaagcattacaatcacaaggtggatgcatacagctttgccattgttttatgggagctcgtccataataagttgccttttgaaggcatgtcgaatctacaagctgcatatgctgcagccttcaaggtaatgagctgttcctgaaaatttaactgtattggaatgactagaccttgcatattcattcatggtagcaccatagttaaatactagcaagtgaatttacttgaggaaacatgaacagccaaacatgaatcaaatcgctattgaagtaggaatgcagaaacaaaaaaccattaggacaatttcgaaactgttcatctagtgttactaatttgctttttgccaaaggctacagtataaaatgacaaactctacggattactttacattgtacttcttctggtgttgtttcagaatgtgaggccaagtgctgagaacctccctgaggatttagcattgattgtaacttcatgttggaaagaagatccaaatgaccgacccaacttcagccaaattatacaaatgctcctgcactatctctcgacgatatcacctgcagagccggtaattccattgcggattttcagatcagagaatgctgtactgccaccagagtcaccgggtaccagttccttaatggcggttagagaagaagcaggagacacaccgaaaaccaacacagaagaagaaaagcctaaaggcctcttcttctgctttaaccagtgttactaaatcctcaaaaagggccacaattacaacctcctgagacatttaaaaaagaaaagcaaaaaaggaaaaaaaaaactattaggaaaacataataaacaaacaataccctctgtaaaaattgaacaagatgttactttgaattagtcatttgagaaaccacaagaagaaaaaagctgccttttgtctgattttactgtcaaaatttatgtagctctctcactctctcattctcttttaatcacattagcctatagttttaaaagtcatggagttgggtttgctgtgatgtaattaaattgtaaaataaaggttcatccaaaagcctttactctattaacaacttacaacttctttacttgaatgaa

SEQ ID NO: 188065 - DNA, 4373 bp, Cannabis indica
gtaaagaagcttatgtagattagccctatcgcaacctctacgtattagtcaatactaaaactttacaatttgcattagtcattatagaaaaaaaaaaaaaaaaaaaaaaagaagagagagagtacacactataataaaatgtcgtaaaaactggttacattttaaataaaaataataataagacataactataaaattaagggatcattagttttcaattcaagtataataattaattgccgagagccttatttaccttttttatatatataattttagttatttacaccaaatagatataaaaataaaacaattaacattatttaatctcaacttaaatatataatataattttatttttacaaaaactcatccaacatctgtatgggttgagaattgagatgagaagttgaggacagaggattattatcaaataatgatgcttctttcttctagctagaaagcaaattcatacaagagctggcctgaggaataggaattaaataatcaagtgcattcattgtctacttctctctgtcttataataaatgccttgcaaattaagggcaggcctaattcacccaattattgtgtattggctcttctgttttccatttctagattcttataggccagaatataaaataccctactagaagtagagcacagtgacaaatgagtagaaccaagtttcaatttttttgggggtttgtactacaaatatgtactaagggacaaaattaaagttttctgttgacaatgcatggtttgttcatacttctctcttttgattctactacactatatagatgttgtctctacaacttggggtcttgttaatgttaaactctccaaacaacaacaaacacacaatgtcaaaacctatatataattgttataagtagtattgcccatgtcatgattaggccccattcaattaaacaaaaatcaaatgtcacatcttatttttagccaaacaataaacatatataaatgacaaacagttaaagatcatcttgattatctgttcattacctttcatcataattgatcaacacacactaacgtggagaaaagggtagtagaatatttatatgtatatattagatataaatagtgtgtgtatacacactcatataaagttacttattagatagccactctgtaaaatttaaaaccttctctgtctagttatgatctctgtgcatcacatgtgacttgttattccaagattcaatgatagtcttcttaaattaaggaagagaaatgtatatacaaattcacacacaaatatatatacttttgatttaaataatgtgaaatgggataaatttagtcaaaagaatacattaaaagaaggtccaatgagtagaggagtgtgtatatgtatatacatccatgtgatttacttgtgtaagtcttacatagctgctaagctagtctatacttccctatgatgaaaattcaaacttaagaccctaccaaatttttagggttttttagttttacaagagttgtttttttaaaaaaaaaggtgggactttttgttcagtttcttctgttggtggtagttttgctgtctatctttagtgattttcaaatctttctagtttaaatgaccaatgtatcttggttagagtgtaaaacagaagacataccaaagctagttggtcaaaaaatttgaggtgaaaacacaaaataaaatatgggtctgttttgttgtctcattgactgtttattatgttggattcttttactttttttcacttttttttagtaattaccaaataattattataataataaacattaataataaataggttttgttgttgtatctccactcagcttgttgacaggtggttaccagaataaacagttattatggtagttgaaatttcctagcgaatccatcccctattttaaattatattaaatattaaaattaatttggtgggtgttgaaaagtgttcattttttttcttctttattcactagaattcttttttttctttttcttttgttccaccaattgggacccattatttttgttttcttcaaaaatttatgacccaataaatgagagaacgagagacatagagagaataaagcacatatatatataaaaattaaacagataataataatttagtatattatcaacaacacttcttgcactagctttttttcttagcccatgatcaaagattctcaacaaaagaatcatcaatgaaaatggttctaagagtgaaaaaaacaggccgaggttgtaatcatcataacattgggttacaataaaaaaaaaagacaggggtagtatcaaagggtaaaaatggaaaaacaaaaaattggagagaagaatagaggcaaataaaaagaagccaaagggaaaagtaaatcttctatagagattgaccttccttttctttttaatttttttttctttttcttcataaaaaaaaacttcccaccattgattggtctaccatataaaaagtttccttctttacttttggttaagagaaggaaaaggggtcacaatcagcaacgagagcccttacggcaaataagtgaacccgcattagtggtaatagtaccaacaagtgaagagggcctagctcccaagctagatgccttagcataactcgaagaagctccagctcctgaggctgtgaaaaacgcaccgtttaccattaaatctccttctgatctccaattccaattcttccactcactttccggtgcatcctcatgtttagtcacctatacgcaaaatagtataaattaaattgcaccaataatatatataaatggagaaattctaaagggcattagtggtgcctatcactctcgtgtatgttaatctcgctatagagcatagctattaggcacaagtagtgtctagcaccttctcgacatgtcgcgttgcgattggttagcgatactccctaaaagctattatattaacttatatgggacccaatacgttaattataccaatagcatattaacatataaaaaagtagtagcacgactgtatcctttaacatttctcataaataatattatatcacgtcaaaagtaatagattaattaattaactacctctttactgaatctgttatttggagcaagaaatctatttccttgactattaatagtagggtttgcacttcctccaatggcatacatctcccaatgggtgtagtcattgttcaccacgtggaaataaccatgcctacatctgcaacaccaaatacattattaatttttaattccataagcgtgcaccccattagaactttttttctttttttcaaaattaaaataaaaataaatataatgattaattatttatttattattattattaccttggcattctttgaacgaggccttcaccaaaatggttaaaagcaatagtgacttgcatgttcttgtcttgagtataagaatcgctatgacccaacaacataaccttatcatggtgcgtcatgtaattattcgagagtgttatagcagtggacccatgaattgcatcgattaaaccatcttggcagttagacaaggagcaatgatcaacccacacgtggcttccaccaaaaatcgacacaccatcaccgtcagatatagttctccacccaaaatggtgtggggagtctctcaccatagcattaccacctggtttacagtcatgaatattcaaaccgtggataataatgttcgtcacgaactgaaccgttatacaaggtccaccggcaatgtggacgctggctcctcgaccgtctaatgtcttgaaagagttcatgattaattcctctttaagtttaatcaccatatctctagcgaagattatccataacggctcgtcttggatcacgccgtaacggagtgttcctggctttgggttcacaacatcgttatcgctagaatcagtaacgacgtaaatccttccgtctcttcctccgatcgcatttttaccgaaaccgattgcgcaatctgctaatctctgtcggttcttctcccaattcgggtcgcatctccagcaatcgtcgatcgggttacccgttccgcaagataggtaacccaaattccttcgtgctcgagtggcattaataatacttctataccaaaaaaaaaaaaaaaaaaaaagaaaaatcaaagttagtaatatgtgattaaagaaatgtgacatttttagtattttttactttattttttgggtacttacttgtgaacttcttcaactacaagttctgggtctggtactggtgaagaggagctgagaagagttgaggttaggaaagtgaagaagaagaagacaatgtgagtgagtaatgccatttttttagtagagagagagggaaagtgtg

SEQ ID NO: 188066 - DNA, 2156 bp, Cannabis indica
aaaaaaaaaaaaataaagctcatgagcattgacaatattataaaaaaatcaaaggaaattatcatttacacatatggattgttcaaacatttttattgggtgtttgacctaaagaaagctagcaatgtttattgttatttatttatttcattcttctttccctacatagcataatcctatgattagtcactgcactaatagtagaacaacagtttagatttcccccacaaaagattttcagtttattattattaaaaaaaaaagtaacacaaagtattatttaattgcttttaattcctttttagtcacttcaactgttgtctgtcaaactctaacgagctttaatggaaagctgttctaccagtactacaagcttgaaaaaaacagtttttctttcattatttttaatatttggctgacactaaataataaaataattatataaagttttttttgtgcccatttcatgaaaaaaaaaaagtatgtttcgtgctctgccagagactatagtgagtcaccgtatattaagaataaagaaatggtaagggtgtgaaagttagtatattgttagtgcaaattaatatcttgtctcacataattaaatttaataaagaatataaaaagtgttaatcaattgtaatgtattacatggataggacactatataatgcctaataaaacaatatttaagaatattatcacaattgcaccacgaaagattttaaattgtatttttttatgttgtatggtgtggtgcgtgtagttttgtgcggtaataatttaataaacacccttaatttaagtctatatttttcgtaacatgtcatgcgaattagtaatatcatttcatgtcgtgcccaagttaatatttattcatataaaataataaaaaataatattaagacttacaaagaaattaaatattaaataaaacaactcataaaatcatacaaataatatgaatactctcgtcttaaatcattttgcattagtatattcaaatctcactttccaatatcgcgtcatagagtggattgtcgcgactctccttctgtttcccaaattcaatttttttctccacttaacagtgaatgccacgatattggcttcaatgctgtggcttccactgagtttttcaaatatagttgcaatcttagaattctgctacaatgaccgatgatattttagccataagtctctcaatatataatgggattggataattcaagatgttttggaaagcataataaaagatctagaatttttattcacaatatttgtcctgaaagtgaacggatcatagttaaaatgggcttgaaactccatagttgatttttgattacaaatggagcgtgttgagcatccacaacttagaattttttgcctattgtatcttacaactccaaaattcatgctaattccataaaatccatttaatttttcttttttcaactcatatgatatattttaccattaaaatctgaaacaagaataaaataaacgtaaacctgaataataataaaaataaaataagtaaaaacaccctttaaaatagactctaaaatccataaaaatagatcaaacaggttggaaacactgtgttcaaaattcttaaagcttatgtctacactatcagaattcatatgtttgtagattccgacgacctttttctggtcatgactctttcaagtaggataaaggtgctcgaagtcgagaaacatttaagcttttcaaaacttctcgtactccctgttctctcgaatgtgatccaggacacgtggccccttaagcagtctggggttaacttctccaagaaatttgagaaggttcccattcttgaccatttttttgtctgttcgggtactaacttcctagtcttgtttttcttttcttttcagatgcatgacaagattcatgagttccatcaacacagtataatttttacaatgttgaccaacatatcacaaagctacatgaaggctccaaatctaacataggacatccacactccaagaagaatactctgttagtttttatggtccatattagagttagaaaagtaaaagtagatttgataaaaaaaatagttttatccaatatgaactattagcccgaggatctcaacataaatatagattaaatctagactagtgaat

SEQ ID NO: 188067 - DNA, 8968 bp, Cannabis indica
attcaaagttttcttacaatgtacattagagtctgacgaagtaatgatgaattacttaatcctgacttgaagtttttttattaaaatcttaagccgcaatatataatgtgttgaaaccgcccgaggttttactgtacggcactatagtttatcacttatttgctgaacgcgtcaccagcccatcccacactgacatttcatgtttttcagctaggcatggcttattttttccccaccattctctcatgttagtagctatgtttctgcgaaaagtgtttgttttatttatattcaggtagttgtgaagttcttattaatgaaagtaaagaaattttttttttttgaaaaagagtaattaagaaaattcaatttggcctaaagggtttcttttacttttacttaatatgaatttttaagtcatcaccttgaagctgacctattatttaaattcactttatttttcaaaattgttgctgtttgatttttcgtttttaccttttgcattgctgcaaaatgtcagcatataattacattttgctgaaactctgttcatccatattgaaaataaattcgaacgggctggtttggtttaagctgattggacttttccaaattattcacttcgtctaatagatactctttgacttgtaaaattttaagatccagtaataagaatgcaaattgaatgttcaaatagaaaaactctataatttgtaaacatgtaaaaatacatgattgatgtccatcgatgtggctaaactagagaggtagtagtcatatggctcctctgtctgacatgtagcaacatcagtattattgccatgtatgttgactttggtggtgccttgcagctcgctttgtaatgtactaacggggtatactccagtccgttttctataactacacatcaatggtgtcatctttattagtatacattatgtatgaacatgctatgttgacatataaataagtctgcacatcatactatatatataccttattgtttgtgtggttaaatacaccctggtgtgattatgagaattgcacacgttgattacaggctaaacatggaattagctgtttggagcttcccctcattcagcatacaaagggacctgatctggataggctttctgctgtactaagtggtaatctcatcagatttctctctgcttgatagtgatacggagcaatatttttcgtaatttcattgtatggacaccgattggaagagttttggattgataataggtgcacatgatggttgttttcctcttataaaaagtcaagtcgttatgtacccctagtattttcttttctttggggtaaacaaatttcacctacaagttttgtagccaaaagattgttgtggtttaaatcaagccccctttttttgttggtctggaacattctatcgatcgattctcttatgctgatttaattcaagtggagcatcctatctatcaatattttgtttatgtcattgcacttacaattttgaatggttgcatatgctggctatggtagatccgcataagtttctgtcattacacagtcgttctaatggtagaattgcttttctgtttctttgtgatgcatggtcactttttattaatattttggtagggtactaattgaaaacatgttctccagtgagatgtttctctttaattacgagctcattaaatttggcacaaatattatgcaagaattgtttgctgattttttttggttcttcatggtagcagatacaaccttcgattggattgtcataacatctcccgaagctggttcagtctttttagatgtatggaagtaagggttagaacttgctaactggacactttccattatacaggcttatttcctctagtttttgtttctctgctctgcttaaacatgacttgaactgtgctttctgctattaaattttgtattccctctcctttttatttattggttcaagtgatcatgcatttttatctgagagattacaatgataatataatgtatctgttctatatttctctattgctctctcctgaagtttcctagtattttttcccttttagaaaagtctttgtacaataattcaaacatatattgtcttttccgtaataatggatatgctgtttaaggtcttgctatatgattatcaattaattctagtgccaacaaataatctctaaaatctaactcattgctataattatttatttatttttatgatttagtattgatagtcttgactttggttatgttccttagggcttctggaaccccaaatgtgaaaatagcggttgttggggctggtacagcaagcatttttaacgaagtactgcaatcatcaaaacaatctctcaatgtttcattcatgccttcaaaaggtacttatgatacatgtgtctggcttttgtttagcacctacattgtgtgtcacttggctcacttgattactgaaagacttgaaattcttataattatatttgagtattgaggtttaattccactaagcagaaatttgcaatgtaataatttgttagcttagctaaagtttacttttctactggattttataatgaagcatttattaatgttttctttcttttgctaaactgttttcaaagcattactgttgggtgctttaatggtttctcttcaaaattgttttctctggccattgttatgattgcaatccacagaaagaaaagaaaaggcactgtttggcttctgacattgtaaaactaatatctttttcttattgtcaatcttcagcaacagggaaggtattggcttcggagcttcccaaaaatagcaacacaaagtgcaccgttttataccctgcatcagtaaaggccagccatgagataggtttgtggaatttttctgcacactgtgattctttttatttgttttttttttcttgatctttttacaataaagctaactcagcaatctgatttttcactctattaatgaagtctgaatggtctaattctcatcctgtatagttgatctaggagtttttagctagtgtactgttaatgcactacggagtgtataattgtaccaattgaatattaataaacaatatatctgctatgaaaacctgctcaaggcatttattgaatgattataagacctccaagcaactgagatatggtttgtcagaggttttgtcaccctctttgttctttcagactaatgaaattagatattaaattatggagaacatttctactcagacacttttgaagattttttcataaacatggaactgatacacattgagacagcctagtatactaataaatggtcttatctgttgacaaattagaaatttcttctccattccattttaaatggttttcttttttaaatacctatgtatttgcattgaagtcatgagtatattttaattatttatgtgtaacatatagtatgcataccttctctattgttatttatgttgatattaagaatttgcattgaatgcaatcacgtagacttgtaatttccttttcaattgaaattactgatttagatcaattttagcacttgttggatttcttgttgcaagtactaagttttatttgaatgcactcatgttttcagaagtttaatttgaatgcacttatgttttcagaggcaggtctttctaatcgtggatttgtagtcacgaggctaaatacatattcaacggtatgctacggttttgatggctagggcagactttagtctctttgggaatttctgatataaaattcttaaacaaattttattatcagttaaggttttggttaaactactattattattattttatcaaagaagtaaataccttaggtgggggagaatgtgtgatctcacttgacatctaactgtgctatttacttaagtaagctcacaatttctagtaatttcttgcaggcacctgttcatgatgttgaccaaatggttttagaggaggcactgtcagcccctgttgtcacagtagcttcaccttctgccattcggtaagttgctcgttaaatgttatattatcttttcttgccggagttatagttttttcttttgtaacagttctacatttcatttaaaacaaatatttgctgctatttacacacagaatactatattgcttcaactattccgttcactataactatgttcagtgctctatgtgatgtaatgaagttttttgaacttatctctcttccttcattgagtcaactaccagtgtcaacatgcaaattttgcactttttgacttgatatgttcttcaagttcttttactctagtctaaactaaaaaacattattatgtgctctgttttgcaatagtgcctgggtcaatctcattccaaaacctgataaatggagcaattcagttgcatgtattggtgagacaactgcttcagctgcaaaaaatttaggcttgagaaatgtgttctatccaacacatccaggtcttgaagggtaattgttgtttcctttaacctttcactggaatatctaagtcagctttatatccttgttgagcacagatttgtaaagcaatttctttgttcacacattgatatttgaatatggaacattttgagacagttttcaccgtgtttttggaattacttgtgcaaatagacagaaaacaaatatatatgttttaaattcacttggcgaaatatataggtttctctgaacttttgataaatttggtgagatattgaaacaaatttgtcattgtctgatactgcttttgttagttattgcctaatacactagaactctcttgtgacttggcttgcagatgggtggataaaatcttagaggcattgagaatgaatcatcactagaggaatgacaaccagttaaggtagtttgctttgtcctttccgctttgctgaataattttattttcaatcctttctaatttaaagatattccttagctttctcacaggtgtaggcaggctaacaaggggtaagaggacaccactgcaaatgtgctaagatttcaattttctgttcaaagaagttgcagtagggtttaaccgcatgctagcagcagaatcagaaaggtgctgaattttatattgcactgaagagatcgaatctagaaaagcatgtcttctttatataaaatcattaagaggtcatctgggtgatgttgtggataaaataccattctttgtacctgagttccagtagttcattcatttttcaaagccagtttctgaaacacccattacttctatgatttccattagttgataataataaggtaatagtagtataatgtaattcatattctaaatatacatcattgtataatacattcgtacgttttaagcttacaatggcagtacattttgggaaaataaatattttattctctaatgtttttcactgttagatttctctcttgacctcttattatgcaggattttgtaaaaatactaccactgagtaatactctcacaatgagagaataattatgtctgttattggagagattggttttctcaggagggaggcggaggcttcccatcaaggaaagatgagatcatggtcagtgctcgttttggttgatagctcggaaccatatggccagcccctcttaccgtggtaagtgttaatcctttgtactcaactacataacctccaacctattcacaagatgtggagaagtggtgttttgagatctagtttttggctttattgaaatgctaatagcaaaatgaaaaagaattttagttagaagtgactccatcactatggatcaattgttattacctcatttctagaataccaggggcgccaagctttcacaacaggcaagtttaaaatgtttatggagtatctagaggatgccactggtactcggccatcagtgtccccacactgcagattatttattatataatacaatgtacatttggtaacttatgtcgtgctaaacttgaaaacataataccagttgcaattatataatatttacatgtttaaatgagctgaaaagagcaatgctgaaataagactcaactgtatacccagatacttattccacttgttgtaagctgctctattactggtagaatggtggccggactgtctgtccaagaaacgccgctacacataaaataaacagaaagtaatacatttaagctctctgaaatttctagctgtttacccggaattttcgattttgttttcattgataaattaggatatatgtatgctgtttgatctacaatttttgaatcgattaactgctcaaatttcctattgcgtagcacattgttatttgtatgacctacacggcatgacgctaataccattggaatgagtcgtcctgatcaatacttattttttttttataatattatttctaaaatatcaatcaataaatcaacttcatattaaccaagtatgaatatgttatggatatatgtatttgatttaaaaagttaaacttacccgcaacctgtccaatttgttggtttagcatgaagagctgtttgtacctccccaagattcagatatgcttcaacataattggcggagcatggatcaacatcattgatctaccacatgcaagaatgtagtgtagtttagcttatttgaggcttgatctgtagcattctgtccatatttcatagccaaaacttaaaatattatacgatgtatataaaagagagttggtagttttcagtagtaactacttacggattgctttgatgctgctgatgaatgatacaatggagcatatgtgttgtaaatgtcaatgtctcccagttcaccatctccttgacttaaatattgctcacaggtactggaataattacctgtaacgaaatctcattactgtattcctgcatgggtttcatcggatttcaaggcatgtgttcaatagtattcgtatataccttgtttgccagtgttatcatcgatccaagcattaccaatctatataactagtcaatacaaagatattagcgtttttaagttagttgaccaatagtttgaactcccatttgagtttaatcaatatgaacagagtattctgtatttgaagggagcttacagcgatgcctttgaggttgataactgtttgatttgttactttgttcaagagaagggtgtaagcgagttgaggtacgtaatgaccagcatagctgttcccagttgtgaagaagtctggagttttgtattcgggaaatctttctagccagttcaccagaaaggtgtacgagtcctctgttgtgcgtatgtcgccgacgttgtaattggatgatgtgttggagtatgaaaatccaacggcagggggggactccaagaagttcacatttgccactgccaaagttatatactctgtaccttttgttactcttctgctaattgctattcttgaaattttgacagaatatgttattggattatctgaaaatgtttgtcaataagtcagttacctttattccagccatactgatttaggtagtgtctttccatcgctgttgaccccaaaaggtcccaagccttgcatgcctccaaatctaaaagatgagcatcctggtcctgtactcaaatcacatttaattgcaattaagcttcgattaccgttgtgacatttaatctacaaacctatatatttgagttcagtgatacaattaagaagcagtcgttagcagatgtcggcaatgtgaaagcttttttggacttgattaaactgctgttttctaaagctatttgtcttgtcagccaaaagaattaaaaaaggcatgttttataaatttgtgggataaataggatctattattactttgatcttacatcattcacatattagttgtggtgactacttcaagttcttaaaagtgttgatattttacaataaataacactaaacaaggattctacattgtatttcaatttttttgtctctctaaaagttgatcgcaagaaaagaaggaattcctttcttgcaatgaaccaatttgttgtctactaaacaaagggattctattattgtatctcaattttgtctctctaaaagttcattgcgagagaaaaggaattcctttctcgcaattagatctagtgacaacacatattgtcgcaatttcttgcgatgacagattcatcgtccagatctaacgacaacacacgttgtcgctagaaacccaatttctgtaggtatgatataattcaagtgacacattcttaacagccagaggatgtttaatttaatattctgtttcaactagtatcgactaaattatgtcgggtgccaataccggaaaattgatgttgatgagaggactaacaatatgtagtgcttagcaaatactattgggaagcagctggtaatagttggccatgaccagacaacaaattattgatgttgatgagagaattaacaatatgtagtgcttagcaatactcttgggaagcagctgacaataattggccataaccagacaacaaattaatggctaaaagtcactgaagcaattcaaaggggactgattagacacaatatagatagagtctgttcagctagtgagtggaccctcactccctcgcccttggttgactacttagagcactcagatgagcttttctacgctattttctaaatacctagtaaaaaattttcttttttttttaatttatttcaaacttttatattgcatcatacattaattatacattattttttttctacatttcatttaaatatattctttttagtatatataaaatatacaatgagtatgaatgtagcattttttaaaatttaaacataaatgtgaatggagtctaatttttttatcatgtttctacttttctcttctctatttttgaaaaaaagtttaactcaattgtattaagagttagtcccacattgctaatgtgtagaaataaatgtgatatataagatgaatgggctactcatcccattgccaa

SEQ ID NO: 188068 - DNA, 1335 bp, Cannabis indica
caacattttttcctccaatgaatacattcggtacggttcttcggcccgtccactcagctagagctgcttgaatatcacttccatcacctataaatttatgataagattcctcataaaactaggcactaaccaaccattaagcaaaatacattacttaatcatactaagtgctctaattcatgtattgtttaactgcatcttcagagtgaaaccaaaccttacagaaaaaagacaccaaaatcttccaagctagaaaaatcagagttttttcctttttagataaatgaacgaagaaagttttgaaagctgttattgcaagaaaatagtactcaaaaaaggctttatcgtacacatgataagtaggtacccaaaagtcacatcaaggtaagtttttgacgccaaattcagcacaacaataaaggcatgtatttataaatcagaaaatgacatacgtactttcttcatccagttcaaagactttgtaagaagctcccacttgagtcaacaattgcttaaccctctcacagtaaccacaataagttttactgccataaattgaggttgacaccaaaatcagtgtctatataattctctttatgtatgtgattaatagaaattaaaattacatacgcaaaagaaaagaacagaaaattatccaatttccagaatcaaggtcaacatccaaatttgaagatatttttttttccttcttctaaagaattaccatattttatgagtttggttgtgttctaaattaataaaaattgaagtttgtgacaataaaaatcgaaacttgatgaacaaaaataagcgtaaaagaaaaggacctgaagacgacgacagggtgagaggagacgatctccttggccttgttgagcgccatttgaagctcttccttgctctttttgttagtgcccacaaccgagcccatttggttagatcaaatatatgtatttatagctatataaatatatagagagatatttgagggcaagtgttggaagaagatgaaaataagggtttgttttccctaatcaggtggcaaagaaatgaaatgagttgatctgatcatggcgaccgctttcttttaacgcatatcataaccaatgcccacatgaacatgatgcatgtcacgtgtccattgctagccattgtgatttttttagcattatattatgggtaaatactattttggactttctgttttacaaaaattatcaattggacactgtattttatgggggaatttttaatattatacgtaatattaaaaataataacaaaagtaacctgatcatttaattggtcctaatagagcctgttatagcgaaatct

SEQ ID NO: 188069 - DNA, 5258 bp, Cannabis indica
taatcaactactttgagagacaagacaaaacactttggttggtaactaacgtacgaacaaaatcaatatcagtagaaaagaatcaaattagatgtgttgcggatcactaagttgaatttttgagtctttttgacgacgtagtccagtcgtacgttgattaactaaagatagaaaaagaataaatcttagtaaaattactaaaattacgtttttttttttttttttacaataaaatgaataataaagtatgaggttgataacatttatatttatataatttatgtatggccttttgtaacattggtgaaataaaatagaatagacaaaagaagatgttatttaaagggtactacggtcttaccttgagattatgtggtagtgagtggggatctggataatgggcttaaagaaaaaggcccactagtctaaaaatggtccatctaaaaaaggcgggcatatgtgtggattcgaatgtagctgaaaataaaacaagaaacggtgcgttttgatgggtttaaggattgtgtagtagtgtgacccctttctttcttcactcgccgcttcgtacattactaaaataaataaaaaaacagaagcaaaggcaaaacctttttctcttaagtaacacgaacaaaaccttttccctccaacactcaaaaataaaaattaacccttttctctctcttaccgccattgatgtccaactccgctcaggatccgacctcttctcatggccttcatcatcacctccagtttcagcttccacatcctcactcacactactcctctgctttctcttcacctactaatccgcaatttttccattcttttcctcacacccagaggcctcctcgcgatcatcgtcctcttcatccttcttcacaaagcttcgaccgccttggcgtttccgatatctctaacgaatctcatccaggagctgactctgcttttacaaagcttgaggtgagtcctacttctcgcgatcaccacttatcgctcgcttcatctgtttttcttttccctttgcgattgcttatttctttgcattctatcaatcttacgattttgaatttttcttctttctttcgatttctgaatctgccgcgtgagctcaagtctgttttttttatacatatatataatctttatgaatttgattgtttttaacactacagtagctgattgactcttgatattgggttcaacgcttattactgatcttgtaatcggtttattatgcttcttgatttggtttttggtgaaatttaattgcatgggagttgatcttcctttgaagcatgttaattccggtactgcttcatattatgatgccaaattatggccgattccactttcgcttaaatcgggcggatatcgacccacagaatccgactcacttgatacgcttcgtgtattgatccgatctttgtaatccatacaatattctgctaacattgaccagcgatctggaaaacctgtgttatatttctttcttcacttttagttggaatttttcccgtgaaacgcatcttggatagagaaatttataaacaagaagagcaacaataaagaaatttagtaattgataaagttttaagtgttcatttaagagtttttaggcgtagatctataagtttgcataacaatcggtaatcaatgactaaatattattcatttttgtaaattttagtttgattatacctgataattgacaccctttattgcccaatatgaaacaattgttagcgaaatttatgctggcaattaactactacacaaacatctaaagagtaatattttttgcagttaacacaatcaaatgttaaagttgagactggcatgagtggggaaatagctgtatctggactgagcaaagtagttaatggtcaaaagcactctggacaaagaaagcataattctaaatcaaaagttcccagacaatccattggatcccaaacgttgaaagctgagtctcttaatggtttcattccgccgaacagttgccgctttgatagttctttaggtacatttatttatttattttgaaagagttcattaggtacatttagattacacatgttacagctactgccaagtaattattctttctgtttcaatgttcttttttatattaaattttgagcagtcacttgaatttttattttgttatgttgattaagagctgtaatgtgtcattggcaggcttgttaactaggaaatttgtcaacttgattcatgaagctgaggatcgaactcttgatttgaaccataccgcagacatattagaagtacataaatattcatttgtgttcttacaagattatttgaactgcatctgtataatgaacattttatgtttcccatttgttatttattttaccttgcttgctgtaggttcaaaagaggaggatatatgatattacaaatgttcttgaaggaataggattgatagagaaaacttcaaagaaccatatacgctggaagtaataattgaacttttcttatcacacttttgttcttcttttttctgttattgttttccccccaattgatataaccgttaatcttacaaacagaggaaatgatttgatggggaaacgagagttggatgattggattgctgcagtaaaggtattgtgtaacgtgtcaatcgttttgatttgtgctacgtatctttaataatgttgcactgtttattcttgtgctataatgttgatacttagcaaaccaccttttgatttgaagtaattaacctcgagcaaagtggataatggatctacttaaattttatgcccacattggtcagtgttattctttggtttcttaaatttttctccagtatgtacttgtttttattttccaatgtacattaattattgagttgagaaaggaattttaaactcgttagccggctgtctacagagagtaatattacagttacgttaatttcttttttatagatggttcaatttggaaaataataggcataattaaggtgaatcgggttttatatgcatctagaaatatgatgctgtaatttaaacagtatatacgattataaggtctagtttcatttcaggctgaagttgaaagcttatacgctgaagaatgcagacttgatgaggaaataaggttcgttctgtagagtttctatggatagttttctatcggatgatttcttattatgtgttgaccctttgtgttctttttcaggagtaaacaaaatcggctttgggccctggaaagagatgaaaactgtcaaaagtacacttcaattccctaatgtggttttattgcagccatgatatttctttgttttcttcattttgtctattttatttctgtaggtacctattttttacagaggaagacattttgactcttccatgctttgaggtcattttcatctaagacttgaaacttccttaaatggtgcttgttcttagaattattgttacctttatcacataacctatctcactcgttgattgttgttgttgttattattattctaaacagaatcaaacactcattgcaataaatgctccaaaagctagttatattgaagttcctgatcctgatgaggtagtttgctaggataaatgtggtttgacatttgtgtagtattttaatgtattaatacccaatcaattgttttcttctaatgagcaggatttgagttttccacaaagacaatataaaatgattgttagaagcaccatgggaccaatcgatgtatatcttttaaggtatcttctttatttgcatgcagtaatgcatttatgtgcacgtctcctccactctcaagaaagatggatatgaactatgttcttaaattatttgaattttgacaatctctggattgtcagaacttgggcatttttctttctttcctatgcgcatttatataggtaatagctaataaactataattctatgcctttagcaaataccaaaatgaaaatgaggacacaaccaccaaccgagcaacctctgagggtttatctgcatgggatgttggttgttgtggaagggaagatgaagtgatctactcagatcatccgggtgatcaaaaaagttgtgtagataatctcagctcactaggtccaaaatcatctggaattcagaagattattccttctgatgttgatgtaagtacttgcactatttttcttaaaaccttttattttatagtttagcatcactttcactaatgcgggctctccgtctccaggtaaatgatgattattggtttcgatcagatcctgatgtaaccattacaagtctttggggtaagcaataatttatttcagtcactctttatttgtgtttgcaactaggtgagtggaacaattcaaaaccagccagtaagtaacttgcttcatttgttgttgttgttgttggtaattgtagcaaatgaggagtggacgacgcaagcagatggactctttcaagaaaatactgttgaaactagtacaaaactagctcggtgacaagctgactgagtccctcttataacagaaaagtaaattagttgaaaaatttccaggtaaaatgacgtggggctcctgagcattgcttcatatatttaaaagccatattgtacagttgaatgattcttccttttttatttttcaaaatttatattttactatagaaacattaaacatgtactgcaataattttataaagccatttagctgccgaaacccaacctagatacggttaacaagatgggtttcagtaaggaataatctttaacctctttttaggctttttcttgctcgagaagaggtggattggcataaaggctatgatatattgaaattctattgttatctttcattgtttacttctctgattccctagttttaatttttaaatacaacaaagtttggataactgtttttttttttgaatggacgtttggataagtttaaatctgataaagttgaaccatttgcaactgcaacgtttccacttgatttctcttatttaatcaaaatttttcctttttctttttcttccatatcctgtaaagtcattggagttactccaacaactattattaagtttactctattattttatcaaaagaaagtttactctattgttgtctacctaaacttcaataatttacagggttgggaggtaacttcacggatctgatttggtaacagtgagatcctgctatctggatctgtactttaatctggaccacagcagactgctaaagatcctttttttttaaaaaaaaa

SEQ ID NO: 188070 - DNA, 2204 bp, Cannabis indica
ctctagaactacttgcatcccctaaattatttaccccatctgctcggggattggcttctccatttttcttatattgacaaaactttccttgtctgatcaattcctcaatttcatcttgaaggaaccagcattcaagggtagtatggtcaatatctttgtggtatatattgaatttcatgggatcccttttgtcgcgatttccttgaattggtggtggtttttagaaaacactattgtgttcctcaatcacataaatatgattgtgagggacagaaagctctgtataattgacaaaacatgggcatcccttcctcttcggggatgtatccttctttgttggtgatttggtgagttttaagctatgttgcctggttagactgcatcttctgggacttcatcctctagaattatttggttgtgagctctaggaccgcaatcttattataggggactcacgcttatccttatttctttcaagtttcactaatgagttctcatcctcttatgcgttcagccatggcaaagaattccactagcgaattaggtcgtcctgcctgcaattctttccaaaaatctatcctcagcaagacacctgtgattaacatacaaaaaagtgaagactcagaggccttcttaactttgggcatttttgtgttaaattgtaaccccttgcatggagaagataatgccttatttataggcatccatgctatatgagctggacggatctgagcctaactagggatttttgtgtgaaatctagcccactaatggggaaaaacattatttcagcattattttgacttattgggcctagttggtgaggcataattcttaaaagcaattgtcgtacggtttgcagtactgttgacagtgataggtcgtgtgccacgctattgttggatagtatcggaaaaaggcacgttagagtagtgctacaatcctcatgtcaaagtagtggtacaatcctcaaaaaggttacaacctttttgtcaagagcctttctgtgagtaggtggaggggatatttccctaaaatttttaggatcgtgtcagagttgtgacatgtaagtgctcccacgactacagaatatcttgggctcctttccagttgttgggattttatgccctaaataaaactcacttcaatataatcagatttactaattaataaaagatcataattcattttgtgtagcatggttcacataattatatgtttaatatataaattctattatatcttaaacatataattatttacaattatagtgatatcatcatagtggaaagtaattgtgattatatgcttcaaagtactaagtcccatgatttatcagtgtactgaatttatactgacgtgataatcagcgataaaatttacttacgcaatgatatgtgaaatgtcctttccagtgcattagtaaagtatactagtattggatgtatggagtattcatcagactggaccaatattgacattggataagatatcataaacttaccgttatatctttctaagtcaatatcacttaattgatcttagatcaatagatcttaatcctgagatggttaggttctagcttaaatgtataattcgtgttctttgacttgttcgttaaagttgaccaaatggatattcccaatacttacatcttagaaacatggtagtgcaattgagtaatctatagcttctataactattagacgtgaaacgatgattttctttgagcttggcttaacaagataaatgatagagcgcttattttagtaattatattagtttattgaaatatcatttacaagtagctaagtgttttaaggataaaatacattgaagggtagaacaataaatttatccctactcgatgtaaattatctatagaggatatttgattatttggattgaaaaaattgataattcatagtgtatctatatttggaacatgtagagtgttctatgtaatgagaagtacaatttcgaatctatagtggagtcaggaggaattaataagatagaaaatttacttgataagttttggatctacttattgggagcttggctacatagtctcatggtccccacattgtttggaataatattatcttgtagactcaattaattgattttaattaatcaattagaattctaaataagactatgtcttgtttgtgaatttttcctaagcaatggcttaatttgag

SEQ ID NO: 188071 - DNA, 5794 bp, Cannabis indica
tggagcaaagaagtggtcaatgatgcagaagctttacctcggtcgtattggaaaacaatagtcgagagaggtatctctctctctctctctctctctctctctctctctgaaatgtgttagtctgtatctgtttgcatattttcaattttgcttattccatttctacaggtggcataatcatcttaatcctgcaataaacaaggagccatggacacaagaagaggagctgactctaattcgtgcacatcaagtcttcgggaacaagtgggctgagttaactaaatttttgcccggaaggtgggtttgttttagtaatttaagttttacagttcaccagcagtgtttttttttagaagcttataagaggtttcatcttagattctttgacgtctgaactgaaacattgctgtgccttttttgcatcagggcagacaatgcaattaaaaatcactggaacagttccgtgaagaagaagttagaaacttatctggcatcaggtttacttgatcaatttcaaggtctgcctaatgtaggaaacctgaatttggcatcttctttgggggttcaaccaaatgtaaatagggttgaagaagaggacacttcagaatgtagtcaaagttcaaatggtgtcaactgtactcaatttgagcctataacagagactggagcttcaagtggaagggaatattataagactcaagagtccagttgcagcatggagcatgatttggagcaatatgcaatgtgtggaaatgcccctcaccaatttaataatatttactttggttcccacaaattgtctagaatggctcatttgagtgtaccagaggaatcatcagaacagcttggaacatcaggactctgcataactacaaatgaaaatcatgcaggatctatatgcaactctgtgggatttaattcagctgatacagtggacgatttgcttatagattctgttaagttggagcgcctactgatatctgagaatgattgttctaatactttattctctgagtcaagtgcacctggatgttttcctcaagatattgaagagaacaaatcaagtatcattggtgaagatggtgctagaagttcatcacattgtcgtgttgatattgacaactcttttcctgcacagtcttcaccactgaagtcatgtgctcaggggaagggtgtctctgaaccgacgatggaattagatgccattccaatttcaagagatgacttcatttgtgttgactctccgactggtgaaacaggtaaatcagacaagtatccgaagttagacaaaggaaaaaatgctccaaaactgatcgctgtggatatatttagcaaaggaaattctgattcttcagagacttctctctctatgcatgagaagaaactgccttctaaagcaaattcttcacaaactgttccctcaatagatgatactactacacaaacagaacatcaagatttggcaaccctgtcatatgacagaccccattttccaagcatagatattccttttttcaattgtgatcttactgaatccaatggagaattgcagcataactatagtccttttggaatgcgccaactcctacttccctcagcaagcctttcatcacctcgctgcttattattagattcaccaattcgagacagtactccacgtgccacattaaaacgtgctaagagcttcaattcttctacatccatgacgagaaagcggttttatgaaatgttgtcaccgattaaagaaagaaaaagtgaaattaaatttgacagggactcaaatatgaggtcatctagtttctcgtgcaccttttcttccctagaatctatctttgatgaaaatggcgcttgcagaatgtcgatatcctctattgaggattctatgctagatgaaaccagtgtggattatgcttttgaagagggaacaaaaagggtcgataaattagacactagaatttcagagaaaattgaaagcatcactaattcttcagacaagcttgcggagaacactaaagttgatgcagaagccaaggtagataacaatgacactacttttaaggtgggttatagctagagaattagtttacgtaaatgcaattagtagaccatgatactgttactgttgttttgtcaaaggatttatttctttatttccttgtaatgatttttatttgctacttttctgttttgattggtaactgcagcagcaacatgcagacgtacttattgagcatttggataaccaccttatcatctctcccagatatggacaagcaaatagaaggctggctgttgcagttttgagtcccagaagtcgatatactagaaaattggaccgattggatcaaggtagctcttttgactcggtagatggcaaagatgaaaagggcaaagttcctgttacatctgtagaatgtccatcaaaggctccagaagaaattacttctggaactgctggaaatgatgctgatattcaaagcatttacatgtaagttgcagatgagtagtcaaagcacaagatatattttttgtccttgcagtttgagatatgcttatgctgctttgtcttttgggttaggattggtgaaagtccaggaacacaaagggatctggaatctccatcagcatggaagttgttgcgttcctttctacatggacccggagttgatgcagacatcccagtcatggtagtttaaaatggacattaaaatgaactgttctgcattgattatcactacatttttttaatcagccacatgagttctcatttgcatttaaaaaaacaattttgcaggatcttgaatacatcatgtctcctgggatgagaagctatgaagcttgtggattgatgagacaaatgaatcctggggaagttttagcgtctgatcaaaatcatcctgaaatttcttccaagacaatggctgcctttgaacctattttgtttggtaagggcgactattttcttcatgatgagaaagagaatttgcctccgaatgtacacttggtaagtgaatttcatcatgaagctttcacccttcaaactattttttcatgaccaacttcatatacactcttgaatcacatacattattaaactgaaaaaaatgaaactgcagattgatggacgtgttcttgattttgatggatgcgatgggacgcctgggaaggaaatggagaacaaaaagaagtttgctgctggcacatccagttcaagttcctcctcatctcatctgctgaagagttgcagatagtgattttacataatatgtgtgtctatatgtatatgttcatagtatttttcagtgcttaaaattctcatggctgttgatttcaatttataattcagtatatattgagaaaccgtattatacaggaatttaagagaataaagattccatatcttatgcaaatttttgttttgtgctaaaaaacgtaacaaatatgatttaacagttaagattttggacaactattgtgtatttgctaacaattgttaaatttatccttaaaccattattccttttcttcaatattagaccttttaatttatcatatgaagttgagatcaagctgtgttgttgacttataaggggttttaatgtttttcatacaaaataaaatacatagaatttttttttttttttttagatgagaagacagagacatatggtgtcaaccaaagtctatttattaaggaagacactattgactactagtgtgttactcacgtttgtttaaattgttccttttttttttttttgacaaacacgtttgtttaaatggttaacatcttagtttcctagttagcccaatgaagcttactccaccgccaaacactactatgtggagaacacgtcctacttatttactcatgtttagtttaatgatcctatagataaaataaaaagaataaaagtaaaaatatttgaatattttcgctattcattttttctcatcataatagaagtaacgtttggcatacctagcaactacagttccaaatttttgtataaattcaactgtttaattagcttgattaacagttgtatataaagattaatgttagagaatagagacacccgaaaattgtacaatgatatgtatttaatttttactataaatattaaaaaaaaaattactataaataattatacatgggaattatataatttttaattatgtaagtgagaattgagattaattaataatatagataatgtatagcaataattactcttaataaatatacaagacaaaaatttaaagtgtaggagtagcatatgattgcatttacctataattaacataaataaaagaacatataattacaacatcccaaaaaaaaaaagagagagataattacattctttcacaattttttattttctcgaattttcaacgaagaattctaaaaaaaacaaagaaatgtcctaaatttacaagaaaaataccttttaaaatatttatatataataaaaagaaaataggagatcattttgtatttctttatttatttttggaaaaataggagatcaatttagtcatataatctgaaaatagagagatatcagttaaaaatttatgatttcccgggtcttttgccaaagagctgacctcccaaccactcattgagaaaaacaaacaaactcatcaaaattagcagtgatttcttttctcttttcttgtttatacttgaggccaaacatttcattctctcaaccacgtttctatgcaaaaacagaaaatctttgccaacttctaaagcaatctcacttttttttttttttttttgcatttctctatctcattcttcaaagaccaaagcctctctcattttggtttgagagggaaccaattgtttttccaatatccaatatttgtttgcttaaactctaaagcaactccattttttccttttcctttctatattttcttttgttgttgctgttgttgatgttattgtttttgccaatgaaaaccatcttgttgaagatataacaaccaaaccaacttggatagctcgaattcacaatggttcgggcattctctaggcaagaaagtgtacaaaaatcatcctcatttaagctaaagaaaatgtttgaaagcaacagttcagggagacatgttcagagcttcacgatggagagtggacgtgaaggacaggaggattgtagtggtaggcaagcaaggagccagggctcaaggattggaggagaccgaccggtgcaccatatgaacataggctcagcactcaaagatgctactttcaagggtccaatttcatgtttggataatattaagggcaggacagctagtcatcttggtaatttattgtcttcttcatattttgaatgtaatgagtctatgttatggaacaaagggaatgaatctttttggtttggtttcagatatggagaatatgaaggagaggttttctaagctgcttttgggtgaagatatgtcaggtggaggaaagggtgtttcatcagctttggctttgtccaatgccataaccaacttagcaggtactttaaaacttccttttggtttttggttcataaataaaagttatcattattgttgttccttattattatgcctttgtttccttgttgtgcattgcagcatctgcctttggagaacaaaggaaactagagcctatgcctgcagaaaggaaaacaaggtggagaaaagaaatggattggcttttgtctgtaaccgatcatatcgttgaattcgtcccttcccaacagaaatctaaggatggaatcaacatggaggtgataaatctctc

SEQ ID NO: 188072 - DNA, 1647 bp, Cannabis indica
aaatatctacatgatccatctcagtggaataaaatttaggaataaattttttcaaatattacatgaatttgctattcaagattttctattacattgtaagaaaatttgaatttgtactttactataaaaaaatttcgagtttctttaatgaacaggtcaattttacatgtatataatatgtaagattgagtaagaattatgctgtatagtgtcttttttcttaatatatgtgaacttatcatttaatcaaaaatatttacgtaataattaatctaaagaacaagacttgaaaaatcagattacaagtgaataattatggatagtgtggaataaatgttatcgaaataaaacaatatgaaaagcaaaacattctcattattagtcctcataatcaatcatttaaacattaataaaaatctaaacaaactcattattttataatgtgcacgcatcgattctcctcttataaattaaaatggcagcctctaatattgtccaaccaaccaaattaatataaattaaaataccaaaagtcaatcactttggtaaccgagcatgaagacatatacattacaaacatgtccacgtgtaagtaatttggtatgccacgtcatacaaatcacacaattaatttataattatatatcgtaatcatagtattatgaacacaacgtgaagagctctacttaattgtcaattacaacaacgtgcaggctaccaataataattacatatatatataaactcgctcactaaactcaaaaatgagaaacttagaaagccattaacaatattgagttattatagtagtgaacatcatgaggaccaataatatcatcatactcttcttttccttattggtagtgggaattgctcatgtagaggcaagtgcagggtataattatgcggacgcacttgataagagtttgctgttctttgaggcacaaaggtctggtaagttaccatcacaggaccaacgagtcaagtggcgtagtgactcaggactcagagacgggttggctcaaggggtattatataatattctttttttattgttttaccatgtggccaatgattgaaggacacgtgtcgtgtatgtatatattgaaagatttgttgtggtttttgattggtgcaggcggatttggttggagggtattatgatgcaggggatcatgttaagtttggtctaccaatggcgtttactgcaacaatgctttcatggggagttattgattttaggaaagaaatcaagagtttggaccaaatgggccatagtttgtgggccattagatgggctactgattacttcatcaaggcccatcctaagcctaatgttctttgggcacaggtaacaccttttttgcataaaattacttttttatttgaaaaatggcacaatttaacaaaataatgtctaaggtgggagatggggactcagatcactactgttgggaacgtgctgaagacatgaccacttcaagaacagcatacaagctagaccaaaaccaccccggttcggacctcgcaggcgagaccgccgcagccttggctgcagcctcaatagctttcaagccctacaactcttcctactcaagcattctcttatctcatgcaaaacaggtatataatatagaaatttttaca

SEQ ID NO: 188073 - DNA, 4113 bp, Cannabis indica
caaacagccagccaacatttcactccattctaataaggaatggagatcatcttccaattcctgaaaattcctatgattacccataaacccaaaactcctaatatctcgctgagaaccaccaaggccatccatctggtgcataatatcctggaaatcagcacttcacaccaaagataagtcaaattcttgtaacattcttgaccataagatgccagcgaatgggcagtgtacaagctagttccagtagtagtttgcacaaagcacgcctccaactagaataattgcatatgaaatgttgaaattccaattggtgaaagatttttaaggaaaataaagtccccgtctaaaaaagaaaatttgcttgctctgtcctgctgctctcatttgctcttaagctacttacaataatatatatatatatatagatatatatttcttttgacaaaggttacttctctcactccttgtatcttcccaaaatcaaatggtttatttgttcctaggctttaatacatgcatgcttaaaaaaaaaagaggtctggtttaagttatttagcttttgttggagtatatatactccattacacggacttgctgtccctcaatttgaaaggaggcaaatgggttaaaggctattttctaggctagaatcttctttgaagatgtagagagaaatgttggttgcatttgggttcatgaaactagacattaggtagctatttggttatataacatgtctaagaattcaagggcatctcattctcttatttcatcaaagacgagctgtttatttgtaatgactggtaatatttatttctttgtttgttttctggctgcttcttttaatggttgcttccactcacgtttttctcgtgtatcatacaggtcaatattgtctacactctacaggcaatttaatcaaatatgtaccatccaggtcaatattatctacaggcaatttttcttcatatatttaattattataaatataagttattattagcaaaccatttcaaaaaaaaaaatggaagttattattagtaaatagtaaaatatagtactttgacgtgtaatggaaaatacacgcaagaattgtggatttgcagaatttttacattatgtgttaattaaagtatctcagctcggcagtaaagtgacaagtaatttgtttactaaaaatacccaataaaaacagaaagcagcacagcacagcagagattagatttgcatcgtgaattgtaccttacctcattccacagtcagaattgaaaccgtgtgagattgtacgtaaatttccactttcttatatattggtaagactactccatctaccattcttcatctttatctttctttaactatttattttattttattgaaatgataaaaattcctacagctctatattatttagctttttttggaaaaataacattttttataaatttttaattatttatagctatttttttactcagaataaatgttttgttatataaaaaaatatatataattcataacgtgtgcacgacgtgtatagccatttatatatgaaatgatagtcaagagtagataaattacaggtaaccgggtgagtctgtcatgtataaaataaacaaaaaataaaaataaatagtggaaatggcggtaagtgaaagtatacctggttttggtggttgactgtagattctgttaagttaggaagattgaaatgaccgccgtacctttttccctcaaacttcatcttcttcatttttgaagtttccaatctcaatctgaaattctcaattcataatttattagaccctaaaaggtattttacattttcattttcttttcctgtaactatattatgtttgatccttcctcattaagaatcccatttgaatctctttttttaatgatcttttattgagaaagctttctctttccttttcttgctccgaaatctggaatcaggacgttgtgattcaatttgaattttgtgtatgtatatttgattgatacaggccaaaatctttgttaggtactataaatttgtttggaaatggataattatggttcttcgtacccttaccaaaattcaggctatggataccctcctaacactcctccaccagcatcacaatacccaccctcaaattcagatccgtacgcccctgctccatatccacagccacagccacagccacagccacagccacagccacacccatacccatatcactacgccccttcatattcattctcatctgcatacccaccgccaccattttcaaactcacattctggccctttagattatcaactccctccagctcccccttccccatcccattcacacccacctcatcattcttcttccccacttccgtatccatatccatatccagcttcagctcctccggtgaccccaagtgctcctgggcctcaccttcaacaccatggaagtttccaacatggttcaggccactatcactatgaacaaaccggtgggagttacccacctgttgaaaacccagccagcttcccacctcgagctaatagcttctcgaatcatcataggcaggagagttatagttcagtgggagttgggccatctacaaatcatgatgttgacaatgtaccggcgtcttctgctagccactctgtttaccctcctttggatgctcttttgaacaatgtgcatttgtatgataaccgtccaactgctccagtgttacctcatgcgcctgcagtgtcacccttaataagttcacctcaaagtgctaagtttgaaaaccacggggagttttatggatatcctaatagctcattttctagtaattgggagggcgcttattctgatcaggttgcttcgcctactcactctgtgtattccacttcaacctcattcaatggttcgcaacatagtcagaatttgcagattgtgccattgcaaggtaaaggatccttgaaggttttgcttctacatgggaatttagatatatgggtacatgatgctaaaaatctgccaaatatggacatgttccataaaacattgggggatgtgtttgcgaagttgccagggaatgtgaccaataaaattgaagggcacatgaagaacacgatcactagtgatccatatgtttcaatttcagtggcaaatgcggtaattgggagaacttatgtgattagcaattctgaggatcctgtttggaagcaacacttcaatgttccagtagctcataatgctgctgaggtgcactttgttgtaaaagacagtgatgttgtagggtcacagctcattggagttgtggcaattccagtagagcagttatactcaggagaaaaaattgagggagcttaccctatcttgaatgctagtgggaagccatgcaaacccggagccgttttgggactttcaattcagtacttcccaatggagaagctgagcatttaccactctggagtaggggcaggccctgattattatggagttcctgggacttattttcctcttaggaagggttgcagagttacactttatcaagatgcccatgtcccagatggagcccttccagatttgagactagatggtggttacacatatgtgcatgggaagtgttggcaggacatttttgatgcaatacgtcaggcacgacgtttaatatacataactgggtggtcagtatggcacaacgtcaaattagtccgcgatgatagttatgcatctgattttaccctgggggatattttgaggtccaagtctcaggaaggagtgagagtgctgctacttgtttgggatgatcccacttcaaggagcattttaggctataaaactgtaagtatcttatcttttattgaattggtttattatactacttcagttcagggatttgggagtttatacttctccttgttatggcttttctcttaacacagtagttattattgtgatatgttgtaatattaaaattggaaattccttgttcaggtgttattatgaattcatgaattttacttttgaatgataaatgacgtagttagtcaccatatgtggtagctcagtatgaatgagtatcagatttggatgaattgaaaggtaacagtatgtaagagaggaaaaatgaa

SEQ ID NO: 188074 - DNA, 2862 bp, Cannabis indica
gtgtcagctcattgtgaaaatgtatgataagtttatgaacaactaagcttaaaattagaggtcttaccaagtataaatagtatcaaatatcggtaagctgcaaggagaccagaaaaagaaaacagaaaacacagattgatgaatcaataatatgcaagaacataaaagtttttaaggcacaataaatgaataaaccatgtacttactactaaggtcttgcaatatttgatcccacaggcctgcattttttttaattcaaaacaaccaaaaataagttcaaagattattgctttatgaattccaatgaccaaagttaaaagactaagaaaaatacttattcggattggaagtggagtgattcctggaatccatgaaagcttaaacccaaaagccatctcattatgaatatccatgaatgaagaagcattggtgttattgtttctatgctgagatactaaagtcgttagctttacaccacatgatttatccatgtccgaaacagtcaagctcccattgactattacataagaatggtttttgtaaccattagatgagcaagaagaagtgtctatataaaaatgggatttgactgttttttcacaactcacgaaaaccagtgtctttgacataagcttcagagtccaatctgtgctccattgttgaagctcatatgggtcaccctgtctgaagttgtaccttgaaatagggtaacgagggagagaagagcaattgcccttttgaattcctggatcaaccactcttatggtacggttaatgtaattgattgcttccactgagtattttcctgagtagaggtttagtattgtgatattgttctcgcaagaaagaacatacctttggtctccacagctttttggatcggattttaggctaaaagggtagcttatattcttgattttgccacaggaagaaggtgaacattgattgttttgggctctgcaattgaggaaaaggaagaagaagaagaagataaggatcaagaatctaagatgcattttgttttgggtctggaaagagccaaaggaagaagagttagccataatgtgtatatacattttatcaaaaagagcagcttgatctcgttgactaagattctgtcaagttggaacatgttccacaactgagctagctaaataatgctactaccataaaactcccatacattgtacctacccattaaagtttgactattctaattttattttactcaaatacccatcaaccctttactagtttcccatccactcatctttatcgataaccagaacgagaaataatgatggggtttctctcaaaatctcaacttttttggtcttacactctgtttttgcttctggtgttgtccattaatattgaagctactcaaacacagtgcaaggaatcaagatgtgggaatgggccggcaattcgattcccgttcagagtcaaagatggtcaaccaaatcactgtggttaccctggctttgagctatcttgcagagggaaacgtacggttctagagctgccaaaatcagtaaagctgtttgtgaaaagcatagattacaaatctcaggtgataaaattatatgaccccaatgattgcctttttggacagcttttaaagatcaatggtttatcagtttctccattatatttcgcaaaatttgaacttcgtaactatacaatgtttaattgttctgttttagaaagaaatgctctatacggcctcggcatggagtttccctgcctcagtggccctgatggttaccacgttattgcagttgaatcttcctccaccattgaagatgtgcctttggcatcttgtaataaaatgtatgatattatgtctgttcctcatacactttatgctgttgacagaaaatatctttatatgaattgggctaaacccaattgttctcgttgtggagtattgggatatggatgtcgattaaagaacaatgacaccaaaagtgaaacagagtgttatgcatatcctaaaccaagtaagtcacttatatctttttttttttttgttttacttaacaaaagagagaaaaatgaaagaaaatgatcaaacaatagagaaggagagcagtatttatagagctctgtgtcgtggggttctatctcaaaatcgattggtgatgagtggagtagcccatgttcttatatatggtttaatactttttacatttaatctatgtgggacaatgttcaccaataagctttcaagtacaaaagattaactacttataacagaactagttacaaactaattaatagctgttataactaacaacaacactaactaactgaacttactgctattatattcaatagttttgatctatttcttaatcacaagatcttcattgtattgtttgcaggtcaaacaaagaaatttgtaactattggtgtaacaattggtactgctgttcttacactgctacttgttgtggcttatcgagcttacaattctaataagcaagagaaagaaaatcaacggagaatagagagttttttggaggattacaaggctttaaagccaagtagatattcttattctgacatcaaacatattacaggcgagttcaaggaaaaattgggtgaaggagcctatggtgcagtatttaagggaaagctctcagcagaattctttgttgctgtgaaaatccttcacagttcaaaaggaaatggagatgagtttataaatgaagttggcactattggtcgaattcaccatatcaatgtggttcgcttggttggttattgtgctgatggatttagaagagctcttgtttatgagttcttaccaaatggttcacttcaacagtatatatcttcaccagattctgatcattt

SEQ ID NO: 188075 - DNA, 4938 bp, Cannabis indica
gagagagagagagagcatgttcatgctttgtcggccatgacatcaattttctaagctctcattctcttaatattcttgtcaaatcacacaaagtgggattttctacaaaatcatttcgtgggagaaaataaccactgaccctttttcattttctttatcatgatcatcagaaaagtgggaaatgttttgcactttcatttgtatagaacaaaaccaagatttgtactactactattactactattcaggccactgtgactcttcttgttttcttttcaatcttagtcagagaccacagttttaccaagtaaatatacacctgagctcagtttgagttttcttctcttggtggtgattctcaaaaactaaacttgaatttctattgatggattctctgtctctcattttggtgattgaattgtctattaagacaggtatgtaaaacctgtctacctatttgagtcttctttatatgatgaaattggtttttgaagaacatgtagagaaaaactttttgtgtttggtagccaattaataattcatgttgtgagaaaaatcttcttacaatgagtacggagaaaatatcatgcaatttgttgatcactgtacttattatggctacccttctggttgatgggtcagaggggcttaatgctgagggtgaataccttttagatataaaaagaagcctttttgatacatttaatcatctgggtaattggaatcctcatgattccacaccttgtggatgggaaggagtgacttgcagcaaagactattatgaagagccagttgtgctgtttcttgacttgagtctaatgaatctcaccggtactctttctcctagcattggtggattggttaacctgactctgcttgatgtttctttaaatggcttgtctcagaatataccaaaggagattggaaactgttcatatctggaaactcttaatctgaataacaacaattttgaaggccaaatacccttagaaattggcaacctctttcatttgtcaatcttgaatctgtgcaacaacagattatctgggccttttcctaaagagattgggaatcttgctaatctaacccagctgattgcatacactaataggctaactgggcctttgccaagttcttttgggaatcttaaaaacctggttactttcagagcaggagaaaatgagatctctggaacgcttaccctctgagataggtgactgtctaacttgcagttgctgggtcttgcacaaaatcagctgactggagagataccaaaagagattggaaagctcaaggaattgactgctttgattctttgggataatcagctctcagggtttattccaaaagagattgggaactgtaccaagttggtgactcttgctctctatttgaacaagcttattgggggaatacccaaagagtttggaaacatggtgtcaatccagaagttatacatgtacagaaatcaattaaatgggacacttcctagagagattggcaacctttcacaagcacttcagattgacttctcagagaaccttttgactggtgagataccaatggagttgagcaagatttcagggctgacattactatatctatttgaaaaacccaattttgaaaggccttattccaaaagagctcacaagattgaaaaacttgacaaagcttgacctctcaatcaactccctctctggtccaattccagctggacttcaatacttgaaaaacttgattcagcttcaactctttggaaattcactcactggcatcattcctcagtcacttggattatatagctcactttgggtggctgacttgtctgaaaacagcttgacaggaagaattccccgccatctttgcagaagttccaacttgattttgttaaatctggggtcaaataggctcactgggaaaatcccatctggggtcacaagatgcaagtccttggtgcagattcgtctagttgggaacaaccttacagggaattttccatctgatttatgcaaattggtaaatctgtcagccattgagttggatcataacaggttcagtggtgccattcctccacagttaggccactgcagagctttgcaaaggcttctgctgtcaaacaactacttcacttctgagttgccaagagagattggcaaactttctgagttggtgatctttaatgtgtcctcaaactctctttctggaaggattccatctgagattttcaattgcaggatgctgcagcggcttgatcttagccataacaactttgtcgatgatttgccaagcgaagttggaacactctcacatctggagcttctcaagctttctgataatagtctttcaggggagataccagtctcaataggaaatctgttgcgtttgactgagcttcaaatgggtggaaactcattttatggtggtataccagctgagttgggctccctttcaagcttgcagatagcactgaatctcagttacaacaatctctctggggagattcctccaccacttggaaattttatcttattagaaaaccttatgttgaataacaacaatttgagtggtgaaattccaagctcatttcagaatctctcaagtttacttggctgcaacttttcatacaaccagttaaatgggcctcttcctgatttaccactctttcgaaacatgtcagttagcagctacattggtaaccaaggactttgtggtgaccctcttggtgaatgcaaaacaacaccatcttctctcccatttccttcagatatgacaaggtcaggcaaccatgttggtaaagttattgctatagttgcagcctccattggtggtgtttctctcattctaattgtggtcattatctatgtgatgagccgtccagttgacactgttgctcccttgcaagaagataacaagacattgtcttctacaacagttactgatatctacttttccccaagggaaggattcactttccaagacttggtaaaagccacagacaactttgatgacagatttgtaattggaagaggagcttggggaactgtctacaaagcagttttgccattcgatcgaaaaattgctgtcaagaagttagcatcaaacagggaaggaaacagcgtggacagtagcttccttgctgaaatccaaaccttgggacaaataagacacaggaatatagtaaagctatatggcttctgttaccaccaaggctccaatctcctgctttatgagtacatgtcaagaggcagcttgggagaattgctccatggagctttctgcaatcttgactggccaacaaggttcatgatcgcccttggcgctgctgagggccttgcttacttgcatcacgactgcaagcctttgatctttcaccgcgatattaagtccaacaacattctgcttgatcacaactttgaagctcatgttggtgattttggcttggcaaaggtgattgacatgccacaatccaaatctatgtctgctgttgctggttcatatggctacattgcccctggtaagcattcatcaacttgtttttggtccaattttctctacactcctacatttgcattggcttattatgctcattctaattgctatggtctgcaattgtctaaatttcagatatataataataattttagaaattggagggcgtttttcataggaaaaatggcatgttttcaaatttttaggacctctaattagagacatagtatcatgtttttaatcaaagtgtttttggtctaattctttctacatgcttatacacttgcattggtttattattatgatgattgtaatggctatatctgcatttgtctaattgttatataaaatgatatttataaaaaattaagggcattttgtattaaaaaaatggaattttcaaaattttaaaaacattcaattaaagatgcagtatcatgtttttcatcaaattgtttggtctaattttttgtacatgctcatacagtttcattggattattatgcttatgctcattgaaaattacttgttgcctcacatcatcaatccacagaatatgcatacaccatgaaagtcacagaaaaatgtgacatctacagctatggagttgtccttttggagctgctcacaggcaaaacaccagtgcaggcaccagaacaaggctgtgatcttgtgacatgggtgagaaactacattcataaacactcagtaacaccaggattactcgatgatcgagtaaatctagaggaagaaactactctctcccacatgtttagtgtcctcaaacttgctctgcattgcacgagcttgtctcccttagatcgcccaacaatgagggaagttgtcatttatctcactgagtcaagtaaaagagaagggacaccttatgtgtccccaactcttgacaatactaattgaaaataaaagaaaaataaggatcaaccaccttttattattgcatataatagtttgtactgatttttgtccaccagtatgagtcttaattaaaggttcttcactccatatctgtgtatgatatatacatatatatctatatttatatatatatatatataatatattcacttcttatggcatatgagtcagtagggtctcatttccttgtattataaattaaaattaaaaaaaaaaattgccaagtataaagaaaaccaccatgtatattgtctgcattaagttgcagttgatgtttcttctatttcattttttatttttatcaattatatttatgctaatttattaatttaaatcttatgttctagcataaggtaaagggatctaaagtgtatggtatggattttttatcttttctttttcaataatggatatgagaaagcaaatttatgactcaattaaataattgggttggcaataattacctaggaacaaaataattttgtgactagtttccttctttttttttttttt

SEQ ID NO: 188076 - DNA, 2112 bp, Cannabis indica
caatagctagatttttttttttttcctttcatgtccctttgcagtgggttctaattgattctcttaccaaattaagattgtgtttcctttttgaattgccataatcgagttattactaaaaaaaggagacatatttaatatagtttttgttacgtggattaggaaattctatggagctttactacccaaaaagcttattaatttggcataggtcattcttttcttcttttttttttaagtatggataacctagggcattgccagtggttatataaccttttttaagctaatactaggggaggttattatacagccatgttgattcaaaggaatggtttttttttccttctttcttttgaatgggatacggaagaatcgttgacctgaagttgcgaatggtgatgattcagagcagttttactactgatacactctcacgttcattttttttgttggtaattttatacgtgtaattagcttatacttattatgtgttttttttttaatggaaaatacttattatgtgttttttttttgaatggaaaatacttattatgtgtttttttgtgtgttatatgtgtaaaaattgtggcctttgtagaagtacatacttaaaagttatgatacttgttatcggtgctttttattgcattgacttaaataatacatagtccaaaatcatgcaaaggattgcaggaattttcctctaaaaataaaggggaaagtttgatttcttctttactccttgttatcaaacttgattttattccaaaatagcttgatacaagtggaatgcactttaaagactaccttaagcaggctctctatacgaccttttcaatttccttccttttaccttttcccccctttaaggtaactacgtgactactatgactggagcaatatcaacttttactttcagtttggactatggagtgggtgtggaagctggtatgggagattttctcaacacatggaagtgcaaattgaaaagaaaaggaagttatgacagcatttaggaatatgaatcttgaagctgctctatccaaggcccttttgcaggtagggatcaactttagttacctggctatgttaatcaacatgattttcaaggctaaactcactgacctttaaccttatgatcttattcttttcacaacatgctatgttttcattttaagccggcttagttactaaaccaagcttgagatttgaaggtagtcttttgaggactcaattgtaatttgtcaacccaatggccaaaattctttaatgctaattggcttgactttgtttacccatttgaacactcgtgctatgctttcagcactactctttcttttccaaaaagtagagctcaactcattatgatccagcccatatggttgatgcataggaattaggaacttgacttaagaccttttctttttatatatgtgtatttatatgtatttatatatatactttaacacgtatataattgtttgtcattaagctctaataaatttaatcagggatgggtttaaacatgatgaggtttgctgtagccaccttggtttggtcaatgttctgtggtaaattttggcagggcatgagaacttcctaaatatcatttattgagtctctttgtatttgtctttgtcatagctatatagaagaccagtcatttgagaaatttgcaaacacatccaagcattaaatgcaataaattaaatttcgtatggaaaggcaatgtgagatatgaaattaaatagggtaattaatttgtaatctgaacacaataagagtaatttaggataagaatcaagaggggaaactgagatggctgaggatgatttggttggtagtatcttcaccaccccactgcaactgttcttctagtttagctcattagtcaagaacaatccacattgtgcagaacctgcacaaattgagagtgtgtgttcatctctgaattagaggtgggttttgaataacattagagagcttagaaagtatgacttcactgaatggaggagtgctttatcattttttattctagttttctcatttctacatcacttatcacccactctcttcttctagatgtctcttcaatgcaactcttaacaa

SEQ ID NO: 188077 - DNA, 5374 bp, Cannabis indica
ctattagttttaggttttttttttttttttttttttttttttttttaaaagttagatttctattagtttggatctagtgaaaacctctacaaattgtttgtagatgcttgtggactcagttgtacacttgtacttgcattttttttcttttacttcttatggaaccctgaatttgtggattggataacggcctaactccaaaattaatttatatacgggcttgaaatttacccattcactatggtgactcaatgccactttgaggcttctaggtttttcaaactgaacttcccatgattttttgaattggaagatcttgggcgtattgggctgggaagctacttatagtcatgtgaaggatttaaggtaaaatcccagcaaatgacccaaattgtttactgagctagtgtattgttttactcttaaacatgtgcaacacagcaattcgactttattggttttgttagttttcctcttctcctttcattgtatgggaacaaatattgagattttcttgtcattattttgagattgatttcttagttaatattttgtacccatttatatttcatatataagtgccatgctggtggatggtcaatgatctttcaattttcatactgtttatatattacaatgaacatcttctatgctgctttaccgtgaggtgatatgatctacattctgatttgatggttaaattttgtagtcaaaaccaataattgatgatcactgtaattattgctttgcagcttacttgaggaagacagaaattaaagaaccaaggagtctggaagttaactgacatttgtatttattgtcttttgtcatttccgtattgtattgtgtatgatcaacgggagacattgctgctttgggcttgggagaaatgagtggaagtggaagaaaacgctcttcaaaatgggatttacgggatcagcctaaatttgaagatataaatgcacaagacgataattggcctggaaaaactggtagatcaatttatcaaagagaatcaggacatgggtggcagtctccagagcttgctgggagtaatggttcaaaatggtcagcattagattcaaatgatataagatccaagcatgattcaatatttccaactagggatactttttctggaagccgaggctcacataagaatgagaacattgataaggactgtaatagatatgtgtcagactctatggcatgggatgcagatgaggattatggtacaagaatgtctcctggtcttgatgaatggagacagcaacatcatagtcaatctcctaaaagtggttggagcaggtcaatgaggttggtttgattttgtgatcttgaaaaatgatatttccacatcctgaaggttttaaaaatgtctcaaatgtagcatctgttatcagccatcacgattcagattatataaatatatatatatatatatatatatatatatttatagggtgagataggcatagttcctttcattcagttccaagtagttagatacactccaatgatttgttaaagtgcgattcatcggccacatgtgaatcgatcttgttcccaaactaattaatgatatgattacatagttaatttgtcaagaggggtacagttaatatacatatactgccacattctattatctattggatctacactcaactgatgtgcttgggaatttactttcaggcctttagagttttgttaatatgtggctgttttagactctagcaagcttcctttctttgtacaataaggttatagagctgatttatgtcttgattgtctttctttgttgttgacattctcagggataggagtaggagtagaagcaggagcagaagcaggagtaggggtaggagcaggagccctgttcgcagcctcagacgggaatctgggtttcttgacagaagtagaagcaggtctggtgtatccaatcaattgtgtaaagattttactgctgggagatgcaggagaggtaataattgtccatttcttcacgaggatagtgaagcttatgaggattactgggacggcaggcacaggaaaggtggaggctcaaaatatgccactggtgataccagagactatcccttgagaagtggaagatctttcggactttgtaatgagtttgtaaaaggaaggtgccggagaggtgcatcttgcaagtttgagcacggtgcttctgatggattcagcaaagggcctacgaatgaatttactagagaaaaggaaagtgacagaagaagaagagatacttctgatgagcgaggtgttgaacatgaggcccgcaggaatagtgatattccatgcaggttctttgctgctggaaattgtcgtaatgggaagcactgtcggttctctcatcataatcaggcttatgcaagtcctgacaggaaatcacaagataagtgggccttgggtcgcaaatcagatgatgtcaaccgggtttgggatggtccaaaatggagtgatacaggtattgcattagatgctgctaagtttaaggagaacataagtggaaatattggtgctctcaatgcaagctctactgcttggccaatgagtgagagattgggaaaccgtgtgaacaatgagaatattactagtggtgctgacttaaatgttagttgtgaagctgctaaaaatgataaagaacccattccgtggaagacaaataatgtggcacctgccatgggtctctctgaagtaagatgtactgataaatggcttgttaatatggacatgtctccagattggaactattcagtcccctcagctaatcatgttgtgaaagaagaaaatagtcgtgttactcaacattcagagtccttgaatgatatgcatgtaatgtctggcaagcagagtattattccagaggcttcaggtcgaattaatagtgcttctggtgctgtacaaccaattataatggaaaagtctgtttttcaaccaaatcatgaattgaaagatgacagtgctatcgcattgccatatgataataatgatgtagttagaaaaacaatgaattctcgttctgacctaaatatgtttgatcagaactgccagccttcaagtgtttatcctttttcaagcttgaacacaattggggaaagtcaagcagttatcccaactgaacctcaaggaggaattctgaaaaatctgcaaactaacacaacacatacagagggaacccttgttgcgaagccagatttccgggaagcaaaaacatcactaatgaattctggaattgatccattgcagaggattgtaaatgttactgatctttcagcttctttggtgcagttatttggaaatgggcagcaacttccacaactttatgcagctcttaattccaataattcaactggcaccccttcctttaccagtggttcggttactcctactattttgccagatgctgttagtgggccacataagcattatgatcctatacatgatagtacagaatctagaaggcctgaagtcagcaacaatacctcggcagttttaacaaataacaccgttaaggcaagtgattcagatggtaaacctgaaattcaattgaaaaatgtaacctcatcctctttgcctgttgtatcggatgccaccgattgtaaacaggctggtggttcgataggagaaactaaccttacaagaaaattgttgactccactagagccgaatgcaagttccaaggctaccaagggaaagattgaacaaatatctggggaaaacaagaaaacagaagaagaaagtataaaagtggaagaaactgatcccttggatggtgaagataaagagggggctaatgatggaaagaaaaacaaggatgcaaagggagttcgtgcatttaaatttgcacttgtcgagtttattaaagagcttctaaaaccaacatggaaggatggtcaaattggtaaagatgcttacaaaactattgtaaagaaggtggttgacaaagtaacgggtacaatgcagggagctaatgttcctcaaacacaagagaagattgatcactatctgtctttttcaaaagcaaagcttacaaaacttgtacaggtcagtcctgtaaaaatatttttttctttgtgtttacttgatatcttacccattaaatttatattcgttacttcaaagtaaatttctgtccacatagctgatgacatcagccacacattatcttatatcctagaaaatatagttgtcatagcttttttaatcttattatatttttattgtgagaagaattacattacttattaatgaccaaaattgaagattacaagaaagaggagggcaatgtattgaagtggaaagaaacaaaaatgcatgcttaacaagatcgacatgtaaattttgaattatgctgctaaacaaagtgtttataggactcagtaattaaagaagtcaaaggccataaattcctttgccactgttacccaaagagaagcaaattgttttttttccctcttacaaagattccctgtatggcattttccctttaaaagatatttgccagaaattttactataattcacatcatctattattactgtgctgtttatttatttagtttttcaatctagcacagctacttgtattatttaatgaaagagaaaatatatgagtgaagggtgcaggatacgtgcacctgaaaaagttgaaagaaaacaggaaaaggaaaaactattttactgctaacgaatcagacagaaaacagccactctctactgtgtttatattttcacacattctaatcccctaaattctctccctccgtttttttccagctctcttttctctacctcactgtgtgtacacatggcacaaaaacttcaccagtagcttttagtttgtcctttttggatctaacagctctaccatgttaacctgattttaaatatctatgattgttctttgtttattttcttcatccttagtgtgtatgtgcctcccctttggatggggatggtccggaaagttgtacaaaacaactttaagtttttttttttttaataagaaatgattaactggaaatatagaattagtcttttgctccaactctttctttctcttgtttattaaggaaacaatgaaatcttgtgggtggcagagtgggacttagatttaggatcttaaaaattgaacccatttcttgggtttaaccctttccttcagccactgtcgttggtcaccttatagctcatactcagattcaagcatttacttctatatgtttggcttcttgtgatatcaatttattgatgctctcattgccagttagaggtgcagtgtgtttttaggcagttagttatgtctacttgtcttcctttttagcttttattttcagttgcctctttttttatat

SEQ ID NO: 188078 - DNA, 5741 bp, Cannabis indica
tggatgttgattgacatataaaattaaccgattcaatcaaatccatacatatttataaaaaaataatatatacaaataatattttaatgtaaaaaaaataagtaatttaaaggtctaacacatataatacaattatattttcaatcaaatgtgtattctattcttatatataatttgtttctagatagaatttaaaataaaattaaatatttctttatacatatatatatatatatattttcttttgttatttgttattttatttattttaatgtgttgttagagacataaaataactataatttgttttatcttgttgctagttatgtgaaaaaaaatatttttttttcataaatattaaataatttaatattaaaaagtggcaaatctaaaataattgattcaatccgcacttctgtagattagattttagctattgtgcgtaaaaaaaataaaattcacacttagtgcggatcagatgcactatgaacaaaatagtgcggattggattgaatgaacactcataattatcattaatcaaataaatcaactctataagagtacttaaaaatctcaagacaaatatctttccaaatacaaactcttataggactagtaatagactttgtcaatgtataagcaacaccattaaaaacaagtaaaatgacataatataaaccaccatcaccaacagctaataaagaaataatataatcaataactatcacacaaaaagattgtaaactattcatatgcttatacacacaacacatgatgttttaatatctgtttttataaaatatcataaattaactataatataataaaaaaattgaataataattttcaccaagatgctaactcctatattcataagaacaaaaggcatgactctaattatttatttatttatttaatactcgtttatctaatttaattttacagtgtaaatgtgaattaatatgtagtattgataacattttttttttattttgtcgatagaaaaaatctctattggctaaatgagattatcaaaatttatggttttgatgcattgagaataattgttattattgtacctttgcatgatttgatgggagatagagaagcacaataagtaactgcaaaacaaaagaacaagccaaagccatcaattattttcttttttcctttttaatctagttttattaagaataccctgaaaaatttaatttttttattaaattatataaaacaaattcttttagcatgtaatatgaaagtgtcaacagtaaaaaaaaaacccaacttagtattttcttcccatgaaccctattggcatttttacttgcaaatctcagtaacatggtaaaactaaagtattattagaagaaaaatctcaagaggaatatcttctgtaaacatattattaattatttcataatcattgtatatatttatatacactttaggcttaatgacattcaaaagacaacaaagatatcatatcatgatcaacatacctataattcaaaagaattggtaatggtatgctttaaaaaatagaaaccaccacaatgtacaacactatcttatacatagatttatgtcttataatatctagtattatatatctatatactatgcaattaaaattttttgtggtgtacacttaaccgctggctacatatcatattcattattataatagttgtatgtaaaatactaaattccaagaagaaaatatataaaagatagaaatacataacatataaaagaaggtttttaatggcaattatggaatgcaaaacttaaaaagatggagtccagctattgggcccacattgggcctatagcaaatcaaaaccgtccgaatggcccatctttgaattttgccggcccatactggttcagctcctaccctttttaaacctcttccttctcgttccctgttttcccactctcaactctcttaccttcttcaacttcttctactctctctactggatccacactgttcaaatctcgccggggccacaatggacctgaccgtcgacgatctcgccgacgacttggacagtctaagcttcaactcaacgacgaccgccaccaccgccgtcgagacgaagcggagcacgagttccggttccgaaacgactactcggacgacgtcttcgagcttcttatcttcttcaattaagccgcacgcgccttcatccgatcctcgttgggaggcgatccagcgcatgaggagaaaatccggcgacgtagtcggcgttgtcggcggtggcgaagatctcggactaggcgatctccgattcgtgcacaggctggggagcggcgacatcgggagcgtgtacctggtggagcttaaaggcgggaacgggtccatgtttgcagccaaggtgatggacaagaaagagctcgcgagccgaaacaaagagagccgcgcgagggtggaaagggaaatactggaaatgttggatcatccttttctcccgacgctttacgctacgctcgactccgtccggtggtcttgccttctcacggagttttgccccggcggcgacctccacgtcctccgccagcgtcaaccggagaaacgcttcagcgaagccgctgtccggttcgtacaatttactctttttgtttttttatataaagtttcttactattttagttctcactgtctgattcatggagccagcattgctaatttgacactattccaaatttagacccaaataaaaatcattattaaatcattaataattagttggcaactataaaaattcatataatatataacactgtataatccaaacttttattattaatattgattttttttaaatgcattattggtaattgatttattctgcatgttgagaataaatatttatgatatatatttcttctttatcggaatataattatagtatgtgaagtagaagtatgtatcgatcgttgtagttttgttaaatggggtcagagggattaattgtgatatagactgtattttattgcgagcccacattgcttttggtgggtctcacgtgcactggaatattacatgtatattcattgctagctcaaaattagtgttaacaaattctttttaatcatccttaaataaattttaattaaaaaaaaacgactattcacatgaaaatgaagtcaaaactaattgtgatcttattatgttatatatatggagtgatatattttaagtttacgtagacaatttccttttgcgggattcttgggttgttgtttccatttttttcctatgcattttacattctctcataattgtttttttacgtacattaccaaaccaaaaaaaaaaaacagctgccctttacgtgattatgtgcatttcaacacggtggaccctgtcgtacccgatgaattttcaatttctttaaaattaattatttctttgactaaagtaattaaataaaaatcaattcccattacttagttctgcttactaccgctccctctaattgggccaactaaactcagtgtgggatccacctcgctatttacattatttaatcgtaaatgggctaactttttttcacactgagacgctcctttaatgacatttaattgaaattaatttgacttaattgaattctttaatttttgattggtgaaggttttacgcttcggaagtagtggttgcactggaatatctccacatcatgggaataatctaccgagatctcaagcccgaaaacgtgctagtacgaacagacggtcacatcatgctcacggatttcgatctctccttaaaaaacgataactccacctcaacagcccagctcatctccgaccaccaccgcgacactcctccggtcaccgcccactcgtccggcgattacgtcattgacccaccacctttcgccacgtcatcgtgcattctcccaaactgcatcgtccccgccgtttcgtgcttccggccgaagcgcaagcgaaaaaagaagctcggtcacggcggaccgccggagatcgtggcggagccgatggacgttcggtcgatgtcgttcgtcgggacccacgagtaccttgcgccggagatagtatccggcgaaggtcacggcagcgccgtcgattggtggacacttgggatcttcatatttgagctgttttatggggtgacgccttttaagggtttcgaccatgagttaaccttggctaacatcgtggctcgagccttggagttccccaaggagccgagtatacctggcccagctaaggacttgattacgcagctgttggttaaggaccctacgaggaggatgggttccaccatgggggccacggctattaagcaccaccccttctttcatggggtcaattgggctttgttgagatgtacgtcacctccttacgtccctcgaccggttaagtactctgattttgtccctgtcgacgaaaccacagataaagataattctgtagagtattactagtcaacaacgtacccttttaaaaaaaaaggatggggatcatgagaagataaggagaggttcactaatacaattagtttgtgattatgtatgtatattctcttacacaccaccaaaattcatatggagacaaaatcgaccatgtttattctaataaacaaattaacaacgttgctaatcttttactaaattgatagtttgctattagcaatgttgctaatttgttaattgttatggtttgagtcgagatttcctttccgatctcgcaacttgaaaagagcaccatttttgcattgggtttccaacttagattagagaaggggaaaaattggttcgagtgttttgcactctttaattaaattttgttgttgtggaacataattattgggaagggtgagagtgagaggggtatgtagaaaaatagatatcatattagtctatagcttgtcttattattgaaattattgatttgtatagtttattgtttgttaattgtgaattgaagaaagaagagttaaactcttattagtagttttgggtaagggtttgcgtggtctgaagccggcaatccacatggaaaagggcgtggcctcggttgttgacccaaattattaggctggaattgagattagttgttcccttcccttctaaaatctagattcataccccactcacatgcaattgtttttacttgagaaactatacgtacgccgtattataaaacgggctaaagaaagagaataatattcttttttctcaatcttttttgtggacttgtatcaatcacttgtagctacaatgtactaacatgtttgttcttttgtgtttgtcatttttctttttggtcttcatgtaattttgtgtgatacaatcaactttcaatttaacattctaaaatttagtatgccttttgtgttatccatatacacaatatttaacttaattttacaattaatcatcatcacattctatcttctctagtaataagaagtttatagcatgctttattccaagtaaagaaagagtaaaaaggtttcacgcctcatgtgagtcacgagatatgcccttctatttcatcgaaatttacgtgtgcagatactttatacatgctcttttttttttttggcctttgaccttttctttcataattttaaagtaataaaccttgtttctttatttgtctactcaaggatatgggagttaccaaatctaggagtaggagcatcaaaacttcaactgggctagttagtttcacgagatttatgaaaaactctagtttatagc

SEQ ID NO: 188079 - DNA, 862 bp, Cannabis indica
atatattatatcaaataacaaagcctcacacctttattaggagttcaaaggtttccacaaacaagtcgataaaattactaaacacgtattcccccacacaccacagctcaaaaagagcaactttactcgacataatatttaatatatcacccgtatgcattttaccattgactatatacataaacactcacaaaataatataagaaaaaatgaaataaacacaaggaaaaaataagtaaaaatttacagcaatgtagttcttcgatgtgtcgcgcagtaatataagggaatttcaaacaaattcaaatcgcataagaagctttacagatttgtacggttcacccttgcggtcatgcaaagcaactgcgcgaatcccttgctttagctctgatacaggtaggcatgcttggcctccaaagtcatccttctcggacatgtcgtattcatgaacttcaatccggagtaatgccagttctggaacagttaaaggaaatgtgaactcctcgttccaggccggtatccagttatcttctagggtctttgttttcttcatcactgtatcagcagttactccagcaattccaacctacatttcagttcatgaaatcatcaaatttgattgttcacaaagtttaaccaactcatctttataccaaaaattcaagtaaattcatgaagatcttggtgacagaagacagcaaaaatcagtgtaaattgtattcacttacccttgaataaaaatctggaggggaatatgcatcaaaatgtgtgtgctgaaaatcataataccatccttcacccatgataacagttaccttttaataaaaagaaactcaatatattagtcaagacataaaagaaa

SEQ ID NO: 188080 - DNA, 4240 bp, Cannabis indica
ttttttttttttttttgcttatacaaattaatgtataagaagaatttaaaaattactattttgcaatttttattatattcaattgtatatatgaatttttatccaaaattaatactaataattagtatttttgttcttaaactttttacactattaagttgtgccttttatagttacgacttgttaataatatctcataaaaatataagttttacagcaacatattcattctatcacattttatttaattttatcatgaaataagtgaagtgatagatgatagttaataaatgaatgcaaattaaatattcattcaccccttttacgctaataaaaaataaaaagcgtgaaaagtatttaatttgcatctatttgaatagaatataatggaaagaataagttactctaaaagttatatttcaaaaagcattattgacgagacatatactataaaagcacaatttagtagtgtgaaaagttaaaggcaaatatattaattattctaaaaaaatataataagaatgagagttttaaaaagactaataaagatttttgacttctaaattttgacatgtaatataataaatgaccctaaatttttcaagtcattacaaatttttcttaaattattgaaattattagaattaaataaattttgtgttaaatcaacagaacagaaacagaagtatgatgtggataaaagtttaaagattggtacatatcataattcgagagacacgatttagtagatttaaaagttcaaggcataatttaatacatgaataatcatcgtattaataaaattgaagaaagtgacaaaaatctttaaatttaatgatctcaataataaaaaaaaattaatgacctaaaaaattcggtatatgatttaatacatgtgaaagttcgacaaataatttatacataacattaaaaaaaaaagcaaactagccatttaaaaatgagaaatgttaaagggcaccaggggtgtttagcaccctatcgcgattggttcaactaagtataaggtcccttataatttaatataataatttttagagagtattgctagcaaatcgcaacgcgacatgtggagaaggtgatagtgtgccttatagaaaaatatatttattccttacaaaaaaaatatagatagtataaccggttggcggggtttttgtagcagagcagtcggaagagaaaaattcagatctgttgcttctcaatgtcaccgataggtaatcactctctctccctctctcgtcattgctttgttctttgccgatttctgaacttttggttgtttgtgattcaaagcccaaaaggaattgagaagaaagacaaagaaatttgttgaggaagaggtggaggacgatggctggtggtggattgtcaataacggaatctgggcttccttcctttgctttgctgtttttgggttattggtgagacttgctgtttctgttcacccttattcaggtgcagcaaatcctcccaaatatggggatttcgaagctcagaggcattggatggagatcactcttaatcttcctatcaaggattggtacactaacagtagctctaatgatttaagctattggggccttgactatcctcctctcactgcttaccagagctacttccatggcctttttctcagattctttcaccctgattctgtttcccttttcacttctcgtggccatgaatcctatttagggtatgtgctctcacccattattgtgtgtgtgttaatcaacattggaaagtttgcagtaatccaagcaaggagccgtagcttaatgttgcattagttcttgtgattattttgctatgaagattctccttttttaatgttttttcaaaaacaaatggtaaaaaggaaatagtggattttttgttttgtttatttggggattgtattgtaactggcccattattacattgtttttccaattcaattttcattgttggaagaaaattttcatttttctttaatagtttttaatgaaagactggatttttatttttgggtggatgttattttttgcaggaagcttcttatgaggtggacagtgttatcttcagatgctttggtgtttttcccttcagttttgtattttgtgtttgtgtatcatacaggtcgaaaaagtagtcgtaaaactgagattgcttggcatattgcaatggttttgcttaatccatgtcttatcctaattgatcatggtcattttcaggtatagatttcaagtattacattgctgctttgaaatttgtaatttgtttctcattcttaactaatattttttcagtacaattgcatcagtttgggactcaccgttggtgccgtggctgctattctctcaaacagtgatcttattgcttgtttcttgttcagccttgctctcaatcacaagcaggtgctttttcaattaagctattgtatgttaagagatgactagatttatattttgctcaaatttaaattaagttcagttctcctgtatggatatttatcaaaattaagaaatatgtatatacaaaatcaccggactaaataatttatggtgattgagcttttggtagagaaaaagaagcaatgcacaaattaatattggctaaaacccgaatatgttgtgaagcaagccctttacaatgaggtttattcttctaatctttgcccttggcagatgagtgcatattttgcacctgcatttttcagccatctattgggtaaatgtttaaagcgttcaaatccacttcttgaagtgcttaaacttggctttgtggtcgttggaacattttctcttatttggtggccgtatatccattccatggaagcctttttgcaggtaagcatcaatttacttgagcaatgaatggaagacataattttcagtgattaattggactctctggtcattgccataacttacttgataatatagtcatttgcagggcctgtagggtggttttttatgcattaaataatatattctttcatgtatggaggcttttgaaattctaaaactctccaccattttggtttgcattggataaataatccacaaatagtattatgcttgctgagatcctgtagacattttttttgtcaggctgtagacactttattggttctattgtaaaatttcaaactatgaatttaaccactaatccttttgaaccgaacattcttctcctatttttcattcataattttatcttttgactttagtacccttctctggaatggatatgtttggtggtgcgtcataactactaagggggtgtgctaagttgcagataacaaatcttgcttattgctactggcattggactgtatttttttgcattgtccatgtgttgtggttctatggtcaagaatgttacagtatttcatagtatcttgggtttggcctgctgattgccttgccataatgttttgcagcagatggatatgatatgatttaggtagtttcaacatagattttgcatctgggagaaggtggaagacattatggatgtttctgttctggccaactttttggccttatgttatgttgaaaaataaacaataaaaccttttaagatgtggaagatggccttctttcatttggggtagaaataaatttttggggccttacttatcagacatcttcacaatttttattaatgccttttgttctgtctctatctacgtttttacttttgtctttgaaaatgcatgctaactattcccttagtagttgaccaaagttgttcttttcatatgtgttctttttcaatcttatacaggttctctctcgtctggctcctttcgagagagggttatatgaagattatgtcgctaacttctggtgcaccacttcggttgttatcaagtggaagagactgttcaccacaccaacactaaagctactcagctttggtgcaactatctccacttgtcttccttcaatgattcaacagatatgggctcccagcaaacgaggtttcctttacgggttgctcaatagcgctttctccttctacctgttctcattccaaggtcagatatttataatttctattttcaattaaggcttggcttttctaaattgatacacacaacctttttaaacacttttggcgcttttaattcacagtgcatgaaaagtcaattctgctgcctcttctaccagcaagtcttttggcaatagaagagcctttcctttataattggatcacactcaatgctttattc

SEQ ID NO: 188081 - DNA, 2537 bp, Cannabis indica
ataaattgagtcacatatcacataacattacgacttaggtactttctttgttttaaaacaaagtctttctcacatgaccccactcggccactcccatctttgtcgatctttattttttgggggtaagtggcacttcatatacttactaagaaattatatttgaagtttccttattcttacataggaagctctctatgaacccaccttcatggaacaaacattagtaacattatatatctatacaagacaagagctaaccaagttcacttgtactagtagtgctagtaccaacactaagtttattaaatcacatatggatcactctcctgagaatgatgacaatgttgatgactccaatttcgatcaattttccgagtttttgatgtttgatgagtggcctgatgaatttcatcatgaccaccccgcgatatctcagtctcagtctcaatctcagcctatgttgaataatcctgttacttatgccaccgacgaaatcggtggaagtagcagccaccttggtggacacaacactggtaaagctagcaaacactctacatagaatcattcataaatgtcatgtttttgtattgagtttgatttgtgtggtaattgggttttgttattgtgtatcaggagagaatgtgcaaagtggacaggaaagaagggaagttagagaaagagttgcttttaagataaaatcagaaattgaaatattagatgatgggttcaaatggagaaagtatgggaagaagatggtcaagaacagcccaaatccaaggttttcataataaagaatcaatcaaaactatgctgcattagtactaatttgtgcataaggattgctattttatacaaatcatttcttctaccttgctaccattatatttatatacatattgaaccaatcacctttattatatatgaaatttaacttaatcattacaccaaaattagtattaggtctataaatatcatcttttactacaaatatatgtcgtaaccaactaaaatgcacatacatttttttttcaagggcaactgcccacctcgcttctatgtgggtccgcccttgcatacatatgtgttaaattactaaaatacaccattagtgtctagcaccctctttagtattatattgttattggtgtaattaggtatatggtctcatataacttaagaaaatagcttttagataatatcgttaaataattatggagcgccacctatgaaaggtgctgggctgcccaataacaatgctctatgtttcacacatacatacacacagctttggattgcttcccgtttgagaaaaattatatatatgtataaattcaatcaattatctatatatacatgtagatgatttggaccaaatttaatataagatgttatgtaaatgcagaaactattacaggtgttcagttgatgggtgtcctgtaaagaagagagtggaaagagacagagaagatcctatgtatgttataacaacctatgagggagtccataaccaccaaagttccttttagttactctacttatggtaacctttgggaactaatgaaagtggaagattcaaacttggtaacaagatagtttagttttgtaaccaatctcttattcctcttcccttgttttatgggctgttgttgttgtagttgtatcagttgactacaaggttgaccaagatgcattcctctgcttttttggtacaagcaaagcatattagagtttcttatacttaccagatttgtggagctttgaaatctatgcactcattattatggggatgggttgcaaatacttttaatatttcctaatagtttctaagaaactaccaccattgggttctatgtttctacttttttgacaataactaaggaaagaaaatatctttattccaacttctagaaatttatatgattatatcctaattttcttcttaatataatgtttataataataaaaataaaatttaaatattagtttaacgtgtataaagaaataaatagattgtttgaattttatttcacattatactttattcaaacttttcaaaaataagatagtataactatgatataagtggttatataaaaataataactttataatttctccatataaagaaaataaaaaatgtttgtcttcataataaattctaacactataaacaaatgtaattcgtaatatatatgtgtataaattgattcagttataacaattaaacgcaaaatattcaatatgattatagaatgttctgttttaatatccaattaagttgaattggttgttgaatctaaaattaaatataattcaaataattagatttatgttgttatgtttaaaaaatatatgtataaaacacttatatatagaaaatttttattgtagagataattgttttgtcccatgttatgagaacactaagtggaccattgatttagcatagaaaataagttcatagttattcaaatgtattggacaatattgtcctagatcaaatgtaaaagtatagagtcatatataagaacatgggc

SEQ ID NO: 188082 - DNA, 5485 bp, Cannabis indica
atttgaaatgacattcggattacctttcaaaacacatccaataacaaaccgacacgaagtcaacattccgacgacaacagaacagaatagaataatttgaagattttgaagataataataataataaaaaaaaatactaaaatcgaaaatcccaatgaccattccatttccatttcattccaattgtatgtttaaggaatagaatattttataacactgattcatctctgaatcttactgactctgtcggactcactgttaaaaaaaaaacaacactaaaaaacataatattcaaaattaaaaaaaaaattaattactaatccaattaataaggaagctacattacattaattataagcttaactacttggaaactgttggtagttgacaagttctgaccaatccgcgtttgccacgtcatcattgatagttgccgctctctgtacatgaatgaactaaatgaagttaaattttaaactctgttaagaaaaatctacaatggaggctaattattattataataatttgaaaaataattgtatttgtagaataagaagaagaattagtagtacaaattacagataataattcaaagtcaaatacaattacaaacccacttccctcttcttctcttcttcaactttttagatatagagagctttctctctttgacttttttttttttctctttactttattttttatttttttcttctttttcatagagagagaaagaggttagagagagaaagaaagagaggggagatgaatgcggcgccacgccagcaacagcagcctcctcctggggcttcggacttggctaccggagctgcagagggaactgtaatgcttagaacttacaaggcttggaaaggaagcaatgtaagtatcatcaacatcttcttcttctttgagttttgatttgtttgagaaaaaattgagcttttttgtcttttgtttaaaggggaaagtggaaggggatcaaaagtttggggctttttgtttctttctcatctgggtttggaaaattctgatgttggttgtctgaaattatgtggatctttaactcagttttgcttagatttcaaaagggtctttgtggttttactttttgggacttgggtttttgttctagatttcaaatattggaaaggggggttaactgcagtttttgtgtagttgattagatgttttgggtgtaaaactagttgatttgaggttatgattgtttcagcatctttggtattagttcacacccttttgatgtgtccagtatgttttgcagaataggattttggggctttactgttttaggtgatttgcatggtattttagctttaattatttattccaaaaactgtgacaagttaattttgagcaattttatatttatattctaaggaagtttcttcattagtttgataagttgtattttccagttcttgaagattttctgattgttcatatttgcagatatttctttgtggtggaaggcttgtatttggaccagatgtaagatcaatcgcgctaactgtgtttctcatttccgcccctgtcgccatcttttgtgtctttgtagccaggaaactcattgatgaatttgaagatcactggggtgtatccattatggttgctgttattgtactggcagtgcttgtaagcttctttcattttccattataagtttcaaaagcattttccttctttctgcaatagaatatgttacaatatttgcattggtttgaaaagaagcccctgaaaactcttgtcaattaacatagaattcttctgagtttttcctacattacaagatgaaaatgacttccatattttctcatatcagttgtgtttatgttacaggatttgtttcttctgttattaacctctggaagagatcctggtataatacctcgcaatgctcacccaccagagcctgaagattttgaagggagcattgagacaggagctggccaaacaccgcagctgcgaatgccacgggttaaggatgtaattgtcaatgggataactgtgaagattaagtactgtgatacctgcatgctttacagaccgcctcgttgttctcactgctcgatatgcaataattgtgttgagaaattcgatcatcactgcccctgggttggtcagtgtattggactggtaattgacatagtctctcctggtattatgctatctaaaaattccatattagtagccttgtattaagtgattagaaatgtggaatatattgcaattttcacctgcatgaaacacaatcaactataactaaacttggtatgcaaatgttgtgatctgtaatgaaaatttgtggttagtaagcatactaaaatttcttgctttctatatattctcccttccttttggagcttgtgcatattatggtgcatctgaattgagttttcttgaatgtgtctgaccttaaaattttcttttgatcttggtgcagcggaattaccgtttcttcttcatgttcatcctctgtgctactcttctttgtttatatgtacaaggattttgttgggtttacatcaagaagattatgactgatgatgatgatgatgatatgacaatctggaaagctttgatcaagactcctgcgtcgattgcgctaataatttactctttcattgctttctggtttgttggtggccttaccttctttcatttgtatctcattagtacaaaccaggtaaccatctcaaattttcaacttgttttcatgctcatcatgtcaattcttgggattccatcttttttcatgaaaaagtttatagttttcttctgctataaacgttattgttctggttttcaatgtggttttgcagtcaacttatgagaacttcagatatcgatacgagaggcgagtcaacccctttaacaaagggatctttaaaaatttcttagagacattctgcagcagcattccttcatccaaaaacaatttcaggaaaaagattcccaaggacccttctattctacctcgaattgttgggggctatgaaaatcccataatggggaaagccattaatgacatagaaatgggaagaaaaccagtctgggatgaaggtgcagttcataatggtgattatgaagaagaacatgtcagcaacgatgacggcccagacaaggatcaagcgctgcacgacgcagatgtgtcaccagatttaagtagaaaccttccaacagaaagcacagagcgacgagatgtttcatactcaaggcgttctagttggggaaggagaagtggaagcttgaacatatcacctgagattcttgctttggctgctgctggagttggcgactcgaggcgtgtcactgaaggaaggaatggaactagttttccatcagagactggacaatctcggcctaattcttagatgtacagataaactgagagaagaggggaaaagagttggctacttataatgccagtgatgtaaagtttgggagttggtgttgatttttaactgctgtgctgctgagacaatcaaaaatgtacaaggctttgctctttatttttttaagacatgttcttggccttgtgcagttaattctttcgcaagcattggtgtgccattgtaattgttttatttgataagctcaagtgttatggtatcatattacctgcatgtcttaatgaaattgggattagtagcccaaataagattttgcttgaattaagaagaaaaaaatcaaaagaagctaataaacatagaaatggactttatttgaatatggaaaatcttaaaaaattataaggcactgccaaatttgaagaggtctaatattagttggtttctaagaaaaataaaattataacacttcaaaaattacaaatattttcatctcatttggctatgacaaggcccaaaagaagagggatcttccaattgaaaatagcatatcaaaactcttccttcaacttcattacatgttctggaaacgtttcatgatgatgacactcaaatccatatagcgccgagcacagtttgataggcaggtttgttcactgttgctgaatttgctccctggtgtaccggtgacacacttgtcccagcatacatttgtaagcttcgccaccatctcgttgagcatcgctctttccttctcttgctgtagaaagacacaaaaaagttgctaagccacagaaaataagattgacaataagagcagtaggaaagagaaagatcacaaatatcttggctcttttccaaaacaaatctaaaggtaatagaagacaccatattggttagacaagcttccactgcatattcctaaaatatagcttaattcattggtaattaatttgaatatagttcaacaacacaagttacacctccactaattaaatatccaaagttctgctatcatcattaaaaagaacatagataatttgaattatgaatattaaaccatcatagagcaaccaactgtgagactacaaaattctgaagcagtgcatggatacaaaattgaattttttagatactccaagtaatgtttttcgaaagaaagcaataaaaattcaatttcactatctcaagcacaaagaaaagtgaatctatttatgtccatatctacattgttttacaaataaatatctcttaaagaaatgagataaaatgtctaaaacttccatcattgtctcttatattagataactttcatcattttttttttgaatgagtatgaagctaattgacaataggaaatataaaaatgggataatctatatgaaaaaaaaaataattaaaaaaagggagactggggcttgtaagaacacatagttgacttccaaatatttgaattgaccacattgaatctacataaatttttaagcattctccaagaaatgtcattccaaatatcatatacatacagattattcattacctaaaattaaccaaaaaaaaaatacaaacagtgagagagaggaaaaaaacttcatctcatgaaacgacagctaatgtaaaaaacgatccattgaataaattttggagaaacccgattatgattccgcataagtaagtaaaaccccacaaaaagagagaaatttttcaatgcattatataaaagagcttcttctctctaccacaaatatgcagaattcaagttcatatcagatgttttcaattagcaaaagtactatataatatcttacgttgatgaactggagtagttcggggctgttaagagctgaaggatccatggcgattcgattaatgattagtaaaaccctacaatttttgttgagattttggagacgctcttaaaaccctaggcaaagagaagacgtttcatacttcggagccatgagcgacccgaacatcaaataagagactattgggtgggcccaaattctagatttgggcaggcccattatggtgtgtatttttgggagggattatttcaaaaaaaatacaaaaatatagaaatatagtggtatagaattttaagtatttaatat

SEQ ID NO: 188083 - DNA, 5404 bp, Cannabis indica
agagagagagagggtcgagttcgacggtagttttggtgacagagtttggtaagaaccagaaaaagggaaagagagaacaagagggaaagagagaaaaacaaatagagtttagagaaatgatttcgaaatgtgagataatttgggatttatagaaaaataaatacacattacaaattttacccaatactaatttacctaattaactttataatcaaatatgcatacaaaattaaatttcccttgatatatgatggaagaaatcagctttttcaaattttaaattgtccaatataatttggggagatggtattattccatacatattatattatttaattttatagttgttctatatggtggtgttagtgctagatgttaactatgatcctactactaagctcaatgttcattgtagaaaacgattttttatagatttaatcactaaataatattaatctaattattaaaattctatgacatgataattgcttggtgtaataaaaatcctacaaattatcacatatgagcaatgtggacaaatacacaattatggaccatcaatacagtgaaatttaagagtactaattacaacctcttattatggatcataataggaccatcaatacagtaaaatttaagagtgctaattacaacctcctattgcaatttcttagtcaacctccatgttcgaaatcacatacctaaatatttttttcatagcggtatttgttatagttacagtatcatctttgtatatttttaaaaaatcgaaatagtgtacagtaccagaaacataattcttaatattcgaaatatttcaaaaatttactgggatgttgtgagtataacgagcaccactaaaaaaaattgaaaaataaatatcccaacatattttcggatacgaaaattataataagaggttgacggtaacttcattgtgaacacatgaatcaaacctacctgctactaagctcaatgttcaatgtcaaaaacgacaagtcgtttttattttaaaagacagtgcagtgaagtttaagatcaaagtctaatattatcccattaaataaaataaagatataagaaagaacgtacaattatgaaccgactcatattctttgtctggaagaacaaaaatcatggcacgattttattgtctatcatatcacgcattcacgtgggttacacctccattgttattattatttgttttaatatattttctcatttaaaaattaaaaaaaactggtgaacatgcacatcagcaccataaccgttacttttggtcaaagttgaacatatagtacattatataccattcgttatgaagtttgttgagttgtaccattattgttattttctattatacgtgaaaaactatgttatggttttaccactaaataataatattgcatctaaatgtatcgataaaacactatttgattaatccaataaaagttaataatgtaacgtaatgcacactgattaaattagattagattaagtgggctaaaaaccaaaaacgagacagtcatgtcatgttaccaagaagggttaaaaaagaaagaagactgtgcaacaattggaaatagtccatgctgattctgatatcaaaatgtgatcttaaccaatacaaataatgttgtcccaatccaacataggaggcccctacaatacaaattcacgttaaaacttttcaaaaagcttcccacatcgatcactttccggttcattttaagcaccgttcatagcaccatcagcatggactgtgtttccatcttcaagtattttcccgttgacttgagttcgttgcctctgcacgcaatcaaaatattcacagtaaacaacagttcggaagaacaaaaagaaaagagttcagaatttgctcataagattcaaattcaacatacccaatcagcagggtcccccgaattcccgtttaagagtttgtggttctcctctttggttcttccgtccttatccttggcggtcagtgggagtaacagagatgcacctccactccgatcaggcaattctgtgtcgacaagtaacatagatcagtcagccaaggctcaattttttttataccctcaaaagcaaaacagaaagcaaaagattattatctcacctggtaactttttgtcaataaagaatacaaccaagttgacagtatacctgcagaagaaaataataataataagttttacatcaatacaaaaagctcgaaaagcgtaagaaagaaccgagttaacatagtacactgaattataatgttcataccaagcaacaacaacatcaactgtataatgtttgcgtgacgccacaatcaaaaagctctggatgacggcaagtaaccaagcgagctgctttatacacctgcaacaaagtgcaatcaaacgagcactaagaaacgagtccaacaagaaatgcaacattttgtttaacaaataagcatatcaacaaatatattattacctgcgagttccgtatttctgataggtgagcacaaagaccagagtaaagatcatgtgagatgaaaatatcaaatcaccacagccatatataacgcctcgaggaactggcacaagtgaaaagacgagtaagcatataatgctttaaaaccaaacaacaattccggaaactaagaaaagggtgtagctcacaatttaacaagaagacttcaaaagcactattgggaggaggcagcctggcaagctttgaaccctacaatacaagagacagcacatcgatgagttacctcgtgttaaataaatatgtatctaaaaccagaaatttcattcccgttacaatgtatacaaccaatccaacatacctctcggcaatggtaatttggaccaggaagctgggttgaatagaatgttaaaactcggagaatttgagaagcctgtggcagaaatgtaaaaaagccatcagaaaattttgaggatggattcttcaatataaactatacagaaattaatcttttaatttatatctgtatttaactcaaataatttttggtgtaacagagttaaaatgattatttaaaactgaagctaaaaactcaaacagcattattaattgtattagaatatcatatcatgcatcaaatgctacttctaaactggtctgattttaaattgaaccatctcagtagaaatcttctacaaaaaatataagaaaactgaattaatttcccaaaggcatcacttacaactaagaaagctagaaccctgcaccatacaagaactgtatagatctttttgctcttgaaaatgaaaggatggaaagtccactgcaacagcacaaaacataatatcagaaaaaattaactaaagtatgaactttactggaaatcactctagcataacatttcaattcctactaattaatttacaattcaaaatgactaaacaaaaattttatttaaggccatgtcaattatcaagaacactgaaatctaagactgaggaaaggcagctggcgactcaagatttataggcatgcctaagattattaaacatgtctccctgacaagacaaaataagttaacagaagcatataaagtgaaactgaaatcaaaagtaacattgaatacaagaagagaataaaccttaccaagaaaaatagacagaaagataaagctgaacaaagtctcactgatatatgctttgtctaacccaagctcctgtgtacacaaaaaattcaaaatgagaaaatatttttctgctgtgaaggtgttttatactaacccggttactaaaaacagaaactactgacagtgttgagacactcacatacatcaatacaaagatggtaagaaacaaaaaacatataatcaatcgatacatactggtagtactatgaagcccacatcctgaagtgttggccccggtctatgtatataatgaactccacgggcagccagaccatgtatgtactgtggacaaaaataaattcagacataagacacaaatattgatttagcaataccagaagaaagcaagaagaacacaataaaataaatgtcaacgtattaaaattagtgtacttatacattacaatcataaaaactcttaacaaatatcaattgattagagactaatgtaatatcacactagtggcatcacattgaacgacgcataacaaggtgggaaaattttagaagtaaatcagtgagggaatctaccatccagaatgtgaaggccattaattatgtaaacgtggcaatttacgtgacatgatgatagtaactttatctttgtccaaaagcatagatcttctctcaaactcaaaatactactacgtaacaaaccatgattataacccttcaacaaaacctactttagaaattttcaagacaaaaagccaacaattttcatgtgaaatggcaagattgctagtcctgcgtatcatgcaatctctgacaaacacaaactaaaacttgaacaaaaaaacaacccaatttataccagtttcaaagacaatcccaatcaagtattttctgacacaaattacacaatgaccagaagactctagctttcaagtaggctagccaaacctccacctctgacttctcacaaccaaaacattcaggaatacaaaatatattattagctaaattagagataagatgaaaaatgaacctgacaaacaagtccccctagaagatatttccaattctcggtaagaagattgagctctgtggctgtctctgcgcaaattctcttccatagcttcacaaacaaaaacgaaaatcaataaaagagaaccccaaatcaatcacaagcaccaaagagcagaaaacaaaactttaagcctacaatgaaaataaagaagaagaaaaaagaaactcaaatcccctccaaaggatagaaaagaccaacctttgacgactcgcgaccaatgtaaaacgacatcttctccttcctcttctttttcgtgtattaagtgtaaccaccacttccatattacttcataaccaaactctttctacggtcaacatcgctcatcaccaaattctcactaatatctttacccaaccgaaaaaaagaaacgaaaaagataaaagaaaacccaccgaaatcaatcaatcaatcacgagatctgatcaaagcccacttagcgattaagatcaaagaaatcgaagagagagtttgaaagaacaaaaaaggtaagaaactaagaaaagggtgtttgagtataggtacagaaacgcgttactatgaagaatcaaaaaaatcaaaccgtcgatacacagaaaatgatgaaaaggggtttatctgaatctgtttctccctgtgaaaaaaatgattcttggcttttgaagaagttgagtttagacgcgagttgaacacggacgaagcagttgagaattgggatttaaataaaatttgtatagaaaaaa

SEQ ID NO: 188084 - DNA, 1077 bp, Cannabis indica
tacaatttttttttacaacttataatctaaaaaaaataagtttaatatagtaaaatatttaagtaaaattcaattatttttattattttgttgttattttttttattattattttctttctagccgatggaacaacctcagcccatataataaaatataagagattttctaattaaatagaaaattaagcatataaaaactcaatttttttattattactcattcatgagtaatataaaattgcacctatatatatatgcaatacaagccacgagaaatgtccaaaaaggaagataattaacttatgtttataaatgagaaatgctaaaattcacttgtaattagtacttttataataatttttataaaatattaactaattacaagccaccacctacacgacactatttgtacttattaaaaatgttctttataaatagctagattaaatgattcatgaatacctccttaattatcaaaaaaaaaaaaaaaaaaaaaagaaagaaagaaattcatgaatacccttttaaattccttttattaattagtcatttttgacttcatttttgactgagacaaattgctttctcatcaagtcatctactttctcctcaagaaatcttcagcttataagtagagccgaataggcgggcaaaattattattcatcagaaaacttgatcatctcatctcatctcatctcatatattagatcttataagataagaagcattattatttaatcactttaatttctggttggagctggagcttgttgcgagagattaattattaataatgggcgatcatcatcatagtagtagtaaccttaaaaataataagaaagacaaggaaagcagccacagtagttcaaattcaaagttcaagtcctttgtgtcgtttttctttgaaacgacaactgaaaatacgaagagtagccgagaagaggtatcagcaccggaggtcaccttgattcatgccgcagcaaaacacttctcctcaaaagtgcgttataattaaatactacctcagtggtatcaatcatcaatgctacttattttacttaacttcatcttat

SEQ ID NO: 188085 - DNA, 1445 bp, Cannabis indica
agagatcgatgctattacaatatcatatatcaccaaaagtacaagaagaaaataaagaacatcttgattaattaattaattaatgcatagctagtattagctgcactatacttaatttgatttacatatggacctttttccacttgcaaataactacagcaccatcgaagctcatctcttatagagtacttgtaacaaaattttatttatttatttatttattataaatataatttttttgttggtttttactggtgatcagcaaagtaccagtggagggttggagcttgatcgacagaaaggaaattacaagagtcttctgagctaaacaaagtctgatcttccatcctcatgagctgaggttgacatattttgactgggaatgctctagagtagttattataatcagatatttgaatccaattctccatagtatttgagcaagaagaagaattagacccatttggccctagtgaatattcaagctttttatgatcttgatcttttgtaacaccattaatggaatcactgtcagagtagccatctttgcaggacttggcatagtagtttccataaatactctcatgatgttgatgattatgatgaggatgaagtagtagtaattgttctgctcccttataattataattattattattattatcattttcctgatgaaataattcacagctgactttactatgatccaaaccattgctttcatgtccagaaaatggtgactgatgatgatcttcttttacagattgactgctctcttcactctctgtagccaattttgtattcaactgtctaacctgaaattaataaagtttgcaacaaaataaatcagaaacatataacacacacacacacacacatataactatttatttataacattaaataatgttacctttttgttagaacatcattttgtttttgaagagcttcataagaaaacttcaaagagtcataattagccttaagaagattgtaatctttctccaattgtttagtcttccaacgagctcgacggttttgaaaccaaatagctacctgtcttggttgcaagcctaactcatcagccaacttagatttcctctctggctcaagcttgttttccatttcaaaatatctttccaatgccttaacttgatttgaactcagtcttctcttctttcctgtgtactcttcattacagtcttcttggtctaaactgtctaacatggcttgaaactctttactataaccttgattgtttttagtctctgccatttgttttttttttttaaaaaaaaaaatgtatattgtcaagaagttaattaataataatgtcagtagaaaattgaaaaatgtttattaccttttggttgagaaatggtgactagagcacccaaagaatctgagctattaaacctcttcatgacttggtaaaagtaacccag

SEQ ID NO: 188086 - DNA, 5347 bp, Cannabis indica
aacaaatttcactccaaaacttttacccatttacacatagatttttaccaaaatcttactttaatagccttgaccagtgtagtcaatgcatacattccataaaaaggtgggtccaggagaactatggtggaccttagtgcttcaaaagttgccacgtgttccatgcgaacgtattcttcggcactgaactgacactcacatattctctctctcatattgaaacattcattatttattcaaaaagttgctcccaaattcctctgcttttttagtattcttcttcttccattgtcggattcaaagagagcagagagagagaaagctttggttttattttttttgttggaaagacattaggctgtcaacatggctgaccagaaagacgagaaattacctgtcttttcttctttgaaagactctccctcagccatgaccaagaaaggagcatacgctgctgtctcttacatggtttctgcaggttctctcagccatttttctcttctgggtttttcttttatacatgcattttgctctacacttgtttagaggatcattatgccatttttctagcatgggtttttctcatattttgttactttaatttgtatcgtttttggtttgttctgttaattggtttttacagttcatatatatacgacacgatgctacgattgggaagtcattgttcttatgtttgaaaattatagatatgttagtcactgtgtgttttcatgtttgtcaaaaatgttagtaattgttttccctttaaatataacattttgtaatagttaataatttaacaatagtgaattttgtgagattcagaggcctttttgtgcctgctgttagtttgtaaattttggctttgattattgaatatctttcttgataaaaaaaaataaataaatagtaatatcttctagtgaaattgggacatctcaattatgtaattatctagttaaaggaacacaccaaaatttactaattactctgaaagattgtatagggtttaagctagagggcaggaagataagaataaaataagtagatgataagaatttttagttgtcacgctttgtttgttatgtgataaaaagtaggagataattattcattatatatagttttatatattgggatttgttatagaagcaaatggcaaagagtggaaagaaaggattttgaggaatgggttttgactgggaaaggcacatcattatatagtacttaaagagataaagtgggggggccatggaagagcaaaaaggtgtttatagtgggtttaagatgtgaatgagagggccacaaataatagagtttttctacaaaactaacaagtagtggagaaggttttcaacttttttgattataatgacatgactatagagtacacaaaccgttgtttataacacttcgatgttgggaatgttgagaaattttgtctttcagctctctagccttcttatatatatatatatataaatagtatatatgtactatatacgtatctgcatgtttgtgtatctataacttggtcaaaattgagtattattgtttttattttttaggtagatgatgatagtacagctcaagtctctaccttacttaaacttgatcatcatctgggtttagccattgctaagtttttttttttttcattttcagaaaggttggtatcatgtattcaatgtgaatatataacactacattactctatttctctgttttgcagttctcttggtactattcaacaaagctgctctgtcttcatatagattcccatacgcaaatgtcattacattatttcaggtggctcattatcctttactcttagtactcaggaatatacaatacagtaaaatcaaatttttaaataaatattagcctattttacaatattttattacaaagttagcttatcatcacatttctacacctcccctcctttgatttaccctcactttattttggataaaatggcacacccttacaaatatttatatatattctaagagaattatagttaatcatattttctctattacaaaacctagtgttattgcttaattaaactttggagtggtgctacgccaaaaagtcaaaatcaacacgtgagctatggtatttgcttcaaagtaattttcttcaaaagttaatttacatactttaacaaatgtctttgctaaaagttttgtctaagagcctaagaggctttacaatcattataaattttctacatgctaattaaatatttcttagctgaaagtagttttttttttaactttttattactttccatcttctttgttttccttagatgatatcttcattggcattgctttatgcattgaaactctggaagattatttctttcacagtcgaaccacagaacaatactaataaaaacccagcaactctaataccattgaagacattagtgtacactctccctcttgcaatatcatatttgctctatatggtatgtcttttctgtagttgttatttttgtttttgttataagttgtttttggtaacttcaatgatccatttctattttcgttgcaaaagttggttaccatggaatctgttcgtgttgtaagtgtcccaatgtacaccactctcagaagaactacagtagcttttacaatgattgtggagtactttttgtctgggaataaacattcatattcagttattggcaggtacaatataatttaaactttttctccaatgattgtgttattgattggttcttaaatgatctgtcttcttttgatgccacttttgattggtagtcttgatccttttccacacatcaaatttctgatgattagttttcttgtattactcattttctttctaacacaattcttgatggaataaatccaaggatttcatcagtgtggggataatagtatttggtgcatttatcgccggagctcgtgatctatcattcgatgcttatagctatgcagttgtttttgtagcaaatatctgtacagctgtatatcttgcttcaattgctcgtattggtattgttttcgtctttggagctttcaactttcaagccatttagcttccttgtttcaaacttcttactgctaatgcaccgtgtacattttcaggtaaatcaagtggccttagtacctttggattaatgtggtccaatggtaagataaaaaaaatcttaatcagaaagttctaagatttttcaggtcattagcaaacttggactcattgcgaaatttatctgctggcttcttgtaggaataatatgtggaccaatcctactcttttggacattaatcaatggtgacctcagacaattgttaaactttccctacttatcttcccttggatttcaggtgcttcttcacttcattgatttgtaattatttattttctttcaattactttaagaacactattttagcatgatccctccgaaatttgaatggcgagcggtacatgttttctgttataatagttgtcgacctgtctatatggttttttactcaagagtcaagactattaattgagatttgaaaaaaaaatgtttatgatcatagtcttattctgctcttattggaatagatgtattaattcattcttattgctatcctattgttaaatgtactcaatgctcatcatttcgttcttgttatggaagataagattgtaaaatctttggtttcttgtaaattcttagttttgttatttcttatggacctttcttgttcttaaaacaatcatttagttaattttagaataattagttttttttgccccctctacttatgacactgtatcattctgccccttaatttataagccttgttaataataccctctaaaatatatcagttggaataatatagtccttccgtctagttttggtcaaattgattgttaaattgatgatgtggcattatacatagatggtagttgaaaatttatatgcccttaggaaaaaaaaagaataaatgaacggaagtattaaatgtaagcataagaaattgtacaatagtatagtctcggggggtaaaaaagctaattattcttaattttatcaatacacttattttgccttcctgtttttcaagttccttgaaagttcttcaagaaactagaaatttaacaataaaatccaagcatgaaactaaattggttcgataattttatttcttcacttattatgtttggtccatttttctcaaaaagctgttgcagcaagttggcattttcttaatgtatgtggatggtttattatgtgtgattaaataatattttgcaggttgtgatggttctttcctgtgttttggctttcttaataaactactgtgtattttggaataccacactaaattcagctctcacacagacgatttgcggtaatttgaaggtgtgtgttatctcaaatcccaccttctcctgtactgcaaagataggaaacttcaatattggccttctgattaaatactttgagaaattttgctgaaacttttagtcatttggatagaaaataagcttctatataggacaatctgaaatctatatttggtatcattgtcactaagttgaaagttaatatataatggaaaaattgaatcaatttgataactgttgaaacaccatcttatcaaatatcaaatatgataatgtgataatattgtaagtaagaatatgcaatcttgggaaacatataacaatagatagatgaatccttgtattctgtttactaattttaagaccaattatgcaagtatcttagtacagctactgtctcaatggactacttactaatctgttatgactggttatgttccatccctgaacatgttggttgcaggatctttttactattggactaggctggattatttttggtgggcttccttttgatttggtaaatgaaagttttaatttgttttctttctatgtatccattattgaaaatggtctattatattctgttgttattccccatattgaacaactcacttatttggtctccagttaaatgttgttggacaatctcttggtttcattgggtcttgtttgtatgccttctttaaaatccaaggtaagtaagatggactttgctacatgagagccttccttattacaggtgatcctaaatcatgaatttggctggtcaattcttcctgcatcagctgagaaattttgacttggtgataaaagttttaagtatgattatttatgtcgcgagtaatgtaaacacaacccacaacttctgctatagatgtcttggggttatcttggcttattagctgagtagtaatggattctaaattcataaatggagcatggccttggccttaatctg

SEQ ID NO: 188087 - DNA, 3459 bp, Cannabis indica
gctctaggatcctttatcaataacttctttacaaaatctttagcactgctacttatacttggccatggctttcggcggaaatcaggcttatttctcaaaacctgaatagacaaaaaagcagtgaataagtatacaatgaaaacaattatgaacaaaaggtgcaaaaaaagattgttaatccagtaaacgatataaatatatatacaaatctcttttttttcacattgaggggtttgaagggggaagaaaaggacatctgaagtacattttttagaaaatgggaaggaaaaggcgatgaaagtgaagcaaagtgtctagctctagctctataaaaaatgaaaaccggggatcggggaaaattagtagcaaccatctatagatctttgctagattaaatattggtgactgacatgtgaagtgatacacagcccatacataagaaattgaaagaaagaaaaaaagaagaaaaaacaagggttgcaactgtaacaaaattaagaacgtactacacctccttaaatataccatcctcggtcttatcccagaaagggcgcctcccgcagagcaaaatgtaggtgatcacaccaatactccagacatcagattcaggccctgacttgcgtttcaatacttcaggagcaacgtagtaagcactgcccacgatatcttggaacttcttttctgtgtattattcatgaaaatacagttataatggtttcgaaagcaatccaatctataaggcaacttcagcagttaagaggtcctcacaataaaagcatactaacctggtttgatgaagtctgacagaccaaaatctgtggctttcagagatgagtcttctcgatttgacttaaatagaaaattctacaatcaaagaagaaatgtcagggaaccatgttgcctaataagaaaatgactcgagatggttacacttggaatcctaagcattccaataagtaagaaaatacctctggtttcatgtcgcggtgtactaaaccatgtaaatgacactgtgcagcaaccttaagcatttgtcggacaactactgccgcatccttctcagtataacggctatccttcctgataaggtaatgacataataccaactattataatcaaatggtggagaaagaactacaatctattggtatcatacaaggcaaagagtaatattttatcaggaaatgttcttacttggccaagatacgatccaacaactcgccaccctcgcataacctataaacaaattagtcaaaagaacacccataagtacacgaatgtgagaatcgtttaaaatcgccttgtccgcagcatgaaatagtttagcacttactccataactatatacacgtaagaatcatcctcaaatgcgttataaaattgaaccacattttcatggcctgtaagttcttgcaatatcttaacttctcgtttaacatcctcaacagcaataggaagaaccatctgtgtcaccaaatccacttggttaattttcaaagtctccaaagactatttgaaacaaaaagattaagcataggtaatattaacaagacaataaccctgttcaatgataccaatcactattttaatcattaacctaataaagggtatcctatacccctaattgagagtgggaaatctacaggaaactcaatagaaatttgtattaaaacattcattacaaaaatgcaaactttataagaagtggaatattcccaactcaaaattattcctaattcttatcttaaatcatttaatcagagctcattcacaacccaaataatcatatcaaaaagaattaccttgtttttttcaattctcttaaccgcaactcgatccccattagccttatcagtagcaacataggtatacccaaattgtccatgacccaacaatttcccgatcgtatatcgctcatcgaaattcttatcatacccaaaatccgtacgcttcccacaaggaatcaaacccccttgtctccttgtaacatgtttatctttaggattattatcattattatgattattatggtgagaattcctattgttcttcttctgggtctcattccgcttgttctgagtccgttgctgatggtggcgcgtggctccttgtacggcggtggctgtggtggttctggcttgggctttggttgtctctttacgattttgattcacggttgtgttattgttgctatttgagccactaactctggttgcagatatacaaccacccatgtttggaaaaaaggaaaactaaggaagaaaattagatataaagttttgagctttagaggttttaggaaagaaaatcataagatatatgtaataaataataatgggtaaccatggaatctgatgagagagaggaaagactggagcagataggaggaagaagagaagaaagagaggaaggagatcaatggtataggtaatggtggtggtggtcaaaaagagacttttgaagaacaacaacaacaagaagaaaattttatttatttttttttttggtaagaaaggaaaaaaaaatagtaataatattttggtaataaaaattatgaaattttggggagcgggtatttctgttatttaaagaaataattacgtggaaaaaatataaatggaaatataaatgattgagaaattatatggtgtgtatcctaaaaatagaggtgtatagatgtatctgttagtatttttcatagggaaattttataatctattattcctaaagaaaacacccaattattaaaacaacatccctattttatcttaataatttctactcttatctaaattgcatttttcatttaattttttttaaaatctcaaaaagattttctttctctaaatctatcattctctcttgtgcttaacggacccaaccgaacctctgcctccctctctctatcttcgacgaccccttccactcattggcgatccactccaccattcgaccattcgatgacctagaccaccaccgtccgttcccccaccgtcgacccacccctcggctaaaggttagattttgaaaaaaaaaattgtgagttaaaaatttattttaatttgatcattgtatgtattgtaatactgtgttttttctagattttcatgatttttttttttaatttgaatttatttgagaccttaattggtaggagtatggttttttggccaaaatgtgattatcgatggtttttgtctgtgcaccgctattttatgcacaaatataaatcatcgagaacctatcaataaatactaaattaacaaaacacaaacaaaaatcaccgataaatatcataaaggctatcgataacctattgataaatgtcaaattaacaaaactgtgttacacaaacataaaatatcgataagcacttttgggccaaaaaataacataactgtcaccatctaaggtctcaaacaaaacaaattaaaaaaaaagaaaaaaaaaaaaaaaacg

SEQ ID NO: 188088 - DNA, 586 bp, Cannabis indica
gccagacacttaggccaatggatacagatcccaattatttatctcgaataaggggttgttcatggcaagcagatcattccaagacatcaggggattgtgaattctctataaggagtaagtttccctaaagctcctcgaacacaacttccgactctgccttctctgccatctcacactatagttatagtattgactttgggaccaaggaacccctatctaccaggtttaattccaccattagttgatggtaatgtggccacaatttctagaggaccacacattgcaagaagcacaaggaattcccaaaagagatattttagggaattggacaatgtgggggagatatgccctttagtgtagtcaccaccacaacgtccgtgaataatgaacatgaccatcacattcacgaaggatgacacctaacatgttcacttcccacacaacgaagctttggtcatagaagcctaaattgccaacaaaagagttttccaagtcctggtggacaatggaagctcaatcaacatactattcaagtttgcattttagaaaattaggctaattacggttgatttgtcaccttgtccca

SEQ ID NO: 188089 - DNA, 3548 bp, Cannabis indica
ttctggtatctcaatggaatttccactactactagagaggttgcagccttgaatttcgacgctgcaagcttctttggatattggcgaaaagcttgacaaaagtcctacaccgatatggtagcttttcagctctcgccaatgtcctgatctcatgtaactattgaagctgtttaaatcctcaaaggtaagacctagacttgttagttgtgttgatttgatgatctcatcgaaaactactccacttccagtttgttgtgaatcctttgaccagctccagttgcttctaaacatggtcaaatattcaagccgagacagctttgggataagtccagcaggaaagatttccaaatcttctgtgtaagagatatcaagatgtcttagattgatcaaagtcccaatatcatgtggcaacatttcaatcaaagtatttgaaaggtccaacactcttagctctatgagcattgctagagaaggtaagaatttaaggttacaagaacttaagagaagcgctcgaagattgtgtaagctagaaagtgaatcaggaagcgattcgataagagttcccgaaagattaagaactttaagattaggcatgtttaagaagaatgagttgggaatactatctaaaaagtgattcctatgcaggagtaaagttgataaacatgtacttttgggaacatcacaaacaacttttatgttattttccattagggaaactctctctacatcatccctccaattcttgggaaatgttgtcaaaccaagaccagctcttatcatgaacacagggcattcacttgtgattctaatagccatgtctctcaccaaatcatgcattctaacccaccttgttccaataccctctagcatacatgcatctttgagttcctttactattctcattcgttcggttacctacttcgtctatcaaaccttctgccatccaatactgcaccagcaattcaacatcaatcttggatttctcaggaaacaatgcacaatacaagaaacaagctcgagatctttcattctttaagtgattatagctaaacttcaaacgcgaaaagacatcttcttccataccttcaatctcagctttcgagcttttcagttcttccaatgcattcatccaaactctttcatcatcagttcttctcatagctcgccccacggtgatgatcgctaaaggaaggcatccacattcttctgaaatcttctttgctatagtttgtatctcactagagttaattgtatggattcctgctttatcagcaaacaatctccaagcaacctctttagaaaggacatcaactttaacttccttgtgtgtttccatacctctacatacttccataagccgagtaatgaaaactattttacaaccattttctttacttggttgtggaattccaacatcttctaaacaaaacttacaccacaaatcatcaattatgagtacaaatttcttgattctctgcaattgctcaaacaacaaggctgatcttctaatcatatcttcatcatccaagaaatccaactctattcccttagccacatcagtttgtagcttcttcaaatcaaagcttttcgaagcattaacccaaatgacaaaatcgaaaatcttatcctcaccaagcaaattgtttaaatgcatcatgatagttgtctttccaacaccacccatgccatatatacctatcttatgcacattgtcatctactaaacactcccatatctcatgtaaaactttcgatggaatcgtttctgtaatcgatgatgatgtcggtataagacttcttcctttatctgggaatgttaaatcaatgaacaaaccattcacaaatgctcctctctcttgaagctctttaacttgtctaatctttcctactatacttcttcctaatttataccttgaataacaattaggataacatcctttgatgaatctcctcttttcatcaatgtcactcacttcaatccttaaactctcaacttgtttgagccaaaactgtgcctcacttcttagcttctttctatggttcattattccccactcaatctcctctttgatgtctttttctctttcttttagtatacccaaatcattgagtagaactttctcaagtttctcaacattgtaaaagtaatggaatcttgttgcaaagggtgtacatattaaatctaaaatccccaccaagggaccagtaatatccattataaactgcatcaagtaaaagaaagaaaaaaaacagaacaaaatttagggattttcaaatttcagatggaaatagtaaaaatcaccataaagatcacacaacagctaggctaggcacagtaaaaaattcttcatctttcttgaaattgtttgatgttattaaataagagaaattctattagaataaccaaaattattggaagaaccttaagttaaatatggatagaataatgtgtaaacttgtatataaaatctcaattactctaagattaaaccaactatgtaagcaacattaaaaagggatgaagcataaccaagtataatatttgaacaataatagaaaaagagttagagatatgaaccttaggacttgagaaaattggtatacaacaaaaatttgcagatgtatttttaagacagtatagatgaccttcattgactttggaaactcataatgagagagagagaactaactatacatgtgagtgagtggacatgtggactattctttctccttttttctaatttttattggtgattttcagaggttaaattctataataataaatactatatgtctccctcaattattacttttgtagttttgctccatattttttttttacaaaaatattctttttttttaataaaagaatagataaatattattaaattacaaaaattactcctcaacttatttctttaaataattaattgatgtaacaatcacatgacgttaatgcagtgtggttcaatttagaagttgagacaaaaaaaaaaataaggaatttttttcatttaaaatagagatatttatataagtatagtaataaaaaacttaatttatataaaaattgtaagtaaacttaataagaaaaaaatgatatttaaaataaaaaactttagaatatattatttatattaccataaaaaatattaaaattctttttatatgtttttttttaaaataataaaaaaaatatcatataaattggtcaaactttaaagtgtcatatttaagtaaacaacttttaaaattctataataagtgtaatttcctctttctttaactcacctcttcatcagctacaaccacttcttctgacaagttttcaagtttggtctttctctctctcaatattctcgggataagttgaggaatatctcttttttatatgcattaatcaaaaatgctctcatattatatttcattaaaatgtacccacttttgtgagtggttgcccaatatacccttgccttccacttaagtgtagcatataatttttattaacttaaacggtataatgtaaacattatctataaaagtaggtat

SEQ ID NO: 188090 - DNA, 1057 bp, Cannabis indica
ttttattttatttatgttgttttatatatataaataaacattatacatattatatatatcacttagtaaatataaaatgtattattcaaatcttgagttagtatttttaaaaactccctattattaatctattgcttattttaatcaatttgtatgttaatcttatatatagtattgagtctcaaatatttataaataaaaatacaaattgtatgcgtataaaaatatatatacatgaattagtgtatacaaataaagtgattcaattatttaaatataataaaaatatatcataccatctacaatccaatcgtaaaagagaattttgattttgtatgcatacaattgggggaaattaatcccttaaacaaacaatacctaatatttttaaattaggccaacatttgtgttcacctcaaaataccctccccatttacactttctctttctccttgtctcttgaagtctctctcgcctccttcaaccaccgaactgccccaatccccaaaaaccgctgcaaacgaaccgacgaccaactattagcaacccatgaccacccaacgacgagcaaaccactgttggacaaggttaccaacccacgaccacccgcaacaacgtcgaaggttagttttttatcacttttgtctattaatttaatttttgcatgatttacggttaaaatgtaagagattattgataggtttgttgagatttagggttaaacctctgtgatttgtgagtttgggttagatttagggtaggatcggtcatatctgtattttggagaagaatatggtttttcaagccaggtccgatgccatccgatgctattccaatgtaggtccgatggtctataagagattgctaagtttcaacgttgaagacatcaggcccgatgcgggcctgatgggtggcccgatatgtgtctgattgtattcatttttgaatggcccaattgttgtatgtccaatacgggtccgatgcgtggtttgatatgtgtctgatagttgttcaacttttatgtttttttgtatggtccgattggaccgatatatgg

SEQ ID NO: 188091 - DNA, 3923 bp, Cannabis indica
aaaaaaaataggttagcttattctcttaagaaaattgcccgctttagtatttttcaatatatatattgcgcgtattgtcatgccaatatttttgaaagatgtataagttcgaaatctttgtgtcgtatgatatgaatctgaacatgacacaaaaatttcgaacctattttttgaaaatattagtatgtcaatacacacgatctatacattggaaaacactaaaacaaaaagataagaattggactatatattttgctgatgcgcacatatttacaagaatattattattaagcactaattatatataacactacctacaggtgacacttcacaatttattaatgatattttttaaaaattattatttaagttataaatacttaattacactaatagcaacacaatatcaaaaaatgtgataaataccactaatattttttatccattcgaatgcatggtgttttttggaaatgcattaatttctttgcagaaaagtattggtagtagtatagctaatacatagtaaaaaagaaaataattttaattttttgtttgtaattgtcattaattaattgatgagatttattaataaataataatttgtatatttggaaaggaaaaagagatgaaattagatgcaaatggtccgacaagccgaccaagaaaaggctgagacgccgtcgttttacagtgaaggggttatggttttgtttggtttcgtttgttttgaagtttgtcgtttttggggacagtgacgccgtcagtttatgactcccaacagaacagtctcattattttctatataatatataatatatatattccaaatccaatccccactcttttattaattttcatttcagtaattatttttaccaccactttattactctactactttttctaatattgtaccagtaatatactaatactaaagctttgtttgggtccattattattactttttaaacaattcactgcactctaagactatgtttggtataaggaaaaagaggaaggaaagaaaaatttaaagagaaaagtggaaagatagggtagagttttagagtttgaaacttaagaatatatagagtaagtgaaaagaaagggaaagaaacagagcacaatagaaaacataaaaccaaaacttgaattctttatttacaactgacatatttatatacaatgaaaaatagagtaacataattaagtacataaagcaaatatcaagaaattgttagaaaaaacagttagtagaattaactggattatgccgccatactaacatccccctcaaactaaatagtgtagacactatttttagtttggacttttagtacagaaatctctcagtggacaatgccttggttaaaatgtctacagcttggtctaatgatggaacatatcgaattgaaacatgtttgtctaaaatttggtccctgacaaaatgaaggtctatctcaatgtgtttagatcggatatgaaagactgggtttgcaactaaagcagaggcgctttgattgtcaacccaaatgacaagaacttgaacaatagacacttgaagctcttgtaacagagatcaaagccattttagttcaactgcagcattagctaatgctctgaactcactttctgtactagagcgagccaccacctgttgtttcgcggaccagcttatcaaattttcccctagaaacaccaaatagccaccggtagacctacgatcgtctacgcaactggcctagtcagcatcagagtatgcttgaagtgtcatagccaatgaaggttgtagccacaaaccatttttaacagtggccttcaaatatctaagtaatttcttacaggattccctatgaagagtcgtgggagcatgaagaaattgactcagtttcttaataatataggcaacatccggacgagtaagagatagatattgcagagcacctatggtgcttatgttcaaagtgatgtcgtaaaatggttctcctccagttaatgacaatttgagactcatactcgttggattaggacacgatttagctccttccatatgaagtttcaccagtaagtcagtgatgtatttcgtctgtgacaagtacataccagtgttatctcaatatatttccactcctaagaagtagtgaactgggccttcgttggattaggacacgatttagctccttcaatatgaagtttcaccagtaagtcagtgatgtatttcgtctgtgacaagtacataccagtgttatctcgatatatttccactcctaagaagtagtgaaatggccctaagtcttttaatgaaaaagacatgttcagatcagatatgagcttggaaattaaggtggcattaggacctgtaatgagtatgttatcgacatacaccaataaaatgacaagatttgtaccagttccatagatgaacaatgaattgtcagcacgagagccttgaaatccccaagagaaaagagtgtgtattagcttgtcattccaagcctgtggggcttgttttaagccatatatggctttttgtaatttgcagacataggttgggtgatctagatcttcgaattcaagaggttggcacatatacacagtctcatttaagggcccatttagaaacacattgctcacatctaattgagatacattccagttatgagttacagccaatgaaagcactgttcgaactgttgtaggtttcactagactaaaagtctcatcaaaatctatgccaacttcttgcaagtaacccttagcaatcaatcttgacttgtacctgtttagagagccatctttgttgagtttgaccctatgtatccatttgcacccaatcacgttcatggaggagtcatatggaacaagagtcaacattttagccatttgaggttggttaatgcagctttgagagatcgtggttcagagggtaatagggattctggcaaggggtgtttagtggtaatatatgattttcgtttagagatgccatttggggatcttgtacgcatggcatggcttcgaataggtgcagatgaagcaggtggtttagtatcagttgtgagaatatgtggtctagggtcattttcaaggtcagatgtgggattttggatggtggtgtgttgtggctttgaatcaggggcggacccacatagaggcgaaaaaaaatcaagaaaaaaatatatatacattttagttaattacaacatatatttattttaaatactaaaaaatacttctttctttcctccttattataccaaacaaaactaaagaataatcaaatatatcctcccttcatacttttaaccaaaatactcaattctttcctattttcatcatgatcttaccaaaaataagggtaaaattggaagaagaatagggagaaattaaatattaaaattattatattatcatttttcatataagtaattaagtacacattatttttaaatgttaaaaaatattttttttatataaacaaatttctttttcttagattttcatatttttgtatgaattgaaatttgtgtttggaaaaaaagtctccctcttgccaaaaccagaaaaattcataatccctttattcctctccttttaactctatctttcatccttaattctctcccctctaccaaacaaaatacatggaattaattcctatgtacatatatacatcgaataattatagctaggttgtttgttatactatatctttatatattaaaaatgtctatctaacagcaattcttggtttaacagaatatactttacaaataaaagaatattctgttaaatttaacccaaaaaagattattcttatttttttaaaacgttttcttttaacaccgttaacttattattcttataaaaaaaattaaaaaataatttctcactctcaaccctaatctcaatcgttactttaa

SEQ ID NO: 188092 - DNA, 2813 bp, Cannabis indica
aaacccgaacatatcctgtttataaactggtcgataacacatcccgtgtaacctgtttataatcacattttgtttaaacatgtgaactgataacacgtttataatccatatataatcggttaaaatactaaaataactttaaatgttaaccatgtcaatctgaacacaacccgttattaaatgaaatagacaagtcaacccaaacacgatcccatagaaccaaacacaaataatggaaagggggaaacaagcaattggtgtggtgtttgtgttgtgtttgtatcacaagaaagaaaagagaaaggaaaataagtaatttgcaatcacacaaagtctatcagcaacaacaaaaatgacaggtgtagattactttatgggccaatccttgagcaaaagcaagttggttggccctttgagcttggacaggactgagagtgataccctcacacttggcattaaatttgttagccaaatatctggaactccctccaatcccacaacccacatccacaacctccatttcatcatcaccaccagtggtcaatcctgcaaatctgagggcttcctcaatcattcgaatctgggcagttgtgtgatctgagagtgacacttgggttgaatcagggtcgtagaaaccatggtgcatatggtctccccaaatattctcccataaactggatgactcatcgtaaaattcagctatacccttttgaagctgcttccacacactactattactattactattgttgttgttagatatagaagatgatgatgaagaatcaacagcctccatggtgaaggagaatatggatcttctttgaggggtgatgagtttaatcttattgaagggtgagattgatgagattgggtttgggtgaaatcttgagtggcacgtgggacttaaactcaaactcagagttggagaagagattgttgttgtggtagtcatcatggctctgtcctctctcctgtattattatatgtataaaaaattattgtattttgtatacaacaataaaataaacattacccacataataaaataatgactaatttaattacgtgaatataatagtgaagtgtcggaaggtattttttcaagacatatcatcatcaccaataacaatatctcaatagtacaataatacaatgagaatagcaaaatacaagttacaaccttcttctctgtcctctgtgctctctgcaacaaccacaatcacaaccacaaccacctttctttcttacttttctttttctttattggttaatttattatttcatatccttttcagattccctttcccaatgtatctcttcctccctttctcctttttatttttgaaaaatggtaagaccacatttaatattgagtctcacttattttaatttaataaaaattatagagacaaattataagacgacatttcataatggagctagacaatttgatacccatagtaatgctctttattttatgtttctttctcaattttagacctaataataatatctcttccattaaatttttttttaaaaaaatacaaaatgccctttaatatcaaatttttttttttattagtaagtgtctttacacccctacacacctcaataccctttaaatgatcactttaggctagattagctagcaagctagcctctcattagttatggtagatacttgatttttaatattattaactaaagaatattaaaataaaaacacatacataactaccatccaatctaattagaatatgacaattgacatccacaattgcacatccaacctttcacaattgaattagattggattaattcggtgtaatttttggacttggaggttttaatcatgggatatcatatattagtgaattagtgacatgttagagttgcttgaaacttgtatatcaatatcatatactcactattttgagttattgcataattacaccaccaccacatgatgacattaaaattagtgatataaatataatcaatagagtaaagatgactcgtccttgaaactgagtggaaataatttttgtttgtttgtatgtttatacttttatttgttatatgctactgtaattttgcctgcatttctttgtttgtttgtaatgatcatcatatccatacctaccttccatgcaaaacttaattagttggtagcaaaatcaggatgaaaacgacaaagtgggacatggagtaatgtaagttgtcagtcaaataatacacatggagtaatgtaacttaaaagtcctaaataatcatgttttaggttagcaaaagatgagctgactagtgagacagtgactactactacttactatcactaatcatgatgatgatgatgatgatgatgaatgattagaggaattaggagaggtggtccttctcaaaactttttctttattacttcctcattgtttcttttcatatcatattcagtcagatgtctaatatgctaatggtgtagattagattattggaagagaaaatatacaaatgcaaatatcacaagcaattgcaggcaagacttttattgcagggaatggtgacctcctgcctaaattgcacaatagaaaaagataaagcactcaatagtcattacatcattgttagctaccctaaaaacttgatctttcttcagtgaaggtgatccatcagcttggatttacttcatcatcatctagagaacctgaaactcacttaaaaccaacaactttggctcaattcaaaataacgaataaagaggaaccagagtcgattcatgtcaataatcaaatataaccaaaagaagcaaagattca

SEQ ID NO: 188093 - DNA, 1209 bp, Cannabis indica
caattttagcttggtggcgatggataatgcaacagagagttatttaagtcacatgggtaaacttaaaacctttcattatagggaattacattttgttaagttcaagatttgaatataggcggggtaatgtttttggaccattttaagccatttattgagttggactttagaataagggtagtttggtctttttaaactttatggtatgggtgtcatttatttagggtggcagctgacccttttctttttttaagtaaagtataattttaataatagtatcataattttaattggagttagaaaattaagaagaaaggcaaaaaaaatctagagtatctaccctttttcttcttcttctttcgaatcagcccaggatttgaggggaattagtgtttagcaccatattcctttggaatttcagctaggttttgaagtaaaccaagtgaaggtaagctccttgaactctattcatgatattattaaggttttgatgtatttaggattgtaacttgagaattttggttatgattatttgggttttggttagggtagttttttgtaggtttcaatttataggtttatttgtgctattgttgttggttaattttgaggttgagctagtttgaattctaagaatctaaaacttgactcaacaatggcatgttgagttttagtgtgattctcttgctgttattgtgtgaaaaccgctctagaatgtttacacatgtgttttggaaaatatgattggatttaaggaagttttggctaagttgtagaatttttggggtttcttggtgccaaccggtcgaccggttcacaggaaagactcctaaaagcccatttttatccagtttgtgttatttttagagcctagtttggtgtttcccctaatatttagggcactgctatgttgtttgtctttaaggctaccctttgttataagtttagggttttgaaaaaagttgtccaagtaatttacccatttatgtaaatgtgacataggacatccgttcaactcgtgaattttctattcaagtcgaccgtcacgcttgaatcagaaaataaggtaagattaacataaagtatatatatgtatgtgtgtgtgaatgcatgttaattatattattttacactaccaacactagactaattataatactgagtgtattggtatagtgtacagtgcttaagggtatgttacggtgttac

SEQ ID NO: 188094 - DNA, 1405 bp, Cannabis indica
aaaaaatcttcatcttctcttgggttgtgaaatctgatattctcatttcgggtcactagacctccctcaaatgtggaaagaatttcaggatcagtctggcgcttgctttgtattcttgatcctgttatagcacacaccgttgcatgcttcttcttatagaactattaatggtatctctaccgtaatttggggattcttgttcttactctctctgctgttgtggaagtttagtttctcaaaaattgatatattctgtctgataagtccacaaaatgattttgcagtttttgaatctttttggagatgctcaatctatcaagaaggccgaggatcatcacgcgaagctcttcttacctcatagaagcacaacagagttgaaaaaacgtcacgctgaggattttctagcatcagataaaacaaaattagcgaaagcctactctggtgctccttcaccatcagctcagtccgtgatgggagcatatccgaatgcacagaatcaatgggctgctggttatgctgcccagcctcaagcttggccaccagcttcacaagctcagggacagcaatggaaccccggctatacccaacaggtaagatcactatttactctggctctcatacagtgcttatggcggtgcttatggtttaaatctttctgtaataggctgctgcatatggcggtgcatacagtgcttacggtagcagctacaccgctccacaagtacctgctgctgcagcggtgcctcagagtgctgctgctgctgcagcatatgccgcttatcctcctacatatcctgctcaggtttttaattttactttaatttcggttcgtctgttccattaatcttttgcggtacccttttaacgcctaatacctcgttgcattttcagcagacttacccacaaagctatgcacagcccacagcagctgctgctgctgcaacggttgcttcggtacagcaaccggcttcagcgacccaggcctattacagcggttactattaagacgaaaaaatgttttcgggcagtttttttgccacctgtaatcactttttttcgtcttttctttgttcccagtcttatttaggactttttttttgggctgaaacatgggtatgtagctaaatgcagatcttaggagagttaaaaggaaaagaaaaaaaaggatgagttagtgtgtcagtggcctttgtatttcattcatatcaagcttactatctttttgaaagtattaaacgtcttgtgatgaagtcaaaatcgatcccattaacaacataattttcacttagataaacgatcaagagagctaaatatagttaaggttaaatagcaatataagtatttaaaattttaagtttctaagctgtataaattttatttttagtggtattaattacttaggtgg

SEQ ID NO: 188095 - DNA, 1150 bp, Cannabis indica
atcttgccataatgggtactcgacgagcttttcataactgataggtatttccctacctaaatttgttgggttttaaacaaggatggggcaagtatgggggtcgtaaatgggtagcgggaatggaagtggagaatgcgttcctcacatattacctgctctatttccatccctactctcatcgaacaatatcaaatattaatgaaataaaataataaataaaattatatacaactcttctattgtaataaaagtgcaccatgcttttctaaattatcactggtttagtttgttataccaaagggataaaacaacagcccctacattaaattttccctatatattgtttgtttatataggtaattgatgttataaattaattttttttgaaaggtattataaattaattatgataatatgattattttttgttcaatcattatatcttttactatttatttatagtatgttgtaattccagccaccataacaccaagaattcaatcataaaacctacaataaactcaaaatttggacagaaataatgaacataaaccaattaacaacacaatgaatcgaaaccagaaatcaatcaaagaacaacacaagaatttatcctgattccaatatcctagagatcaacatgatccctggccatactccagctgagaaacatcaccaattcttcattaatatgtggaataagagagtatcaatacaattacaagattcaaagcaatcttagctctgtggtactcgaaacacaccaaagaaaacagtcacagttttctctctaccaacccgagtacaccccttgttcttgaccctcttcaagaacagaactcacagcttagaaccctaagcaactctctctaatcttctctcttattctcctcttaacctctctcttaaagtgaaaagactagacttattttctcatactagaaaatagcaccaactaactaactaacataacagaaagttagttaagttagttggtttaagtgagttggataataagttggtttagaggatcaacttccacattgtatgtatgcataaaccattgtacaaagttaagcaatgacccttttcctaaaagaaattgttaataataataataataataataataataataataataataata

SEQ ID NO: 188096 - DNA, 832 bp, Cannabis indica
tttttttttaagtgatatcacgtttaccagtttatttaggaggaaaaattgaacaagtacaaaaatcaggttatagaaatgaccatgttattttaatgctttcatttggaagcaagcatattcaagtgctactgagatagtccttctgtcaaaagttattcttggttgaatggtgaacttggtattataggtcctattatggatggatccaacagaagggaaagagtattagacatgatgggtggttgtgtggctcctaggggtgtttatcacaccgctaaaaccactcaaattgtactattttttgtggtgtaatttttgcagttttttagtttctcagtgcggatgcagtttgggaaattacaaaaattacatgtgcgaattaatttaaaaaactagtcaaaaccgcactacgggcaccgcaaacactcctagtgggtggctcgtgactgtgaaggtacattattatggaaggccaaatgtagcagttttggtgtacaggtctatccaaatgttgttttggatcaaacaacatgagtgatgcttatgtcattattaagacattgtttaaaatctattcaatttcaacctatacgtagctctaatttatgttgtttatatttggtttaattgttaatacaaacaaagtaactcatcaattgccatatcatcttatttcttgtccgattgtattttattttttactgtgaatatacttcatttgaagtaattatccttatgtttgtttgccaatttcaagttttgatattttattaagaaaaaaaaaaaattgttaaaataaaataataaatacataaacaaatacctcgtt

SEQ ID NO: 188097 - DNA, 6547 bp, Cannabis indica
agagagagagagagttggtgtggtgaggcactgaagggaaatcaatgccaagatcaaatatatttatgatagcctaagtcggtggattatcggttatttgatttacactaattattattgttattgtgttttaagaaataacataattttgtgcaaaaaaagatttagcttagtcaataaggatcgcacataatatttttttaattaaagattaaaaaaagtaaatcaatcaccattgcccacttttggtaaataagcttgtcttttttcattaaaatgctattatggatcccacctatcccacattattatgcaatcaatcaccattgcccactttttggtaaaaaaaaagcttgaattcttatttttaaagagattaaaaaagacttggcaccctaaaggttagtttgttgtaggtggtattatttatatgatgagaatctttgaagtgattatcgatgacttaattaagggaagttgaacatgtatttcttgtgattgttaaaatgattaaaaaaataagaaaagaatctgtaccacgtgatcttcttatttatttaagaataaaatagtattactataagccacctataatacttaatctagcaccacgatattacatcccacaaaactactatacactataacattctcaaaagagaaaattactatgaacaccaagttttttctagattatatatatgtttttaacagaatttttaaaatatatatgaaaggattgttaatgaaatttgataaaaggggcacaatttcctttctaaaaaaagatgaagcacaaatttatggcaaagaaagagaatgagaatggtattttggagtggaaattgaaagatgtttttggtccccctttggaaaaattgcatgatggaagttaacatccatacccacttttacaaagtttttattctagtttctattaatatttagatgattgagtattttgtgttataaatatttaagagtaactctcaattgtaaataaatacttcagtttaatttttaacggcaataatattaaattatatttataaaattacgtaagtactggtcattaaaagttaagttattattcacctattatttttttataggtatattaaaattaatttttttaaaaaaataaaattttaaggatttttttttttttgataaaaagcgtttatatcataaattcaaataagtttaaacctcacggtcattacaaaattttaaggagacacttaacattagatatttataccgtaaattactttaaatgattgatttatatgccacctattttcactagccgacagcccaagaattcaccttctacacttggcaaaagaaaaagggacagaaaaaagacctcaccttctggcttttaccaattggagaagaatataatgaaaattatattctaaccatcaatatttaataatttgttagatgtgattgaaaattaataatttggtacatgaaacacatgctgaaagagaaagagaagtctaaataggggtaaaataatatgataatatatcaaatgtcaaattacaatatatataaatatatataattaatattttaataaatatgacattatatatgttcctcaaatgttcaggaatcatcaaaagccataccccaaaaccaaaccgggtgacattgagacacaaatagattgaaagagagagcatagaaatacaaaaattacatctaacaaaataaataatgttctcacaacaaaaaagaatcttggtgtcaaatttgtgactaatggccgacaaagctaatttggggctcaaactaagaccaccacctttattattttttatactggataaagaaaagaaggaacaagatgatgcaacctatcaagggaggaaaagaaaacaaataaataaacaaatctcggggcgcattcgcagcagcagagtacagtagtataatattatgtgtcttcatacttagttagctgcatctcggctgtagtacaggtcaagggtcttggctggaatacgatgaagaagctctcgggggaagatgcgaagcagtgtccatgccaaatcaagtgactggaagatgttgcgagtgtcgtatgctccttgagcgacaaacttcctttcgaatttgtccaagaattccaagtatagctgtgtattggtagagaatcaatgtcagtatattctcaagaaaatgtattagatattttttagtattaaggttaaaaggaaatgaaagagaccagatcctcagaggaaagagcttcttctccaaccacagccttcatggcctggacatccttcccaatagcataatttgcatagagctgagatgtgcatgagatgaaaaattagatggtttcatgtgattacagctaaaaaagggagggtagtatagatgttcaatcaaacctggttggaaacatcagcatgatccctgcgagtcattccctcaccaatagcactctgcaattattagaagttaatacttgtttgaactgtgaactctcaatgcttttagagcttaaacaagtcggtgttagctttttaccttcataagacgagagagggaaggaagcacgttgatgggagggtatatctgcacaatttaaaagaaggatctcaaaatttcatatacgaagataaaataaacaaactattcatgtcaaaagcatacaaatgccaaacaagactcaacagtctgagcaagtcttataatctaacctgtctgttttggagttgcctatcaacgtagatctgcccctcggtaatatatccagtaagatcaggggtggggtgggtaatatctagcaaaataagatttcaatgtcatgagtgtatggtcaaaagaaaattttgaaatatttgggagataataataaaattggtataaaagtacataccatcattaggcatagttaaaattggaatctgggtgatggaacctgttcgcccttcaattcttcctgcacgctcatagattgtggcaagatcggtatacatatacccaggatacccacgtctaccgggtacttcttctctagcagcagacacctacagtagcaatatgataatgttacacaaatcttcatacaaaggcatatcaatggcaatcatagtaaaacattctatggaaatatgctaaaaatacgagtacttatacaatttattgtttttaacaataaatatgttctacaaagtcgaaatgatgttacagtaacgttacctcacgaagagcatcagcataagaactcatatctgtaaggatgacaagcacgtgcttcccgcattcatatgccaaatactcagcagtggtaagagcaatacggggagtgatgatacgttcaattgtagggtcatttgcctataaaatagcaagcacagtaagttactggggtaccatcacaaaatttgagttagacaggccaaaaaaaggactggcaacatagaggaaagtctcatctggcattaaaagtataccagattcaagaaaagtgtcactctctccattgagccattttcctcaaaatcacgtttgaaaaattgtgctgtctccatgttgacacccatagcagcaaacacaatggcaaaattgtcctcttcagattgctgtaaattcaaatgcattagacaaattacaaatttagataatataccaccatcatatgaagaattggaaaaccatgttcacagagagaagaaaattgctatcatttcaatctaaatagaacaaacaaatctctaagaagttaaacaaggagaccatactcttattgtacctactaaagccaaggcaatccgtgagctactaaaaactcaatgcttttagattctattaactttccaacaatgttacaaggatacaattttagtgtttaacgtctttgaaccaataccaatacttaatcaataacattatcatctttgaaaatatttgtattgctctctgtctcaaaactgaacctacataaatcttgcagttctacccgttttaaggaaaaattggttgctatttactaccaaaatcatacctcgagaagattttcagttttctccaatcgcttgaccaaaccagcctgacgacagatttgagcagcaatttcattgtgaggaagaccagcagcagaaaaaagtgggatcttctgtcctctagcaatggaattcatgacatcaattgttgaaatccccgtctgaatcatttcttcaggatatgttctctcactaggattgatagaactccctgagggatgaaaaatagcaaattgaaggttgatgtaaagagtaacataaaaggaacatgtatatacactcacatcacgcatgattctgtgtgatcactcacactgccagcttacctgatatatccaagtatgcctcaggcaaaattgggggcccattatcaataggttttccagaaccgttgaaaatgcgtccaagcatatccaaggagactggagtttttagaacctgcaaagatagccagaaaaaagatgttcaaaacattgacagattaatgatgataaacaagctatgcagaaagcagtctggtcctgttatccttggccttgcttaacaatgcaatatgaaataataggggtttaatacctctcccgtaaactgcacagttgtaaacttgttgtcgatgccggatgttccttcaaaaacctggggaggaagtgacatcagttataagaagggaggaaattagacaattattgaaacaacaaaggacaaaaatatcatggtagaaagtaaaggagcaattgattaaatgattagcaaaaataaatttcaacttgaacatggttctaaggttatacaaaagaatattggtatgtggccaaaatttaagattatgcacccatccaaatcaaagaatgtacaagtaaagtacttcctgattacgagaagacgatgaagaatgttcaacagcaatacctgaacaactgctctctctccatcaacttctaggacttgaccacgtcgagttgatccatctcccaaacgaatattaacaatctcctgatatttaggtccctgagaccggaaaagagagcaaatcagtcctacaattctgaagagaattgacatctaggtgtgtacgatgaaaaagtagggaaaaaacaaattaccttcactttctcaagaatgaccaacggtccagcaacaccagagacagttctgtactctgcaaggtgtggcaaggcaataaaattgaaaaaaaaaatgaatacaaaggtgctcagcagtcatgatcaaaacaagtatgagtaccatacacttaatcactaactgaatttcttttagtaatgatcaataaaccaaatcagataccatatgttcttcatttaaaaaaaaaagaaaacccccaaatacaccacacatacaacaaagtgataagtgatcgacttacccatcccgatctccaaatttccctcctccaagccatggttttcttgtgcaacacccattattgagcttcacaagtaaaaaattggaataaatcattatcacaaagtacaaaacatatcacaagattttacataatcatgttaattcagagaaaaattagatcacataaagagaagttttgcttaaatcaaacactcgatttataaggattcaatactacaatgaggaggaaaaagaaaaactgcttcgagtaaaattcaatccaatttaaaagatgaagcaaactcaagttgtcttaacactaaaaacgacttagaaagtatggctacagtcatcacttaacacaaaatacaatattcacaaattcccatcttctggcgttctattctctcgagaatcaaacacgcacacaaataaaactcatgagaaaaacacagtgaacagaacaaatggctaatctaattccatcgaccaaaaagatattgactttgaccgtcaaaagcaaaaagcttcagatcaattatcaaaaggagaacaaagcttaaatccgggttcaagtaagacctacttcgatcggtaacttgcgcgatcaaagaaatcaatatcaaaatcaaatcaaagtgaataaggattgaatgacctagaattctgaatcgatctgataaaccataccttcttctcgatctgaaagcgaagcgaagagagagaaagagcgagaaagagatacgaagcagagtgaagatgtagaagagaaagatctaataatattggaccataaataaaatgaaaatcaatatatataattaaatttaaataaatagaacaatattatcttttttttatatatttattatttataaaagaacaatattaatattatgttgggtaggactaggagtgaaatttaaaaaccaataaaagattatggttattttaaaattagataaaagattgtaaagctttaaaaaaagattaaagattgtaagaataatattttaaggataaatttgcaattatgattgtaattaggttattttagaaaaagattatttgcagctaaattttcttatattttaattttttaaacttaattcttttatgtttttgtggtaaaatttatttttttaaaaaaa

SEQ ID NO: 188098 - DNA, 3273 bp, Cannabis indica
acatatatactcaatgctctatacaacatatacactcgtacaactagaggtactaatactgttgaccttagatatgaattgtcataatagattttacctattaaagtttggtgcggtactttaacatagattgtaacaaaagtaagttctacttgtgtatgatcaaatagtctaaaaggtaaattatgagtaaaagcattgtgaaactaacaatcatgaaccttgaaaactacaaaacttaatttacttttatttatgaatttgattattgaaatagtgacatagccaccgtgtaaaagctggctaagaagaaaacacaaacattttcattttcacatcaaaagttatatgaaaaccaaagaaaacgaatatattaggacgaagacatagatcatgcctcacctcagtatgtgtatatccatactagtacaaaaaaagaaaaaaagatagaagaagaatcttataagaatgaaaagtgattgaagcagtgtcatgaggttcattcaataacgaatgtgagcccctttgagtacttgatattagccattgtacattgtagtagtaggtaccattagctacattgaataataactatattggggcacctcgagacacatggatgtggacataaaaggaatgcccccaccttaatgagttgaactaaccaacaatttatatcactttgcagaatttgttgctatcatcatttctaaaataattaaataaatataaagaaacaaataaaggaaaattaagtttgcaggtttgtcagtgcaccattgaattcgatcatgaaaccttgaataataatgttgcagatcattcatgggctataattcccagatacccaaaaagaaatattgatcataaagctaaaaggaaatcagaggaaaggttaataattagtgaagaaactaaaaatgcctttgagataaatacacaaataatggatcgtgaaaagttaaacagattaaaaaataattaccaagatctgtctctaatggaaaaactaagcactggaaaaaaaatgttcaatgcacaatcttgggtttgctgttatccagtggttgtgtgagagcagtgggagaagaagccagtgggagtacctgtgaagagcttgaagggtgtggaggcagatgttgattgttctcattcgcaatcataaatgtgaacaaagacccatctctctcatcagctactactgttgaattaattgcagctttaatcccagaatctgaacaagataccaaattcaaagaagccctcttctcagcttcctccattaatctcctatacaacttttcttctgcatctctcaaaaacttgaactttgggggtggtgaagatctcaacctggtgagctcagtttctgtggaggattcaaagagagggttgaatccatggtgtttgtaagcatcaagagggttcaaaggagaagacttaagcctaggtgaagccaaaggagtaagaaatggggtgtctacacccatcattaaatcactcaagctccttgttctggacccttttctgcttctatcacctcttgatttagcatcctcagattccaaatcttctttggtttcctctttaattgtgaagagaaatctaggtgggccagctagattgtggagtctcatgagctctgactccacaccttcttctccataggccttgagcaacatatctttgcccaaaccaagctcagggtcggcctcatggccattcaaatctgaatcttttctctcttgggaggggttattacccaaagaagaagatgtgcttttccagcagataaactggaaaaactctttcgcaaaatttccgtactcatccacaatctctctgtctgtgattcttttcttcttccaccataacaagtaataaagctcagcaataagagccaaaagaaggcacccaaaaactagactcaaaccaagacctaaaccactgaaagatgtcatctttatctgaaaatttcacatcccccaaacgtatctaaactcaaaaaaaaaccttggattagaaaattgtctaaataaatatgtgatatattccctgtccaattattgtaacctcctaaatagtaaaagaaaatcaattgtatgtatctgaaaaataagacccaccacagccaaaaatataaataaaataaattcacaaaacactcagctttttactgaatgaaaaaccagaaccataataaaagaccctccctccctcgtactcttctttcttccttgtactgaacaattcacattataaaaaccttcctcaatacttgcctgaaacacacgctacgagaaataccaggttatctttgttgaaattccgtgcagaagtaaaagtttctaccctttaaagtcccaagcgtggacaaccacaaacatgttttagtagaagatgacctcaaacgaattaacaaaaacaaaatgttgggttttacaccaatttgtataaaattcaaaaacacaagtcaaaatccaaaatttggtagtatatcacttatgatatataataagcatctatatttgtattaaagagtgaaaaggaaaatgtgtatgcggggagatgaatgcggtgaaaagtttggagtgcagctcacatgggtttggaaaagcgtgtggtgtgtccacttatcaaatcatatgaaaaacggaaattaaaagaatggagtaaaaaagaaaaattctcctttttattcttaataataatataaatagctcacaaggttttctgtacttattttttaaaaaacaatgtattctctattttataaaaatatatatattaaaatattaatagatccaaaacttatatttgtatgggaaaataaacaaaaaaaggaaagtgagaaatttttttatttttttttcaaaaatatggactgaacaaaacatttccctttttttacttttgcctttgtttccagccgcaccaaaacattcttatcttctccatttttttttcttaacaaaggcacgatttcagatgtgaaaaaaatcatacaaactgtgtaatgagaagggcgcaattataaagaaaaaattgtacaagattgataatgagttcgtcttcttcttcggtgaagttttcacgtttgagatcaggtctcaggtaattaatccaacgaagcctttaactcttgccacaccttaggtagtgagcgctagcaaccctcactctgtgggcccttatgtatgcaataagcccctttgtttgtattgagcaggagaaaaagagttatagatttgaaacaattagttttcttttttt

SEQ ID NO: 188099 - DNA, 886 bp, Cannabis indica
aaaaaaacaacagtcaatacaatcaaacaaagattagcccaaacaactagagatcactatgcaaacttaactcattcacacttctaaaacgatgcatagaaataaagtagtagaatctttctaaactatggcatttatttttggttgacattttcttaaagatacatatatttgtatattgtaaaattattatttaactttttggccggctaaaaaaacaaaaaaaaaataaatactaatgagttaaaattatgtaatttgtgagatttatattacacttaaaagaacttgtgtgtagttgtctcatattgctagtatatgagtaatttgtgagatttattttaccactcaaatcagatgttgtacaatagataaattttgcaatgtttaaataaccgaactaaaaacacactacattaaatgctgtttaaattcaatttttattttaaagtttttttaaaatttactatactattcattggtgtaatcatattttaatcgttgttttatgtttgaataattctttttataagaggatatatgaatatattaatattatatattaaaataaataaaatatattaaaatttgaaaaaaaaaataacatttttgtaatgtataaaattgaagtatgatatatgatataatgtaaaaattttatataaattacggaaagtgaaattcgttaatgtactttaaaaataaagtagaggagttaatgagagtgctctaataactatcaaactatatttttttaagatttttagatcttttaatttcgttattcacaatttagccaagtgaatttttaattttacgacaatttgaaaacaacattaaaaccctctacttcttttagagaattttctaatgagcattgctatta

SEQ ID NO: 188100 - DNA, 8415 bp, Cannabis indica
ttcacttagttttgacatattatcggtgaaaatgtattgttggaaaaaaatctcacttcccctcttcatggtcgactactgccatctccttggggtattgcccatcaaaattgatgagcactgccgtttccttatggaagtggtcggttagggtaaatcctaggtgagaaatggtttctctcacttgtttttcactccttggtgttgagggaacccatttgaataattttccctcgtggtttgtaaggagcgaccactgccattcccttgtggcagtactcatcaaaattgaagagcactgccatttccttgtggcagtgcccatcaaaattgatggacactgccacttccatatggtagtgggtgcatatgccttttttcttgaggatttgatgtcgttgactttatgcacaaacccaagtcatatttatgcctaaatgagtcaagtccttgttggtttccttagcggattgagatttctagggtgaaaatattcatgtgggtccatgaatcctagtttgggcacacttgggtgtgtgagtcttagcattaaatggttggtcgatattttcgagtcctctagaagtgtcatggggccctcaagaaggatgtcttaattcatttgacatttttataagtcttggtcaaagttgcaagattacttgagtgtcttcaaagtactcttggcatgtgggtccttgtgcgagagtagccattttatttttttggcaaaaaattgggtataacagtttataatcaatatatgtgatagtaaataagatcctgataaaataagttccagcagctagccttagagcatttggtaatttttactttcatgcatgaatatgtttaaaacagatttacatgtttatatatgatttggatgccatgtgaattgtttgcaaatttgatgaattttagtgaaatttatgcatatttctataaaaaaaaaattattaggcttgtttaaggctttgaaatattttagaaactacttttcattgaaaattatgcttaaaaaattggggttgttttgggtgtacttaatctgcgcgcatgggccttgggacacctcgactgaaccatgtgctagtgctaccccttagttcatttcatgtctcagcatgctcaaggtcacaccatttcggcatccccaagatgcggaccctctcggcatgtctgagatcaaaacatctctgcatgctcaaagtcactacatctcaacatgcccaagatagggaccctctcaacatgcccaagatcatagcttcttgacatgctcaaggtcgcaccatctcgacatacccgagatgaggatcctcttggcatgccaaagatcacaatgtctcaacatgctcaaggtcacaccatctcgacatgccctagtcttcgccaacttggcatgcaagacatctcggcatgcatgcataaaggcatctcggcatgccctaatctttgccaacttggcatgcatgcataagggcatctcgacatgccttatttttttgccaactcgacatgcatgcataagggcatctcaacatgccctagtattcaccaactcggcatgcatgcataagggcatcttggcatcccctaatcttcaccaactggacatgcctcttcgtgaggtatcccagtacatacatcattgacaacacctcgataatgtgtttgacactgagcgtctcaaccatgagctattacatccctcaacaactcgaccaacacttagctgtgaaatgctccctaagtgttgagaagaaaatcattggacaaagagtcgaaaggacgaagtatacacgcgatcgagtacatgtaaggatacgaccacaccacctgcaaggcttgaatttcaatggaaagtacaagtagtggaggcaccctgcctacacaccctaacatcccgacaaggggtacgttgtaaccgctacctctgcgcgttgggaccacctgacaccttacaaccactacttggcacaagaccacctcctacaacttgttacctgtaggagtacaatgtccttgtcacctttggaccacttgggcatcatcttgtaaataagagccaataaaactcatataaatacctcatttaggatttgaaaatgggttggaaaatctttgtaaacaagacatttttgagtgtaatagaaattcttactccttctccatttactttcagcaactcactcaatattctctagttcatttacatttattttcattctagcttaacttttaatttttggccataactttgttgacaaaaaccaatcgtcaacaaaaaccattcgcacaatcacgtcgagtcgagccaaagaagacaacctgtagcacaaagaagaaacaagaatggcaaaagaggatcaccttatcttagacccctaccaagaacggcccaaataaaaacctcttcgttcaaattgaaagagtagtccacaaacaaattgaggcaaaaaccaaagtgaaccatctttcattgaaactcccaacttcctcacatggcagcgaaggtaagaccattgacatgctcataggtcttggacatgtcaaacttaaatacaaagccctagtattacttttaaattttctctttaaatggttaacacattcaaaccaattatagtattatcagtgttcaacctaccaagaaagaaagtactctgctcttcaaaagtaatcaaaccaaaaatttctcgcaatctgtttgtcatagctttagcaataattttgtaaggaatattacacaatttaacaggcctaaaatctaaagctttacgaggaacctcaacttttaaaataagagaaatcagagtcgaattacgatcaacaatactaccattctcattcaaaaatctctatctaaaatctttacgataccattattagaatataattttctgttgggcatctatgagattattgtcattaatcttcacataaaatcttattataaaactaaaaaccaattgaacgagctacaatcatttgctcatgtgttcaaccattaatttatgtcaactaagctcgaaatgttgttttaagcaggatgaacatttttcttcaaaatattataagttcagaaaaaaaaaatatttatctagtagaattgatgattaaggcaacttttgtcagctaacttcatagaaactttggtcaaacgaactttatcattagttatagaaatctaggagacaaaaaccaaaagctaggaatcgaaatgtccatttcatgtgtggtttgttagtgaaagagtcataatctagtgctaccatcccattcccacacaatgctgcaatgattatcagccacaacagcaggtgaatcattatcagcaagaggtggagttgttccctttctgaaaacagcaatctgggaggcgaaaccgggttccacttcaccggaaccaccgaccccactgaactcaacgctgtaattgtgtttagtggccaagtctgacgcccactgctggaactgctctctagtccactcgaacttatggtcgtgattacgaaatttacaggcttgagactgagttttgtcttctggatcttcttcttggtttgatagattagatctctggagtatgacattgtattcgtagttcggagtagacacaatcagaatcttcggacaaaagtaactcaacacaacgtcaccaaacagccatgcttgatcttcctccatatgctcaattacctatagcatcattaagtttaataaaatgaataagtgcataataattgcacagtttacttagtgttataaactaatgataactaatttttttggccaggcatgttgaaagtacaataaatatcaaatctcatactcagaaggcattacctctaaacaagtaccaatatcaaaaccacacaatcgaggatcgaattctgttatggaaccatcgtatagaatcgcagactttataccagcacaagcttcatttgcatttagtttagaatgtagtatctacaccattaacaaaaaagatggtgtcaaatggatgtcttaagagcacaacaaatgacagggagtgatacaaattattttgctaaattttttaaacacgaatagcacaaaagcggataatgagacgtacttttgctgcacgtataagacttttgtgagaaatatcaacgccaacaattttttcaagagaagtctgataattcaataaagaatccaacaaacttccagagccacatccaaaatcaacctgcaacaagtgagaagaagatcaaactactgttgtatattaagtaatgaacattgaaaaatggagaaacacatattcagttaccaaagtagtagcacaggtttgcctgatgtgttggactgcatattcaactcgctgctttgaaagcggaggactaaaaagtgccttctccattctgtcttccaaaggttctgttacttgatataaagttatagtgtactccaagcagcagtcttctgcattaccgaaagtcagattaaatacttccgcacaaaagtacattgaagaaaagagaaaaagaagagaaaaacttacttgcagacagcaaagaaagaaccctttcagaatcatccgtggcggctaaaattaactcttgagaatgcacacccataggtaaaatagctgactgcccaacagtcattaacataatagctgcttcaatttggtgtatcactgaactagatccaatctcaaactcaaattcatcattgtgttcaagaagttctttcgtgtttgtacttttgatcaccaacatcactgaataacttatacacgctaacgatccattagatggagatacaccagaatctgggccacgaatttcttgtcctggcatagcatttgattcatctcctctggcttccacagtatcaccgtataagaaagattgaataggccgacaaagtgcaaatgctttaaaaaagtttgtgggattaaatttaatgtcaagttcatcggcagaactatttagtttgattagaggagtattgaaattcataaaatatgcatctaaccatataagaactttcaaagatacattctgataggaatcactctgcttcttgtaagattcctttggggaacactctataatcaaatcctgaaactttgagtatatcttaacttcacatcgaaaggtgcctcctgattccactgcttccttagaaccagcagcaactatgctaccatttgcatggtctgtcccttccacagctgagtctctcaacttcaattttttgtgtgatcccgatgtctcagatggtgcttcagagatactgaccaatgagtaaacaggttcaaaaagacggtgctggcggcaaaatgtacagaggatttctcttggaaaggaacccctccagtttgtcctcgtagtatatgctgaaggtaaatgagctgcaagtattgctcctctcgataacttgtaaactccacttggtaccttgttcaaaagcatcctgtagttgcaaaccaaggggtaactatacaatgccgtttctagacaactaaggcattaacatattaaaaacattaaatcaatggggaaaaaaaattagcagcattaaaagctaagtggagaaaagtttcagttgaacgaagtctataaccacaaaaaaggaagaaatattgatttaagaatcaatcataggagacctgtaatatgattgcatggttaaatcttcatgaaaaagctctttatacttccatgtatatccaatggatgccaaaattgcatcaccatatatagcctcaccagacaagcaacttgcccatgtattataagattcttcagaatgcatgtctgttttggtatttgaatgattagaagacggttccgacatatatatctctgaagtagcaaagtacaccctaacctcagaagaagctctaccaatgggcctgtggaccaacaaaaatcaatcattactatgaactacggataggtattaaaaaagcacacagtacaacatcaatcaggtttctacatacaattgtctactctttcacccaacctaccttgtcatcaaaaccttagaagcatccatcaaacctaactgatttgcaacagcatccaggtaatatcctgatgaagaaacatcaaggtttacggtgtaagctgtcttctcatttgaacatggtatatatacggctccaaccgagcaacttcctggagagacagattgttgcatatttaaatccataatttcaagagggtatggatctttcctcttgacccaaagctgttcgtcagaagtatcaacgatctcagataatccagcaacagccttcttaacataagatatgcccatatatggatgtaactccaccttaggatctattgacctacttagatttgagacttttggatcaatcaaagcaatgactgaaacagggacacgaccgtagagatcaccttctctctgcaaaactgctctgaggtgaccacttagaggatgaagagtagttaggaactgaaacagtgacacataaatattaacaacggccaaagaaagtagaactacagattaaatttaatgttgaaaaaagaaacctcacagcagcaagtaattgaaagccaactaaggttaattgtatagaacataatcaagaagtcatcctctcttcacataatatttccgaagaaagtaataaggagaataaataaagagaagaaaagacacacaaaacatagcactaacttaccagaatgaaattaaattcaaagcaaaaactaaaaagaaaagaatacagtaatcgttcaaatatggagaaataattaatcaaaccagtcatgtgataattgtcaagtgttaacatatataacattatccaattgtttcaatgcaactaataagaatcaaaacaaagtcaattctcgagcaaagaattacaagcatcaacaagtgcacaaacaccaacctcatttgagaacgaaaacttgatacgattaactaaagcgttccatggatcttcttcagcaatgttgtaagttaaaggatcaatacccagctgcaaccaaaaaataactgttaaacataaatattttgtagtacctaaacctcctaatccatgtatcaaacagtaattacagataaacatttataatgaaattaaggacagggtaatatgttcaagacagaaataaaaaaggaaaccttttgtaaggccaattcagaggctgcttgctcagcttccttcttcttcttaaatgttcctgaccttacagaaatttcagggagctgcaatgagcaacggtaaaggcaaggacctctctgtataatagccaatcccgggcattcattttgattagattcctgtacttcctcaaccttatagcaggcatcattaccaaacttctgatatataatagccttaggtgtgaggacactctttctcactacaacatctgtagattctccattttccatagctaacctctaggagtctgattatatgaattggtacaacaaaaatattagcaaaaaccttgttgagtaccacacattgttaatttcaacattaatctagctatcatagttataaattaaaactacaagtgcagaataacagccacaattcctttgccaacaatgtactacccttttcctaaattctacctatgatttcaataaatattttgacaatatgaaacggtaatcaaatcatactcaatcatacaagctaaattgagtaaatagataaaatgagagtgaaagtagcaaactcaactaaacatgaccatcatttcactagaattaacttttgaatatcttttgtaaatggactacacagcattatatacccacaatctcatcatcctcaggcagcaaattcctcaaaatatagtataaaacagacaaacaaagaaataaataaataaaataaaataaaaaacgaatatataattcaaaaatcagcaaggcagaagcatctatcaaatgatgagcgttaacttatcagaactcttttaccaacggcatgaaatttcccttatgatcagataacaaagggtctgaagaaaaagaattcactaatgaaaatgaaaatcaaacaatgcagtaaaatcccagaagcgaaaaagctcaaatttttggcaagaaatgaaaagggtttttgagcagaataaaaacaaagtaactccaaactacaaaacgtcaaaagaactgtgaatgaaacaagtggaagtaatacaagaatccatagaagaaggatgaagatagaaagatgagacctttacctgttccaacataaaaaaaaataaaaaataaaaacaaatgggaaatgaatgactgagaattgtgattttgcggtgtcgttcttgggtgggttgggagtgagctttggggtggagtttggtttgggaatttggtatttaaagggaaaggagggaaacgttattccttccgcttggt

SEQ ID NO: 188101 - DNA, 2295 bp, Cannabis indica
ttcaataaaaaaaaaaaaaaaaaaaaaaaaaaaaaaaaaaaaaaaaattacatgatcagttcttccatcatttgaggatatatgcatgtatattatagcttggtcttattccatcgacaatgtttccatttcattataaacattcatgatttagttaacgatttttagcattattattttttgacgctatttagttaacaaattatacgtttctaattaaagcatgattacatatttttaatcacatgatcaattaataattttaagtacatgggcatatttcagtgatatataattttttactcataattttttttcttacttcttataactaaaaatgggattttttgtattaattttcaaaaaaaaaaaagaagagatttttagtagtatatatgctattatatattctacaataattattatccattttcagtattgatcaattgaatggagtatataatgaaattcagagttttaaaaaattatgggcagaatatatttgttgaatatattaattggtagtgatgagagatatatacatgtgaataagtgtttttttttttttgtctttttggttataataagaacaaactattataataataagtcaattaaaacggaaagtgaatttaccatgcatgcatgatgcccactatacgtacttacgtaaaatcagtactggagaattaacctctctctcccccctaagaataattactattttgtgttaattctcttttaagtcataaaaaaaacctacttaattaactatgagtaaaaactagtacgtaaacacaaattattaaaaatttaattttaagccacaacaatatatttacataaacattttaatcataatatataagtttttttttctgaaaacaataatatatagttttataaataatgttttagtgacaattttaatatttttagtacaaaattgttttatgaagtaaaataatgtagtgaggtgtgaacccattgaaagatatggttttgggaaagtaaacaaaatctatccatatcatgacagacaacatcactaacagccaaagaaatatcaatcatttcattttattccactaaacgatagtcaacttcaatagcatatattcacaaagacttagaaaaagaccatttgtattactatatatatttgttcatggaaggtttaattatgatcatatatctctcatctcaatctcttggacacaaatatggttacatttacccaaattgttgtgtttttcgtgattttgctttactcaaatttcggagagaaggttagaggaatcaagtgcaaacatgttgaaagagaagcacttctcaagtttaaacacggtcttgatggtagcactcctcttctttcttcttggggaaatgaagaagagaagagagagtgttgcgaatggatcggaattcgttgtgacaacaaatctggtcatgttatcagtcttgatatttcaccttcaacttttggtgatgatgatgaaaataaggaatgtgacacatatcacatggatctttcaggtataaatattttttttaagtacttatgataaaaaaaaatgaatgtgacacttatatatcacacaattcttttcaggtaaatatatcagttcttcattgcttaagttgaaaaaattaagctatttgcgcctcagctgcattgatttggagaatcttcaatttccaagttttattggtaatctcagcaaattattataccttgatctttctaacaatctccttagtggaaaaattccctctcaacttggaaatctttccaaattgaagttcttgatcttagcaataatagtcctgatttgattatatcaaaccttgattggctttctacccttacttctttaaattttcttgacttaagtaatttagacttaggtgaagtcaaaaattggatgcaaccaatattccaacttcctcaactcacaaatgtgaatctatctagttgtagtcttcaagacttaacacccaattcatttccttcctacaataactcttctatttccattcttgatctatcttggaatgttctatctaattattctacataccattggttgattaactccatgcccaatcttctccatcttgatcttcataataacatgttaagttttccacaaaatagttttgggaatcttgttacatctactttaacctaccttgatctttctgataatgaaatacatggtactattccaaacacttttaaaaatataacttcccttgaatacctttctcttagaggtaactacttctctggta

SEQ ID NO: 188102 - DNA, 1968 bp, Cannabis indica
agtttctctaaaacgaaaaaaactagtaaaagtcgacctctcatcagtcctttatatcctaggtcaagtcttgtaagaaaaataagcaaatgtattctgaatttttgctcttttaacactggttgtcgcaatacttagccttcgagttcacaaaattccattggcgtcgctactcagaagacggctgtcgcgatgatgctgagtgctgattctgcatcatgaaatcttattaaaactcaagtcatcaactccatttattggaaagaaatttgtcttcaaaatttgatatattttttcattttttacctttctgatttgaaatcgttttctccaacctttcttcttttcctttctcaccttttctttatatatttatatttttgcccataggacaccccaaacttctttatggattctcttcttttcctttcttttttcttagatcaactaactccacaatttcccccgaacgtgatttcttgaattcctttccttttacgtatcattctttttaacttggtagtcacacatgaaacattaaccataggcgacattaagaaatagtcgaagcatctctttaatattgcgttgcctagggttttgcctcaaaaattaatcaatcaagtttcgaatcaatgagaccacagcatatacaatagccacaaaaagtttattcaagcatgcaaaagatacaagacattcactttatgtgcagaagagattttaggaaaccacgcaatatataagttcagttctatcaacttcaaactcaccaaacattcacttttcctgtttcaacttatttcttattgacttcgataacaaacagggaaaaaataaagaaaaaactgaaacaattagactgaacaaagaaaactaaaacaactagactagaagacaagacaaaaacaaataaatcagaacattcctccaaacttgaacattgcaccggccgtaatgtagaaaaataaaagataatgaaagagaaaactttgttagaattattacacaacaatggaggcttcttgatgatgactctacattgtgctgccccaaacttgtgcaataacccgattcacacaaaatcaaaaataaatatatatttaaatggaagatagaatcacgggcttcctcccatgaagcactgatttatagtctttaactagactttcaaaatgttctattcaactcctaatcgacggttgataagttcatttattggatgagctacatctttagtgactagtctatggaatagaatttctagcgcagcatcgcctacaaaataaaaataaaagaagttgtacaatttaagtaaatatatagataaagtaagaaaattacaaatctgcttcaacttccctttttattagaatggaaagattaataggaacttttgtttatttatgagtgtcatattctcttctatggcttcatcatctgttccatcaatcaatttctctttatctgcagaccttgtttatagtagaacaggaaggtgtattggtttttcatgtggctcttcatatatgattttatccaaatatttctattcatccgatgtaatatcatggaattaaaaatcgaaaatgaaagaaaatcaacctattcctgcaattgcggtcagtctcactacctctttagttgccgccccctacttgctcattcgcttactaccacaagaaagtagcccctttctctaagggggcttatgtactccacaactttcttgtgttatggggtctcgaagactgaatttagctgccaaccctagtcagcaagctaaaaaagtcctttttccttttcataataataaggcttcatagctccaacatagacaaggtagtttacttgtttatttgttagagtaaggtcttgaagagcctaagataccgattttttgaaacagtatatatttttctataaaaaacaaagacatatctccaaaatatccatggatatcgatat

SEQ ID NO: 188103 - DNA, 2765 bp, Cannabis indica
acgtaccacctactctctctctctctctctctctctctctctctctctcttcttctacactctacttaattcattattctcgacctaatagtaggaagccttactttaaccttcctactaacgttcgtaggaacccaacaaccacattttactactacccttgttgatgacgaagtagaagaagaagaagactcattcttcgacttggagctcactgcaccagattttgacaacaacaacaaaaacccagatgaaaaatcaactatagagactaaaagttttgatcttgatcaagaaatggttagaaatagttgtagtagtagagaaccagctaaaactctcagcagtagagagctctgttatcccaaaccttctttctctttgtcccctcctattgattccatctccaaaagaaaagtccttccacttggaccacccattaatccaaagcctcaatctccaatcgctctactcaaatctgctccaacctttcgggtgttcaccttcaaaaagtctaaatccagaggaacagagaagaagaaaactgaaacagaagatatccattgtaagacccaaaagcaagaaggaaagcttttcacggtgagattcaacgttgatgaacctccaaacgtttcgaaattatgtagagataacagcagcagttctagaagtacaaaacgacatgaacagagcttaaacgacaccaaaactgagcagagattctctaaagacgttatacagaaatatctaaagctcgttaagcctctttacgtaaaggtttcgaaaaaatacaatgaaaaaggaaacccatctaccgtcgctgactttttcatgtcgtcaccggcgtcttctccggcaacgacggcttccattgcttcgccgaaagataggcccgggaatcttccggctgggattcgaacggtgtgtaagcatctgggaaagagcaaatcttcgtcttcttcggcggtgaccggagcccaaccgccggttaatcggagagatgactctctgttgcaacaacatgatggaatccaaagcgctattatgcattgcaagagatcattccactcgtctagaggtatttattaaactaaatttgaaagcttgaaatcattacaatttattcattaattattaaaagtttccttcttttttgttgggtttcagattctttttcattatctcgatcgaccagtgattcttcgtccatgaaatcttgttctagcggtaaataaattcatacaactctttcttttttatattcgatataatcatgaccaaagttctaacatttttaatttcattttatttctcagactcgtaccgattatccaactctgctagtgagacttctcatgatttttcagcaagaagctccattgaagacggtcatcgttgtcataataacaattgaaatcattttctgggtttttaagaataacaactacaacccatagcttacatagaaaaagagagataatatataagtagaagaagagtgactctgtttttcttttttatattttgttttgtgtgttctgttgtaaaaagaaaaaaaaatgaaacaagaatttagagaggaaaaaaaacagaagaattctttattgatatttttgtttgtttagttataattactggtgaataccttagaggatctctttgttgttttctgtaaagtgatggttcattgtgaaaaatattgattcgaatctttttggttattttattatatttttttactatgggcatcagtattataattatgtcactttttgaaattatgtgatgtattcatattatgaaatgactcaacttgttcaccaaagtgtcacaagactcacaactaatatttcaaagtattgtttcattttattgggaattacgttttctattatcaaattttttaaaccttatgaaattcaacaaaaaatgtcttcttccaattagagttcattatggttgtgatgactaaaattttacttttggagacaaataaataaataattggggtaagtgtaaattttgatttgaaatgacatcaaatagtgtggttaaattgatgataacctgcagatatcagggtgatttcatactgacagcatatcttttctttttgaaaagtacttttgaatatgtgaaaaagagtattttattataaaaaaataaaaataaaaataaaaattgcattcaaatggtgtatgtagtctctcttaccttacccatagtagtttgtcaaatccatcccatctgttgataatttgttggatattcaaatttgactgcttctttaagcttagaaaatatcacaaagttcttacatctttactcaccttattacattgattggcctccatctgtcactcccatttttgctgttacctcctttcaagtcttctaaattgtatttctaatcctagatttttttttggccatgttacaacctaaaaggaaaaaaaatttaaaaataaaacaaatatgttactaaaaggaattattattggctaaaaataatattgagtaatacaatgaagatgttattgttaacactataaaattgtccataagccaactttaatggtaaatattaaatttaatgttaaattaacacaaaaaataataatttttttaaacaaacgataaaaatcataaaatatatttcgcaaacaaatgatcgggtccaggttatacgcagttgtatttcaaacagacccgagttttagtattgtggaagtactgcgttcgagtacctgacataatataatttt

SEQ ID NO: 188104 - DNA, 4700 bp, Cannabis indica
gacaagtacaagtgtacaactagagtccacaagacatctacaaacaattagtagaggtttcgcactagatcaaactaatagaaataaactttaaaaaaaaaaaaaaaaaaaaaaaaaaaaaaaaaaaaccttaaaataaatgaaaaatattaatgaatcccccaaagggaaaaagagcacctggacttgggcagaataaatttgttcaaattgaatatgaaaaaccattaaatggccaaaaacctctaaaagtggaacaaaaggcatctatttctgattatagagagcagatacatgttgtaacacttaatattatatttcatgtctaataggggcattaattaactgccaacaaggtgccagttcaaacttttacaataaagctataaatatactctaaatttgcctaaatataacaatatgatcactggtacagtcctgtagcattttactttaatatctttaaaggggtaagagcaatctatgaataataagtgtcaatttaccatgtattaatggtcaaacaaagtagaataaaacttcttcaaaggccaccaggataatcccaagttttgagaagttctcaaaaaactaaagaaaaactgactagatctaaggggaaacgatattaaaaactagtctaacaatagtagcattctgaaaattgctggaccaaagaaaaataaactgcaaccaatactacagaacacactccaagtttacctccactcaaatttcatcaaccaataatccaacattccataaccaaagcataaaattccatctatgacaaataattacatacatttaacaccatatcagaattatatgtacaaattcaatgcaaccaaccctgacatactcagtcacacctcaaaaacaactaattatgacatcgtatgcatgataacttcaataaatatatttattttatatacttgtccagctgaagaaccctataaatatctgggaggtaaaaacactttagcatattgctaggaagggtcccaaagaaaaataaactgcaaccaatactacagaacacactccaagttcatctcccctcaaatttcatcagccaataatccaacattccattaccaaagcataaaattcgatctacgacagataattacatacatttaacaccttatcagaataatatgtaccctggcaaattaaatgcaaccaaccctaacatactgactcgcacctcaaaaacaactaattatgacatagtatgcatgctaacttcaataaatatatttattttttatacttgtccagccgaagaacactataaatatctggaaggtaagaactttagcatattgctaggaagggtcccataaggaattagctcatacccccattgaccaaaccaggggcttgcctactcagcctaccctcacaagtatgacttccatactttatatgtgatactttgagaattatcccccaactatgaaaatattgatgcaacaatcagcatgacaggaatgaattattcaaccccaagcttgatgcattttcttccccaatcttcaaatatgaaggcattttaatgttcccatctccaatctcgtaatttacaacctccaattaaaaattcacatttataaacatgtgctaatatccaatgttgctctttgggaaaggacaatgccattgcaaacagttacttttggacgaactttgtagtccttccacacagtgaaccatgaaagcactgcagaaaattatatttgagattagaactcaggtaagtttacccctaataatatacaaagatccaaagaacactagactctatctatgagtatgagtaacaccagtctctggctgcctaagtagttttcctaagtgcatagatggaagtctaaaaattcaaacaaggaagattccatagtaggactacccagtgaactaaatagaaatatgaagtgtcacaattgacaacaatagtatatataatagggtaaataacggcataaatacccaaagttttaagtttgtcagtagcataaacctaatatttaggcataattacccaatgtttgtaaaactataatttttctctaatttcgtcaatacagactctgttattgtcttaaacaagacacatacaaggcccagtttctagattatttggtctagacataaacatgtagtagcaattatttccaaatatttttttaataaattcaaaatagaatctgcaccgatgaaactggagaaaaattacaattttataaacattaagtacttatgccgctaaaaataaacattggatttatgccgcttacaaacttaaaatgttgggtacttctgccgctatttaccctatataatataacaaaagaaccagtactcctacaaagtatgaaaatttaaaattgacaggagaaataattacactaagaatagaaaaatcataaatcccaatatgttgatcttaattttattacattgtaatacatgccaaagtacacatgcatttgcatatacattgcatgattgtattctcgaaaagcaaagttggaaaggaagcaaaacacttgaatatagcagacaaagggaaaaaacaaaaacaaaaataatcctacttcacttaaccttgactttgtaattatttatgaaacactagaaaacaggacattaaaaacatcagcagaaagttcagttaaatcaaaagtgccgacattgatacactttagaagtgaggagacatgtgtatcatttagattattggaaaacaataggttttattagacatgagagataggagtaccaggatgagaatatatatattggcagatcaaaaaggaaacaacaagagtaaggttcatgcaaaaagcccccgatgagagacttgaaagagatggcaaactggtagcctcactcataccaacatatttcacggatgtccatgctaaaacctacatccactaatgatacagatatagagctcaaattaacaaagaaaaaccatttttccccaataagtatagagtgccacttgagtatgaacgggtcgtattctagccaaaagaaaggaaaagaacgaataagccagaaattcatataaagtctccattccaatgaagcaccattcacatcacagaccaaaacagcgtaaaaaaggtcccatgaacacgagtccactaaaaatagttaaaaccaaaaacccctcatttttacacgataacttgaatcccgacaaacgaatacagattcagttcagcaaaagaatcttgaaataaaaaaaacaagcagaaccctagaaaaatatattcaataataagggagttcgcagaagaaaactaaaggaagagagaacttacaatacaagagattatataatcaaagagagtccgcaatggtcaaatacagagaacaggaaccctagagtgggagcgaataaagaagagtagcagcaatgagagaattccgggagttggagataaccataggtgtgagtgagagtcggagagagaggggtctgccgtagatttgtgggaatgtgatgtaattggagattttagtttgggggttttgcctcaattcattcactcaattcttctctagttctctctctctgtcttaggctctttagtttagtttagtaacttaataacctcaaatattcaaaattcggtcacttgtactacacaagtttccctttttcttttggggagggggaatttgcatttttatgcttgacgggcgatcacacaacaaaacaatgctttaaatttaccatattacagattaagaaactaattgaccgtttacaaaattgtaattagaatctatataatcaatgagagaaattaatcaatttaaaataaaaaataatcgggaacaatactaaattgtaattggaatcagaataatcaatgagagaaattaatcaatttaaaataaaaaataatcggaaacaatattttattatgctgtttactagacttacaggaaagaaaaccaaattcatgttattttatttacataactaagaaaggtattcggaatggtttaatttgataaaattacaattattataatatgtaattattttctgtgaatagatttttaaagggtatatttgtctttttattattaattaataaattaaaattaaaataaattaagttaaaaaaggaaaaagtattgtatataaaaatggtagaagaacattttcttttgttttctctttaatttgtgtggtcccactacttttttcttttccaaaatttagtaaataattgtatgagaatcaataccataccattcattctcatttcctttaattaaacatgtcattagcctcttattcaacttttgtaattttttatttatatttattacgtgatataatttaaaatatataactaattataatttagaggttattcttattataactggcctaaattgggacttaatttttttataataaattagaggttattcttgaatggagtatttttaaatagaggttctactgtataatattttgatgtgtgttttacaaacaaaataatagtattaaaatattagacatataattttttatttttaaaatatatagaaagataacgggactaatattaaaaattatgaaacttaaaaagaaattacatgtgattttctaataaaataaatgagaaaaataaaagataagttgaggaatacctctt

SEQ ID NO: 188105 - DNA, 1700 bp, Cannabis indica
taatacgacttacgaaatgattgatataatatgtttggattgatattttttaataatttgtatcgtgtgtgcgttttgaattgttgatacgataattgtaattgtatatattgacataataacaagaattaaataatcataagcttcataatatgttttagaaaaattcatgttaatctttatgatcgtgttgttgtgttttgtcgtatcatgtcgtgatgacctgttaattaatcatgtcgtcttcgtatttcaatattcttacatatatctatttaataaaattgtgtttgtgtttttcttaattatatgttattatagacgtgtcaacactaacttgacacaataagatcaatatatatcaatcaagaaatcctatatactaatggaaacaattgaaactaaaacatcatatatatgtatatagaatatgaaaatgagaacaagcttttctaataattaaaggggaaaaccattgcaatcaatgtccactgaaatcattttctggactcaatgtggcaaccattatcgtccggggtccctcttatatattgctccctatcatagaccctaaccaacacttgaaaagtatgttggattttaaaatataaatatgtatatataggactttttttatttatatatttgaaagtaattttttttttttttttttgttatttttactgaatatagtgtgcaattcacggagcaacaattcacatcgcaactcacgcagcaactcaaatcacaaccgatggagcaattcaaatcgtaaaaataaaataaaagttaaaaagtagtacatagagtaatattaacatacatagagtaatattaacatctatatacaaactctgagataattacataaaataccaatttttataaatttttacgtttaaaggttttttttcttacattttcacggtaaactataaaaacacaagaaaaccacatgaaaataataagaaaacaacattaaaacaacaacaaaataacataaaaagtaaaagacaaataacaaaaaatcaacaacaaattaacaggaatacaacataaaaatatacaaaaagactgtattttatataaataaaatctaaaaaacgtaaaaatattaaaaactccatacaaaatatatttttgtaattttttttttgttaattttatatatatatattttttttgaaattatccttaaataaaaatgatcatatccgttctcaaatattaattataagaaatatgtttgcttatataactacaaaacgaatatttaaataatttttaattttatctttggaaaaaaagtaaaaatattttcaaaaaataataaaatgtttttcttttttaaataagaataagttttctctttcaaaataataaataaaacataaggaataattttttaagcaaataagtttaaaataatatatcgtagtcaatttattttatttatattttatagattagttaatcaaaaaaattaaaagaatatttaattgttaaaaccatataaattttttatgattaaagaaaggaacacacttatcagtggattttgacacgaacctgcttagctcagatatccgaccagtaagactttgaacttcttttactttggttggcaactccatgtttagaagggcatgaatcttctttggattggcttctatcccccgagcattgacaataaaatcaag

SEQ ID NO: 188106 - DNA, 2472 bp, Cannabis indica
aatttatgtttgagtagtatgagctttctcttttttgctccccagtaaatccaagagctccccacaacaagtatcaaaaagcctgtgcatatacctgtaaagttttatcggtattaattaacacgtgttattcagattttataaatatatatatataggcccgttgttgtacagaaaaataattgtaactataatgtaggaaaaagtaactgtaattgtattgtagaataaaattgttgaatgtttgttaaattataaatttaaaataataattaactaaagtgttctacataaaaattaatattttaaaaataagagtaaaaactatttagaacataaaattaaaatgagaccaattcaaaaatgtacattaaataggaatattatgatcgaattaattggattgcaagaattaataatattattctccagtccagtactatataagtgagaaagaaataagaatcttatgtttttttaataaatactaatattaaactgtaacaagtcaatataatattaataaaactacccctaaccaatagagatagagagtactttaattattatatgattccatgtacatatttctaagctatatatatatgacaaatttgatacatacttatataataagtcatgtttttgttgtatgttaaattaatttgtgtgcgtaggtaatttgtatatatattgtattaattaatctatatctgtttacccaaggcaatagagagtgttgcaaagttaggatttgtgtgatcgcagcctgtttcagtgccgttggctagtttaaatccctcgggacaaatgcactcaaattttcctaaaaggttatgacaatactgtaaccttccgctgcatgtatgagatccatcactacactcgtctttatctgcaaaaaacaaaacaaatcaaatctaaatattattattattattattattattaatgtaatttattattagatgatagaaattttattttaaaaattaatataaaaaataaagattcaaataaattgagaaatggtaaagaccatttcaagtgtcaatcagcaccacagactatataaaaacggttaaacactcacaacacgtgtcatatcagtatgacgttaaggtactttaaattttaaaatgtctaatggtcaaataaattacaaaaaatgataaggggcagcacaaaaaggtgacatattgatattgattatgtattttaaggtaactaataataaaaaaaaaacatatgagtacggtgtaggacatgctgaattaattataaattaacgttaccgtacgtcatccactgatgaagataagggtttccttggtaaccgtctgagcatttacactgatatccaggtccattagttgagttaacacactcactatgttcagctacgcatgcatagctagaacgattcaacttggcctgttcacaagtcaagttcccaacaccccagtctaacaccatcctcggaaacttcttcttcttctttttcatcaaatccttcaaatccaacgtcgaaaagttatacgaaccactctccgccacaaaagcataaccgcacggattgaagtcgtgaactaaactatcatttgtggaggaattaaagctaaaaacatacgtaatgacattagaaacccctggtgggatttcactctgacaacacccaatcccactacaggacccatttacgacgtcgtttatgtggctacatgaagccacacacgccgacctgaagctgatcccttccctcatgatattttgtccactgatggttgcaatcgtatcgcatccaacgcctatgaacttgttccgaatactcaaaggaaacctactcagcataagcttgctttctttatcaacaagttttccgcttttgtcgtaacaatcgtgagaaacttttcccttgacaagaatttcgttgggttggattgaaattcggagaatattagtggaaaagttattattggggaagaatagtttgctgcggttattgcaatggagtaggaatttttcgctgtaataacagccttgtttggttccaaaagggtaaggaatttttactgagccacagctttcagggcagccttgaagagtaatattattattactagctaatattaagtgatcatcatttattaataataatgttgatgatacacttaataataaaaacacttgttggtactgtttcacctccatggtgcttactttgtactagttttgtgttaaaactgaaaatctaaacgtacatgttcctagctatatatagacaacaataataataattaagtcaattatatgattaatgtttggttaaattattaatatgaataaataattcattagtcatattgggtggattttatataaatatacataatataattgtaatttttaactatgcctggtctttttttattgtctttctttacgagtacacgtactaataacttgaccaag

SEQ ID NO: 188107 - DNA, 3401 bp, Cannabis indica
aaaaaaaaattaaactttaaaaatgggagacgttatgcaataatctggccctgagtacaatatacaacattattgtataacattaattttgttgtaatgttagcctcttctcttataatcaattttggaccattatataagtagttttttttttatttttcttaataattaccataaacagttaacctattttaaatgattatactttataaacgttatccaatatcccataatagatatatttccatttatctttatctaaaataattatctatcactatctgtattgttagttttctggctagtttctaattcctcttttatcatccatctttttcttcattttatcttttggagagtatcaaatgtaagccaaacatttaaactttgccgtgattatttttgttttgaccaacattataatttttctatttatatttgtaaatacttttcaagtggcattgtcttgaaaaataaattaactccataacctatataaatatttaattagaattttctccttaaacttttcaagtcgtttgtttcaaaaaataaaaaaaaaaaacttttcaaatcgttaaaaaaatttattcacgtcttcttataaacaaagtcttgatgtatgctaggaatgttaagtccttacggaaacaaaagctgtatttgaagaatgaaaatgaaaattttgactttattaatttgttaagagaaagtcaattttcattattctataaatttaggtttagttctcattgcaattattatatccaatatccaacaatcataatataatggcgccaatattattgttggttgtactactaatgtcatgtagttttaatcatcatcaactgcaattagttctggcaaataatccttttgatcaagattttagttacatgaaatcagtacacaatattaatggcgaagaagaaattggatcatcaaactataatgataattattatgactatattattattggaggaggcacagcaggttgccctttagcagcaactttatccgaaaactactctgttcttgtccttgaaagaggcaatgctccacaatcacacccaactgtcttcacattagctgggttcttctctgatctccaaaaacaagacgacggaacgacaccgtttcagagtttcacctccaaagacggagttggaaaccgaagaggaagagttctaggcgggtcgagcatgatcaacggcggtttctactcgagagccgatgatgaattctttgcgaaatcgggcgtggaatggcagatggatttggtggagaaggcgtatgaatgggttgaagagagtgtggtttcaactcatccaagattggatgtgtggcaatcttctatgagagaagctcttttggaagctggtgttggtcctgataatgggtttagtttgaatcacaaggttggtaccaaaacttctggctctctttttgatcaatttgggacgaggcatggagctgttcagcttctcaatcgagcaaatttggataacttacgagtggttgtgcaggccactgtagacagaatcatctttgattccaccactaccaaaccctcatcgtcatcaagtatgtttttacataaatatatacatatatctaggctgcttattatattgtgcacctctataaaataggcatttggtacatttttttattaattttatataaaatatagtttttaacattgtaattatttaaagtatttatacaaattttgaaaaaaaaaattacaatataaaagataaagttcaaacaaattattttaatattttccatatacataagaaaaatagtcacaaacattataacatattgaaccatgttttttttcacttaaattatttaaaaaaaaaattaaataactctaatgtaaaagaattttttaagaagaaaaataaaaaattgaaaaaaaaaaaatagaaaaatatatcaatggggaaaaaaaattatttttacactttcaactttttcattataaaaatacattttcagtaaaaaataaattatatttttttttattttatagtttatttatagttgtattatagttgtgttatttttagttgttttatagttatcgtgaagttgatttctcgttatttttttaattgttttcttattttttgatgaataaagtgtatttttattttctaaaactttacaagtgtattttataaacaaaaaattttaagccataaaattatgcttttctcataataaaaagtcaattataagagtataaatgaaatttttttctaaaaattccctaaaaaaatagctatttataataggagaaaaaaaaaatgcagcggatacacaccccctcttttttatgctctacaatagcttttttgttaaatttttattaaatacatagagttggtttattaattattattcagtatattaataactacatacataaactaattaattaatgatgatggtatataacatacacacagaaccctctgcaattggagtgaaatatagtgattcaaaaggaaaatctcacaaagcatttctacggcgaaaaggtgaaatcattttgagtgcaggtgccattggaagccctcaactattactacttagcggaatcggtccacaatcccaacacccaaatgttggaaaattcatggctgataatcctatgaacatcatcaacatcctactcccaaattcttctatggagccttccataacaaaagttgtaggaattaatgacaactatttcatagagcctgtcatctttcaaccacaactaaatatgacttcaggtagcttgctgaaaaaataccaggacccttgtcaattggctctttgtggttggccaattcgaccgatgtgaaagtcacaccaaatgttcgattcaactactttgataatccaattgacctctcgcgttgcgttatgggaatgagaaaaattggtgaaatgttggaaactgaggcaatgaatcaatttaaacacaatggagagttattgttctctggaccatctttacctaataataatagtaataattgggaatgggaatcgttttgtcgaacaactgtgggtacgttttatcattatcatggtggatgcgttgtggggaaggtggtcgatggtgatttcaatgtgatgggaattaagtcagttcgagttgtggatggctcgacttttaatatctctcctggtacaaatcctcaggccactcttatgatgttaggccggtgagttttagttaattactatatgtttcattgcaaatgcacattatttttgttttgaaatattgtataagtgtcttaataatttaattgagcaggtacattgggcttaagatgttgggagaaaggtcaagagaatgatgagctagctagctagagatcgat

SEQ ID NO: 188108 - DNA, 1441 bp, Cannabis indica
taaatgacaaaataataaggggttgtatcaatttagtggggagtattatattaatgaaattaattaaaaatttaaataaaaagaaatgctttaaaaatatcccgctctaggttaggttattacaatcttaacctcggcatctccctcccaccatcaaactctcacacttcttatatttctcttctctcttcttcatttctccgcctctcttcacagattttctctctgaaccctaaacctttgaatcgttatcttcgacaatgagggaaatcttgcatattcaaggaggtcaatgtggtaaccaaatcggttccaagttctgggaagtaatctgtaacgagcatggtgtagaccctaccgggaggtaccagagcgatggtgctgctgatcttcagttggagaggattaatgtctactacaatgaggcttctggaggaaggtacgttcctcgggctgttcttatggatctcgaacctggaactatggatagcatcagatcgggtccttatggacagatctttcgccctgataacttcgttttcggccagtccggtgctggaaacaattgggccaaaggtcactacaccgaaggcgctgagttgatcgattcggtacttgatgttgttcgtaaagaggctgaaaactgtgactgtcttcaaggtaatgttggatctgaattttttttagttggatccgttcatttgtgtgattataggaatctagtttgagtagtttggcgcattagaatcttatttttaagagtatcgacttattaaaaggattagtttaatgtgtagataacttattcgattggtttgatttgtggaaacaaatatttgatgtgatttgtaaattttaagtaattaatattttctctttaccttttcatatatttttttgttctaaattacttgcaattgaatattatactaacgcgatgctgcatgtgacaaaattaatctatagatttgaggcattttagcaaaatttagacttatagagttcgcagttctgttttttctgctatgttttatgtaaaaaaaaaaaactatgagcaccatttatgcgttatttgaactgatttgcttttgtttataaagaatacgtctttagctttgttttgttggattggatcttagtcgtgacttaaataattggatgggatagatatagtaatgggtcttcataagctatattattgaccttgatgagatcgaaatgggcaggttctttgttttttgtgcctgttacagagcagtaaatccgatctcaatagataatgtaacctcaaagttagttgatatgtttctttctttatgtttgtactactgtttcttcagctctttatcagtgtttgatacttggatctgttatctcacatgtgcattgcatcttaccacggtaagatttgttgtgtacattatttttcttttctatacgt

SEQ ID NO: 188109 - DNA, 2875 bp, Cannabis indica
accacccctcaagcgaaagggtgaggttgtcactctgggcttgtcaacgagatactggaaatgcaaatttgacaaacccttagtcaaacaaactgctatctgatcacttgagggaacataacgaatttcaagttgtttccccagaactttgtctcgaatgaaatgtacatctaactctatgtgctttgttcgagcatggtacaccgggtttgcagcaagagcatttgcactcatactatcacaccaaattactggagttgcaggcagcttaaatttcatctccttcagcagctcttgaagctaagacagttcagcagctaggtgaggtagcgctctatattccgactcagtactcgatcgagcaactaccgattgtttcttggatgaccaagagatgagggagtcacccaagaatacacaatatcccgctatggaccgtctatcatctgggcagcaggcccaatcagcgtcggagtatctagtaagtgatagacaatcacttggtgctatatgaatgccatgatgtagagtgcctttcaaatatctcaagatttgtttagtagcattccaatgtactcttgtgggagacttcaggaattgactaagtttgttcacagcgaaagagatatcgggtcgagtgtgactgagatattgtaaagctcccaccatgcttctgtagtaggatggatcagtcattggttccccatcttgtagtgacaaaggtttgttagccaccattggtgttggacttggttttacattggacatgtcaaacctttgaagaagctcaacaatatactttccttgtgacaaatagagccctgtatcatctcttaaccacctctacaccaagaaaataattcaaggatccaagatccttgagagagaaaaatctatttagctgagttatgaactgattcaaatgtatggtgctgctggtaactattatatcatccacgtaaatcagtaccaaaatgacataactaggatgtttcaacatgaacaacgaggaatcagctttggagttttcaaatttccattctaacagagtgtttttgagctgatcgtaccaggctcttggagcttgtttaaggtcgtatattgacttcctcaacttgcaaacatagtgtagtttagtagggtcttcaaacccttctggttgagccatgtaaacatcttcatccaaggttcaattgagaaatgcattgttgatgtcgagttgacgaatatcccaattctttgacacagctatggttaacacaacatgaacgatggaagctttgatcaccggactaaaggttttcccaaagtcaactccaggtctttgatgaaaacctttagccaccaagcgtgccttgtaacgttgaaaggatctatcggcattgtatttaattttatagacccatttattgccaatcacattgtagtaaggagagggaggcacgagataccatgtcttgttgcatttcaaggctataatattattacccatagccatgttccacccctcatggttgtgtgcctcttgaactgaatatggctcatgatgatccaaggaaaaagaagctttgcccaaaaacacccgaggtttaaatataccagctttcccccttgttatcatagggtgagatgcaacagtaggtgctggtgtaggaacctgagaaatggattcagcatctaaagagacagcagattcgggttctgtacaagctggtgttggtgtggtagtgtgaaggttatgttggttcaagggagaaaaagattctacaataggtgagtgaaaaggaacaacactaattggggaaccaatatcagaatgcgaagaagaaattacctgatcagttgatgaggatgcccgagataatggttctgctggagattgtgcactttcgagaagaaaaaggcagatgaagccaggagtgaggcatagggacacttacttgtgttctgaggcatatttattgagaaatcctattttgaaaggaaattcttgctcattaaaaactacatgcctagagatatagatgcgaccatggggactaaagcacttgtaacctttatgattctcactatattccaagttcacacattttatggagtgaaattggaatttgtgtgattgatagggcctaagacaaggaaagcatgcaaccccaaaggttttgagaaacctataatctggatttttagagtacaatgtggcatatggggactggttttgcaatacagcagtaagaagcctatttataaggtatactgctgtactaaacgcatcaaaccggtatttcaagggcatagtagcttgtgccaacaatgtgagccccatttcaacaatatgtggatgcttacgctcagctcgaccattttgttcagaggtgtgagggcaagagtggtcaaagagaatgccactgtttagaaccaattgagaaaaagcttgaaattcacctccccaaccagttcttaatttttttattttcttatcgaattgttttctgccatgttcttaaagtgaatgaaagcctctagtgcatctgatttgtttttaagtgggtatagccaggtatatctactatagtcatcaagaaaatgaatgtaatatttgaagtttgtgtgagatgttatgggtgctggtccccataaatctgtgtgaataagctcaagaacagtggtggctttggacatagaactagaaaatggaagtgcatgagattttccatattgacaagcatcacaaaagttttgattatcattaggtgaaacctttacattagacattttcaagacttgatttaggacagtacttgaagggtgacctagttttctatgccaaatgtcttttaaggaattggaaataacatgactagcaatagtagat

SEQ ID NO: 188110 - DNA, 2554 bp, Cannabis indica
gaaaattaagcagcatttgttgtctatgtagagtttcaagtaattgtaccaagacaatccacttcttaaattagaattaatatttggacaccaatcatatacagatgtgataatgcaaaatcaactataacgaacgttcatgtgcaactgatagagagcatagaaggttattaaatccattaaatagtttttgtaaacaaacaactcaaaccattatgcgaaaccattttaggtgtaagagagaaaagaaaacaaagattatgtacatatgcatatcataaatactacatttaagctataggtatacagatgtcaaatgaaacgtacattgtgctaacatgatgtactgatctatgttaaatttcatttagaaataaaaaaaaaatctatgttaaaaatttgatacaaggcaagtaaggttgtaaccttataagttaatctctgaatggctggctctccttattaagtcccagagcatatataatcttatctttgtcaaaaccttgaggtgtaaggccccttgcttccatctcagagcataataataggaccagtttttgtttcccaccctggcacagcccttcataaagtttatgcaatataaccaaatcgggaatcacagatctattaaacatttcctttaagattagcactgcaccatcaaaatcttcatgcttgcaaaaggatgaaatcaacatttcgaaagtatgagcattaggatggaaaccgcccctgaccatacttttatatatctggaaggcacggtcagagttgttcctcacacattgccctctaatcagggcagagaaagtagatgcatttggaactaagttctccttatcaagatctttaaccagatatgcagctttcttggtcttgccctccttacatagtcccaaaatcaagccattatatgtcagaatatcagcctttactcggttccttgacatctcctcatgaagcctactacccatttcacaattaccctcttgaccataaccatttatcaagatattgtaagttacagtattaggatccacctttatggccttcatctcactaaaaagcctatttgcttcatgtaatttcccttctttgcagaaaccatttataagagtgttataagttatgacattagggtgtacgccattcttacccatcaaagttttgagattcgtagccatgctcagaagacctttactacaatacccagacatcaatgtgttataggatgcaatagtaggactacaacccatattctccatttcaccaaaaacctcagcagccttgtctaacttgcccattctacaatacgcacacatcaccatattaagagtaaaaacatttggtgaaattcgatagcgccgcatttctctatagaatgctaaagcaatatcaactctatcaagaccgagcaaagagctcagatatgcattgcaggacacaaccgttggcaaaaacccataatccttcattctacagaaagtgtcagtggcattcctaaactttctcatatgagcaaaagtcttgaaaagggagtcaaaaacaagagcagaagaattacataaccggtacgaatacactattgattcaaacagcttggaaggtaagtctatagaattcgaggcaagaatgggcctcaaaatagcttccgcggacttaaatttacggtttctggtgagaatgtggagaataatggaaatggtttccagggtatgcaaactaggcttttgacttccaacccagttgaaaaactcaagtgaaagaacatggtccttctgaatcttcaacagaaggtgttttaccctaaatgcggtcaagccattcgataaagaatcaagcttagtccaatcggaatgaattagatggctatgagcaacattaacaaaatcaaggtcttgtccttgcggttcaggaatcgttctgtggggtaatggaatcggattccaattccttcccctcaaaatcccagaaattatgggttcaacactgatagattccttctcagttgaattaagaaaagttgaaaaccgacgaaatgggaacttactcatgacataaaaatatttgagtccctagtaattgaaattatcggtcatcccaaatttaatataatgcaatgtgtttactccattaacagaaaaaaactttacataatgacctactaaccttgttgaaagacagaaaatgatgacctttattatgtgctatgtaacatataataaggcctgttataaattcaagcttatccaacgaaataagaacgttgtcacctggtgataactccttctgaattccgaaacgacgacatttacttggtgcttatagaagaagaagaagagttcaatcatatttgcagaaagaagccaagaagaagaagaagaagaagaagaagaagaagaagaagaagaaagcctgaaatctgaacagacatggcggaggcgccgtaatggtagcaaggccggaaagaggtacgaatggtttttgggagagtttgtgagagagaaagacggccaaggttttttcataggattttttccaccttgtagagttt

SEQ ID NO: 188111 - DNA, 1924 bp, Cannabis indica
gacatgtctatctagttttgaagtttctcgtgtgattaattgttgtaaatttgttcttatctatagattatcatttacaaaagtccaaccaaaattaaaggaactttccataaaagccttcatcaaagttgtaagtctaacattataagactcgatattaaattgcactattaacaataatacaacacgtaaaaatcatttaaccatttctcctacatttatattccaaatattcatagatcatgtacaattttcaatcacatcattgataaaacgatccataaaagagtaacttgacccacctttcaaaattgcaatcttactcttctcactcaaatcttttaccctcttccttatttcactaccctgctccatcaaacatctgatcccaccctcaatcacttcacctctcacaacacactctccatcactcaattccctatagaaatagctcttgtaatccaatttaatctcaaccgctaatcctaactccttcaccaattgaaaagcattcaaatgttgctccgaataaactggccacgtggcaaccggtactccgaaccatatactctctagtatcgagttccaaccacaatgcgacacgaatcctccgattgcggggtgggccaacacattcggctgcgggacccaccctgtcacttttcctctctcgaccgtccgatcgaaaaactctgagggaagaaaatccctcggattagaacacgtgtccggcggagacttacgtagggaccacaagaatctaactccactgtggtccagcgcacatgcgatctctttcagctgagcctcacggaagcttcccatgctcccgaaacacaagaacactaccgaagaaagaggttgagcgtccaaccacttgctgacgtcagcaaactcggtggtcccacatagagaagagaatctaataatgggtcccacggggtagaaaggtggaattttactatcggttgaaagagctttgagcgcgtgagattcaagctcggtgaatgaatttacaattatacccttggcttctctagttcttttggtgtgatctaatagcaaaggagcccaatctttcaacaccaaaacttccggtaatgacgtggcaggaaccgactgaaggaaactcggtacggagaactcagtaacggaatcgttcgcgaactcagtgggatcgacgccattatcgtcgcggagagcttgaaaatggaagaggagaccgagataagcagccccagaagcgtagaaaacgtaactaggaaccccaaactcgtctgccacgtccatcatcgccgtacagaacatatcgacgacgaatccagcgacctgagtcgaccgcgttaactcggccacgacggatctgactagaggcttttgtgtttcgatgaagagactctccaacatgccgggatcggtctcggcggaggagtcgtagccgtcttgcttggaaagatcgatgaacttgattcgctgtgatggttccgatgcggcggcgaagaggttttcggtgtaggcggcgagctctggcagggagattgaagttagagtggtgatgaggactgtgatggagagactttggtgatggttggctagggttttggccgtctccaccatcggtataacgtttcctattccggacggtaacggaataaaaatgagttctttattatctggtttgttcatgtttgtttgggaaagatattatatatttattattgtgtaagagaaagcttgtgagagagagagagaaacaaagagatagagctctattcctgtctccgtcaatggcagttgatggttgcctgactggttagcagatcaggtagcgagagagaaagatggtgagggaggcggaaggcaaagggtattaggtttagtatttacttttatattttagtgaatattttaaaaaaaataaata

SEQ ID NO: 188112 - DNA, 3595 bp, Cannabis indica
tttttataactttattattaaataccatatttaaggtgattttgaaaaaaaaaaacacattttattgagctacccgcaagaccaataccgtccctgaagatcttattgagccgaacagttgtgctgttacttttctcggttccactattcgcctcgtccaatgtatgcaataccacctccgtcatcttcttcttcctccacaaaaccctaatggtttcttctcccaagtccgaaggctcactaatccacacatcctctttcatacataatttttctccataatttattgctaatctatgcttcgcttttccaggttagtcaattttttgtgttgttattctcaccaccaccgtctttcacacacaaggttatctagtgtacttttgatggttctgtactttatccgattagatgaatttcattgaaaatttgtacaatatgcggctgacttttcattcttgcaacttaggaatttagccttaaatggtgtatctgacaaatcatactcctttatcaaattccctgctctacatttccagaccactttgttaccttaataatatatgatgaaaatggttacctctttgttttattctgttttaagttttactttcatttaatgctgtatatggtaactcatccatcatccattgcgctgtatgattgttatgcttgtcatttaaaatgtgagatctttcaaagatgccattgttctttaaatcattaaatcaattctaatttttttgcaccagagattcttattctggttgcctctggagttatgaatggaaaatatgtttattgattatcagtttcagaaggcaggaatattttaagttggcgcacatcagcctgcataccttagatgattataacatttctgtcaagagacctattatgcaacttgtaaaataggagtttccatcacggattcatgaacaagtattgtttatgtaacagtttgtctttgatggtgttgtcatgatgaagccaaaattacagagactgattatagtgagggaatgaatgtttgaggagaaggattatattaaagaaatgagtcagaatagtaataactcgtccctttcatcaactcatccagaaactgatggcaattttcataatatagagcattaccataatcccgatctcctcccttcaacccactacaacagagtacatatgggaaaatacagtgatattgattccgctgctcaagatgctgtgttacttgaacaagtatgcttatttttctatatagccttacttatcatgtttcatctctgctttttattttattactcagatattcattctttctttttctttatggtaggaaatcacaacccaaacagttatacgtagccaaaggtttgtccaaatgttaacttattgtatttttccttttgtgttggattagtatatgtttaatcaggtaatattgttacattttcagagaggcaagaggtgtggatggatcgtttcaggatggctcagacattttctctggacatcatgaccccagtgctatcaaggtatgcaatttgggtatctttcatttatactttccaaagtttgtagataagatttatttcatactctgaaagtaatttctttgtgggatattctacaggagcatctattaaagatgaccactgaacatcgtgctgaaatggcttcaaaacgcgggaggtctactctatccgaagaaggttggtgtgaagatccctatttctaatttatatatattgttatacacatgctttctccaaattgcattatgttatccttttaattttctagttattgggtggtatgtctcctctcttattggtagtttgtattagtttcttttggccaatacaagatgtttttttttttgggtagtttattgtttaccaatagtctttgtttaaaacaagggagttgaatcctaaactggggataagtggtgtttaaataatttgcattgagcaacagaaggaaatattagagcaacacaatctaaaagagtaagaaaaatatggcaatggtgaatcgttggaggatgatttgccatgataactccaactttctttcatgtaatttcagatgattttccatgataattcaaactttcttttaatttcagggaaagggtaaggacattttcttttcagcatgtagaaaaattataatttaaattttttatatgacgatgtatattataattatagcttgcaatccaccagtttttgaaaatttttgaaaaatttacagtgttgaaaataagattcaaacaatcaattgcacacgtgctagtttttttaaatatttttgtaggtgtgcaactaacaaaattgaattctatttttgacaccacaaacaaactattccaaatcttttgaaaactagtaggatgcgtggtataagtataatgtacatcgtcatataaaataactagattatagtttctctatattctaaaaacaaaaccgtcaatggggagaaaagtgatgtccctactatagaatttttctatatatttatgtttatttagttatgctgtaaatcatactaagggtcaattatataaaatatgaaacttttatatgaaattgtgaagtgctggctgttttgtgggctggttggataagaatgattattcagtgatgaagagagttgcttaggttggattacattaggaatgagtaagaattctgctatttatccttactcttatctgtcaagagtaggagatcttattgttgatatttttaactaattttgtcatgtaattttttcttcttcttagacagttatgcttttctctccctatttgggcgtcctttttcttctaataaatctactataaaagtgaaagaaatactgaactttattatgatattaagtatttgagctcaagggatataacaagtatattgtagttgcaaaatttattgattgatataattatcttatatatatatatactgcatctatctgatacttattgttgaggtactcccatgaaagtctatgttgttgtttttatttcactcaggtaacacagaaatcggtaatggatatggagtccctggtggaggtgcctatgctggtggttggtgaattaatctttctgttgatagtacgaattgttaatggaattggagcattttattgattgtaatctaaattatttctactactttgtattctggtagttactgggttgtgacatctgatgtccaggaaatattggagctggaagtaatgaaatggatgagaaaagttctctgcctgatggagagtcagaacataagcctatgcctaaagagttgcctaagtatcttaaacaaaagttaagagcaaggggcatccttaaggatgagccagaagaaagcatttcagtgagttgtggtgatttatttctattttatcaatctctcttttcatttaccccagtttgatcaaggctgcaaaccatatttggtaaagtagagaaataatcgtaaagaatgatctgagttgcattaaagttgccttttatagcttgtaacgactataaaacttagctaatcaacttggacaacactggttaattatcatctctcct

SEQ ID NO: 188113 - DNA, 1692 bp, Cannabis indica
gcatgttctactcaatgaacattttattttcagaaactttgtttagatggagattttccttattttaggatattctatgaactcaccgttttcaggacccaatggttggagggatgaacttaagaagcaacttcagcaaatcagacctagcaataacgtcttatttgtcatgttaaggcaaatacaaggtataaatccttctaataactttatctacagcacctgatttagagatttttgcctatgatttcagtttgttctactaaatgaacatttttcttcttcaactctgtgttgggatggagttttacctttaagaaagatcttatttcagattgtcctatgaacttaccatttactggaccaattggttggagagattaccaagtgactatttgttcaagtgcaattggatttctgacaagctctgtggtgagaaatttacatatgtgatttctagtatttttgcatcaattttagagtgggaacatagtatgttgtatattcagtctcctaatattacattttcctccacaactctgaaatgagtacaggcttcactgagtttgtagtcaagttatagtcttgaccaatcaaatgtcatagagaaatgtatgaaaaaaaaaaaaccgaaataaatcaaaatgataacacaccaattaatcagaaagagacattctaatattattgttcattgaaatccctttggcagtttgctgtaatattttattcccactgaggaaatacatatccatgacgttttactatgtaaattgtttaatttatttttttaagtatgtgaatcttgcattgctttattagatatcagccaaacatcttcaagctattctaactcaattacttttacttatacacagcaaagtcttcaccagggtaaatcagctggtaatctgcaagcaaaaggttcctcaaatcttcatttggtccaatcttcacaataacctttttatcaattttagcccatataaaatcagcttctgcagctaatatgttcccattgcttctgctattaatgtcatttctcttcctaattgcagtcacattggaaagctgtacttactattgttggggttcctgggtgagtgagaatataaacataaccaagcatgagtttttcttcaggaaaaggccaagtcttttgaaatcaagtatcttgattgtcaataaaggtcactgaactctcatgccttattccgatcatacctggaggcttcttgtttttgtccttcaaacgccacaacacaccgaaaactgcagcctgaagaacaccctttgtggtgaaatcaaaggcagtgatttggctaccagcagcctcaacccaatcaactagcattcgacgtggttttctttgtcatcccataaggtaaacttgtctcaactgcgaactatggttggtttgttccatgtaaatcttagtgatattggcagcgccccactaagcccatttcggttttcaattcgtccatccattctaataactctttttgtacttgtggattaaggtggtcgatctcaggtactcctccccagctatccctaggatccgagttctgaactcggtgtcatcttcgtagatgaatgatggcccccagtcaaggcaggcaagcatctggtgcgtagttgcaatttgagattttacaacactttaagttagattttactcttctaatg

SEQ ID NO: 188114 - DNA, 1349 bp, Cannabis indica
aactgtcgggtatactataggtgacggttttaaagtgtcgacaattctcatttacaaatacaccggatgttttaaggcacttttaaaaattgttgcttatacctcccgacagtttaaaatcgtcaagaatgctctattttctccaacaattttaaatatttacttaatatttttgtgataatttctcaaaaaaaaaaataattttagaaccgcgaatactttttgtactactatatatactgtatacataatcttatcattttgtgtcgtatacacatattttgtgtgcacaaaattttcttttacagattaaaaagattaattttgagcaatatagttacaacttacaatgactcctcatggtattaattagctagtattactttcacatgcaatatacctaacaaatcaaaccatattcacacatgcttactccttattgggttccaatttaatttatttaggttttatatgatagatattctttcatgcaccaattatataatgcgacttcaccaattctcgacattcataatatggcttccttgtcgttctcgtcaagtacctttgtgcatgtaattaaacaattttacaaatagatgtatttatacaaatgataccaactctacattttaattaagaatattgctattaggcatcagtagtgcctatcactttctcgacatgtcgcgttgcgattggctagcgatactctctaaaagctattatattaaattatgtggaatctaatacttaattgaactaatagtaatattgacacataagagatgctaagcaccaccactgatgatctctaacatttctctttaattaattatgacatatatggtactttattatgattattacttattatcttaaatccatttaagaaaaaaaaataagaggcggctaacattgatccctggctgcatgtggcagaagcaggtatagtaacgactacttaggtgatcatataaacatttttcttttaagaaaaaagtaaattaaaaaatggacaggtcagcagccacgacaataattatgtagccgttcgcataagggagcaggtgaggggttcacttatataattttatcttttgcaaaagctatagctaatacatattacatatccaaaactttttgtatacatgcatatatatgaacgtgtctgttcctttacgtagaatttacagatatataattaaatttgaacaagatttaatcatggttatatccaaaatatctctcctatattggtataacgatgtttctagctagctattattaatcattaaaagccatttgtgaagaaaaataattatatatgcattatatataatatttta

SEQ ID NO: 188115 - DNA, 3012 bp, Cannabis indica
caaaaaaaaaaatgatattttcctacaaattttgaaatggagacatttactaacatcaccctataatttgagaccatttattataattttcctaacctcactataacctctaacagatgacctcaatagcagacttagcagtataccaaattactaaaatctctaacataaccctatagttcgaagttgaattttagtaggaaaaaaatgtaaccgaataattaagaaaagtaaatttttatgtttaatccaggaaaaagaaaatttgtattgaaaaaaaaaaaacttaggtccaaccaaattttgcaaaggaaaaaaaatcttttagattgtagaacttagggaaccaaatccatacccaaggaaagaacggttacaaaaagtcaatcgccgtccagtctcaaagttccaaattttacgaaggcgtagagacagaagtcaactgtctctgccagtgttaaaaccctgctttatcttctaaacccatatatacaaaaaccctgctttctcttcattataccttgaaaatcccaggcattaatggaagtagtgtggtggaggccattgctttcgctaaccctggttttagctctcatcattcacgaagaatggatctcagctccgtcgtgcaagactgttctcaatcatgaatctgaatccgaattcggattcacccaagaaaatcaccccgatgacctcaaggtcatgatggtagctaatctactccttacgggttccgactctacttttctccatcgacttttctcagattattacatgtccaaatttttcagggtaaagtctctttctttcgtcttcttcttatcttcttttttagtttgttaagactgaaatttcaatttgttacttagtatagaagtcttatcaaagtttggcgcccgatatgctggtggttttgggagatgtttcggccaaaggttgggaattgaacaagcccaaatgggagtcagtgctccaccagtttgatcagctgttgggtccctttctggatcttcctcttcacgtcgttctcggcgaccgggatctcgggcgctgcggcgagcttaatcggaaatctgtcaattgggttgccgggaggtttccgggtctggattcggcaggttgtggcgcttttgaaatcaataacgtcagcttcgtttccctcaatgccgtggctctgctctgtggtaacgatgatttgaggtttagtgtggagaaggtcatcgagagggagaatgtggatctccgaactgaaagggagaattttgaggaagtggtgattgatgaatctgaccatggcagggaaagtgttggtggattacagtggaaggagaaggatatttcttctgggtctggtccagtactcttacttcatttcccattatgccaaataccatttccaaacattgtggatgatggcaggttagtgagttagtgaacttcttctttcattttcttgcaagctaaacacaaaccatttaataaattgattttctttgttaattgtttcatttattcttataaattagtatctgaaagaaagttaagttgacaagtttgaaattttaactatgttcaaatgtttttcttcattttgatatatgaacctataccacaatgattagcaaatagcatggtttgcaaaatttattaagtttgaacttgttaccatgtttagatggttccatttgatttagaattgttattagctttacttctttcttgtcttgtttattagttggtattatccatgttagtctatgaaatctaaataatgaaactaagcttgaacttttgtgtttaggggatctgttggggatgggccgtacgagttgctgcacaatctccctgcaaatgctactcaatacatatttcaagctcttaaaccaaggtaggactaatcttaaatgccatgatttgatcagcaccaggtctaacctctttctctcatatcgaaatgaccctactagtaggataaattgcctcctgttttgtacgttgaacttctcccgatccttcttatagtcattgatgattagtattggtcaattatttttgcaagttttcacgtgtctgcctacttaaattagaggttccacggaggtttgatcttctgcggttgattgtgtggtgcctccataaagtgcacaagtgataggatttcaaatggaaaaaccacttactaggctctctgttttatgcttgtggtacgtttccacatggctgatggccatttagtgaagaattatgaatttcatgcttcctaaagtttatagggtttggcgtgtctcggtattgagctcaaggtccctaatatttgtgtatgggatttttgggatattttgtaagagtaaaaaaggatttacaagaagaaaactagtgaataggaaaagagctggattatatttcctcacagtcgatggtagttcatatatattcatttaatcttctcaaggtgtgtcttcttcaaccacaagcttatgggttttgcatttgtgctttttacctctgattgcaggattatattcagtgcgcacagccatgaattttcttcttacactcatccagatgggacctatgaagtgtctgtaccagccatgtcatggaatgcaagagatgaccctggatttatttttgccattttccggagtaacaaaagagcagtaagtatcatttattgctctcttgctagggaatctcgagttgttatggcttatatatcaattctgattctattaatcttaactgtagttctaaatttaatgaagatacctcattttatatgttcaagacagtgatagaaataattcctttgtgatgccatgcgcaatgcattttttgtggcttaacatggaagccttttggttatatagaatacaaccagatagaagatttggaaggagaactattagatacaatgaattagtataattaaaatccttacaactcatatgatgtcttcttatcaatggctatttggaaaaaagcacaaaagaaaaggaaagaaagaaa

SEQ ID NO: 188116 - DNA, 1738 bp, Cannabis indica
tataattattttagtgtcataagaatcagtaatgtctattcatgttgtgtgtattatatactatattttagtgtatgaaatgcattatgtttccaagaaaatttacattttaatttgaatatatatttatttctttggtgcatatatgacaacccacaagattttcctaagttttaatagaaaaaaaaatcattaataattaagtttaaaagatagagaggcgaactttaaaaacggttataagtgtgctagtaataatatagtaatctaatatagtcttacctcaacttatccaaaatacacttaagctataaataaataattaattatataattatatatatatttttgttctggccttttcatcttaattaatgctgaaaatgtaatttatgatttatgattagatgtgagcatagatttttagttagttaaattaatcatgttacatgggtataagaccaaattaataaagaatggctaaaattcccaaagtttatagaagcttaacctatataaactaataaattaatgaactaatataattaatttttgagtaactattttttccttctcactacttatcattattgatggaaccccacaataaaggttattagtctttatgcttaattattatgaaatatgtaagcaaagtaggaaccttattggtagtggaaaaaacaatttgtaattgtaattaacagtactaattgaatttaatggaacaaaattagcataggaatagatttagcaatatgaaaaatgttacctttattagtgataattttttaatgatagcatgaattttttgtgacttaaaatgtttagtcacacaataaacattacttgtcactaaaaagtaatttttaaatacaagttattactaatttaattttaatagcaaaaagtattgtgtttaaaaacacatttagtgacaataaattataatttttttgactaatacttttagtcacaaactttttaataataatatataaatgatcattcatgttcagtcaaaacttgcgacttaattaagatctttcgtagtgtggaaataaaaattaagggtgatttatgtttagttaagccttcattgagcctttccttacgagtttatgacatgacacaatgttcgttggtaaatactaattttcagccctaatttatttgtaataaagatgatgaactactaaaaaaagtaaattttttaacagtttaaaatagtcggctaaggtattgtcattaatctttataaccattacttatttgactgtcgcaaaattgagtagaataagcaataattttgaaacagtcggctataatatagccgacagttttaaaccgtcacattataaaaaacctaactagattgcgtaatcaaaccctttccaatcacacaacgcctcttcagcttaattaaccttaagcttcataaaacaacagtccaccaccgaacacgaaataccaaacagacaaatggatatgtaagcattaacattaatttagataaaagaaaatgggcctaaaaatcaatactatgtacaaaaacaaattcaaagcacgtattgaaattaaaaaaagaagacaaatatgaatatactaaaataaaaatcaaaactagacaataaaaataaatccagctctggcgagcttgatacgcaaatggtttgggttttcgaccgtaaaaaatgagtcatgcgaccatggcagcaacagagagagagagagagag

SEQ ID NO: 188117 - DNA, 5731 bp, Cannabis indica
ttattataggtagtaggcagggacgggaatgataaagtggcgcggcctttgaatagtataaaagcttaactgtcgtcacactacactactactggtctggtcatttcgaaattggtactgtacagagaaggaaaggaaatacgctcagatgctttagggcatggccaacttgcccagtctccttcacgagctccgagaacgcattgctgcttcttcctcctctcctccttccaatgcagacgatgaagctgtcaatgttaggttccgtgcggtgcttccttgtctctacgcctatgttgttccctcaccctcgggttctctcttatcccttctcttaaaatacgtttggttctccataaattaattactattccactcgttaatcattctttaaagaagattaaaaaaatttgtaagtttttactgggattctttcatatgatatgcagccgagaaagaagtgatagctattttgaagctcattacccaaattgccaagatttttcccggagtcttttatcatgggaaggcgagctctattttacctgttcttggtcggattctgcctttcttagcggaaccggcatttcggtaacacattcatgaacttgctttgtgtgaaattttgatgagcgtagttatgacaacgttattggtttctatttatgtgaaattggaaactcaagttctgtatgcatgcaagtgcctggcagcctgggtgtgttagctaaaatctaaacacttctttatgtatttgctaaactactagataagcatcggaactttctgttattgaataattggttggagcagagaagttttcagtatgattcatacggtctttagattatgcatgttttaagttttgtctgctagcaaagagcaaaacttgtagtttgatgacgatttctgaactcttcatctaatttatgttcgaatttttatatgaatagttcttagaaaccccagcagacttttttaacagaattaatttttgatactagtaatttaaatgctagttcattgtgtgtgattctgttttatatatatatattttcctccaacgtggtttcctatatccattcttgagaagtttaagctatatgcgctttgatagaaagtatatttacaacttttactggttcccgggcttcatatgactgttaagtttctattttatggtaaggcaaccatatacttcggaacaataattctttggggagcgtttataacttttttgtttacttgttactttttctgattgatttgtacttttttcttgttgttcatgttgagccgcctgctattattactaatggctataggctcaaataatatctttcatttcagttctcggcatggtgtaatttttgaaaccgtggggtcacttttatctttgcttcggactggaacacgagatgcttaccgtctttttttattgacgccatgttggttgttgaaggtataagaaatgatttttgatcaattgcttttgacaatctttgctcggcatattgaatcgggaggtaaaagtcatataagtttttttactctccagatggactatttggttatactctgctacatgggagagtgtttaggcctgcctcagccttctttcacatactataaatctctcaaatattttgtgacgtattttctatttcttactttggaaggcatataatcttatacacctttgctctcatgcagatattttctatctagcatcattctgcgctgaccatgcaagcacttcagaacccactagattaactttaaggtgtttcattaagtcatttgatgagatttcaaatgatccagctcttctaggagatattgcagcatgtaacaaaccaacagatggcactggtattttgattaacctatcaaacaaagaaaggtggcaaccttttgcaagttggatgatcaggcttcttgcaaaatgcattacagaaggaactctatatgtagaaggactatttaatgtatcatttgtaatggctgcatgctctttgttatgttatggagatgcagagttgcatgtggtgggtaatcattgatttgttatcgtttttacggtttaatgtattaatactagatttatatacaggtttttttttctgtctgatttatacgtgtatttccttagattttttaacagattttgacactttgaatttgttaaaggcatgttttgacttggcaagcatcattgcttcagcagtaaattttgacattcttcctcatcagaatataattcaatcgatatccactatattaagtgaggacaaagaggggcttcctgtgtataggtatttgattggaagaacttgttattttctggtatagaacttccatatttaataatgcaatgtgaattgcttaacttattttttagtggttaggctatgtttaagccgtgtacgtgcattactctgtagcctgtaatcagtcatcctgttagtggatctcttttagaaattcactggaacaataatattttccttctctaacaatgtcactatgctgcagaaacatggtttatgattcgtcattgggtggttgcctgaatgcattacactctagttgctctgatgttattgttaagttaacagctgctgatttagtaaatgtgtttcctcaatcaataaggagaaccaaaagccaggagcttaaggttaatgttccatcttttaacatgaacacagcatagtatccattgtgcaccattaatcagttagctgataggtctgccagattgttttgttctgagatctaaaagcattttctgtttctcaggttgcaatgtgcactgcatatattcgcattgcaaaaacttgtcctcctcatatatggaagcctgagtcacttctttacacactttctcttccagaaccatgcttctcccttatagactgccttcaagtagctctttccatacttggtcctgattgtgttggaggaaaagtgactagttgtagaaatctatatttttcactatcaagtgacaaatctgctggaaacacaagggttggggaaaagagacacattcacgataatgaggctttccagaccaaacggcagaagttggatgaggaaattatagcttctgatgacagtaatcagatggtgcaaaaacatgcatttgttgttgcttgtgaaagagaagactatgcacataatatgcattcttcacttctttctttacttaaatctttaaaatctccagctgtcagtgcaagttctttaaaaccatatctagctttaacagctcttagcatgctttgcatcaccttctgtagatatccacagaccaatgtggcacttataatctttcaggagatgtattcatggataccctggatactggaacaggtatgttggcttaaactgtaggcttttatatgtcaaccttcgcatgttcaacttttgtttagcttgtatgtttgtttgatgcaggcaaaccaagatagttcaacttcaatcatgccggatttttctatttatcttgaaggaattcactgcatattgcttctgcaaagtgagttgatgaaattaacctggtatataaagtttcacgtgatataaataagttagcttgatgctaaaaatatgttctctagtaaatatgatgactataaccaaacttgaccatgtgcacacacttgaataataaatcatagtcatgttggttgacatagtcaaatgcacaagtatgtgctaaattgcctgcatgatagtgtaagtaggctctgtgtatgggttgcacctctatttttcagtttcctctgtagttaagttatgaaaacaaatttgctggttttcttgtggttgtcttgttagtagtaacttaatctcttagaaattttggcagttaataatacttttgtataggctcccatttcaatttctgacatgaactgatagtttgttctcgtgtaggtccggttttgggggaaagcaagatatttggaaatcagggttttaatgaagaccttgtacgcttactgattaaacttccttggactcattccgtcattggtagcgagcctaataacatgaggaaaacaaaatgcctctccgttcaaattgcaagcaaacttgctaatagcagaagtgaatctgatctggaagtgcttgatttgggcctacatgatgaagatgaagaagttagaattgaggcagtaatgtcaataccagttattgctatgtggtctggtcctcagatactatcacatacatttagaaggctggagtaagtcaaaagctaaagttacttatttctatggtttagataagtcatatttgaaattgttattttgtgaatgccatgaatgaggtaaaaatagaaatgaaaatacatgttgtgaataaacagagagattgaagagctaacaagcttgaaattgttctctatttttcatatatttttccttgaacatacatgctacatatttataaaatatatctacaaaccctgggatcaatactataaatgtgatctcgtaaacttagctatcaaaataaaaaaaaataaatcagaaatactaataaattagaattgggtaacaaatactcaattcatcttataatggaaacaaatctgatatgtttacagttgtaaacccagattttcacacatgttgtatgcattttatctttaatcattgaatattaataataatcattactttggtttcttgtttcagcattttacttttgatcttgaagtcatctatgcttttgttttcagtacatatagcttgtatacagttatgttttagagtctcaggttgtaaagaatattaacactaagaagctgttatgttattatattgatgtttttgtgcacacaattatctttttttgatttagagtcatttattaccttttttttcctggtgttgcagattcatagaaggagaaaacatgacaaggttaaaaatgttattccattttctcttggttacttatcatgccttcatggttcttgtaacactggagatggtctggataaaagtaaattcaaattattcgtgaatacaacaaatgaaaaacagtgtcaaacactaggttatctattgcaaggatttttgtgttcgaagtgtgacaaaaaaaataaatgcaagaacgaattgtattcgaaaggtgtgaatatgcttgatatgcactgctgggaaatcggtacagattgtgatttcagcctcctaaggaatttgttttttgaacttctttacaatgagtcatctgaagaggttcaagtttcttgtgtaaaaaatattcgtaggatcataatacatgaaaccgctgctgatctcaccgaaacaggatcaagatggattagatgtgttagttttttgcttcttaacaaaaagaaggctataagagaagcattttgcagtcaaattagctcattccttgaagatactgttttgagttgtttatttcctgatgagaacacaccacagaaaagtaaagaacaaaaatttacagatataatcaaacatgcactggcagctgctgaagacccccaaatatttgagacccttttggaaacaactgcagaaattattgttgctgtggatatatacaatcagctctttttgttttctctaatcttattgattgatcagcttgataattttcacgtgacagtaagaatgaatgcatcaaggctaatacacaaatcttgcttgtttccatcttagaggaggtattgagttaatta

SEQ ID NO: 188118 - DNA, 1579 bp, Cannabis indica
aaagaaaaggaaaatattaaatccaaataatatttaataataatgtcatttgatttgttcctgttttgcattacacagtaaatgcataccaaagaaaaagaaaaaattaaatctaaataatatttaataataatgccatttgatttgttcctgttctgcattacacagtaaatgaaacttataattttttttgttctttctagttgttattgcatcatcttgactgttgtgattgtagtacagtgataatgttgttttccaaattgatacagggaatgtaaaagagtgtaccagtatgagcaacgaggtttttgatggcccggcattagctgagaagttgtctaaacttaacaattcacagcaaagcattgaatgtatccttgacttggtgtccatatactatatctacatggttatggtactattactgttctaaaatgtctcttgattccctgtagacctttttttacaaacccttaattttttgggtgtcatagttggtattattgtttaacaatgtatttgttgtgcaactttttttttaataaattttgctttctatctatttgtgagtcattctctatgcatgcatgtgcatttacttgacttttttcttagtatttgtatttgtatgtgtattttattttatttacaaataaacagttgcattacgcaagcagcttttatagcttttctagtttttttttttactttcctaacttttcttatccggggaagccattataatgttttggtggagaatttaggctaatgatggcctacaatgttaatgtatatggaaatgactggtgctttataccgtctcaaatagcttgatacctctattacaactcatttcagtttatccaagtaaaagaccaatctgtagaaacgttagatttatgatatggtgaaatgcaaattttactattcattattttataattccatgattttagcttttcttcttttgttttttattccataagtaatgaaaaagggggttgaagggaaaaatatagttctgttttattgcatggattttctttaaacatctgatcagcgttgtctcgatggtgtatctcttgccgaaagaaggctaagccgatagttgaaacatgggataagttctttaactcttcccagagagaacaacgcatatcttttctatacctggccaatgatatcttacaaaacagcagaagaaagggcagtgaatttgtgaatgaattctggaaggttcttcctggagctctcaagcttgtttacgaaaatggagatgaacatgggaagaaagtggcaactagactggtaggttcattattgttttgtcaactgccttctcctagctcttgtttgtatacatcagattaatattgcttatctagtagaaataatattgctaaaataaaaggaatgaaaattgcatattgtacttacaagccaaatagccttgtatggacaactggacaagattgaatgtatattcatattctttcatagccttgtatcatagcattcctagtggacgagatataatagctagtaggtactgtagaaaatattgcttttatttctt

SEQ ID NO: 188119 - DNA, 2986 bp, Cannabis indica
gatgatcccttgcaacaacaacattgcacatagtgtccaacatcaccttaacatcacagttcaattttatccagtcttggggggagggtgtcaagtttccgccaaactcgaaatcgagcaagggagcaacgaagcatgatgaacagcaaaagaagagtggatactatcaatactcttaatcacatcaaccggacatttattatgtaccttttcattcctggcccgccagatggtgtcgacagttaatgaagcataaaggaacacctcatcagaattgatgcctgtgttcatctcaaaatcaattgttagctcattcctcttatgtattttagtatctttgcaaactctctataatttttttgtctttttctttgctcatgacctaacttaggtaaatcaaacaattaaaacttagtctactaattaaagtagtggccagctgtcatcaagagagaaagccacctatcctcaaaactaagatgcccattttaccctcacttaaatgcttaatttataaaataggttaaggataaaataggttaacaccataattccgcctaatctagatattccaaaaatcaacatatagattccctgctaaataaaagggttctaagctaacccatgtgactaaatcggccatccgtcgcatattttatcatcaccgaacaaaaattataagaatcgtaaatcttgcatatgacataaataactcagaatttaataaaatctctaaaattagaaaattataaccctaatgcccatttttgaaaataggaccacaataaatataaaatcatatataattatatgatgtcaattattaatgctaattgtttttactaatccataatttaatcatgcgttcattataattatcgccctcgaaatctaacctgaataactctgaatattaagttcttatgtcggactctaactcccaggtggcttcctccaccttgctattcctccagaagaccttgaccaacactatggtcttgtttcgaataactttttcctttctatcgaggatttgaactggttgtttctcatagaacgtatctgtttgtagttctagggttccgtaactcaagacatgagtcgagtctgacttatatttcctcaacattgaaatacgtaatatattatgtacaactaataatactgatggtaagactagccgatacgctacctacccgaccttctcgagtatctcgaatggccctatgaacttaaggctcaactttcccttcttccaaagcgtcttatacttttcattggtgaaacctgcaagaaaacatagtcttctacctaaaattcaatatctctacgcttaggatgacaaaagtatatttttttgttgttgcttatatcaaaatttcatttctcatttcccttcttattcttattcttatatttttattacttaattccaagttccaaccaaatggacgagcaataacattttttttttggaggaataatcattccaaccaaatggaccagcaataacaaagagcgagttattaatattaatattattttactttatggacattttattgttatctgtatgaacaaacgtttgaagacacgaatatcaaaatcccttaaaatggtgatccttgtgatatctattatctaagcccaaatgattgtgtgaaatgtacaccaactttttgctaatttttactaagcaagtaaaacagttgagctttttcttgtcagactgtacaccattgtacagatcacaacaactcctacagatacaaatctacctcaagttcaagttgaaaagttctacttgaacttcaacaacaaagagtgtcaaaatgtcagttgttcaacatccagctcagtgattagccttcatcaacggacgaattggttaaatcaggtgataataagaagcgagtgttggttgaaaggaaagacttctcatccatttcgggaccaggaccaggaccaggaccgggacggggaccatctgctccactgctttgctccatatttaccttttcgatcagacatttaagtgattccacaacttcagacattggtggtctgaattccttcacaggctgttcaagtttcagtcaagctcattatgttttgttcataaacaacttacacccaataaaaagaaatcatatactcaagccttcatcaggtgcatacctgtatgcatagggagactacatcagcaaatcgagatagaattctgaaagaaaatgttcttttaatgcctggatcaaccatctgttccaaactctcactgtcatgaagccgtgacgaagcccatttcaccagacattgctcttccctttgtcttgaactgaataaaaaatgattgataatcaagtcataaaatcaaggttgttgataactaaacagaaaagagcagaaatgtacttgtcaaaaggtttcctccctgttaatagctccaaaagcaacactccaaaggcataaatgtcactttttctgctatcaacacctggttgaccatgttctggtgcaacatagccagtgtcaccaatagcaatttccgaagcctgtttatgtcagcaaaacagcaataatttatttgtgttcctttattttctttctaactaaccagcctcattccaaatactacttcatattttaggctactacatcagtgttgcttataccaaactagctataaatgaactcgaataaatcccaaataaataatatatgtaaaagaaattagtttgcatagtaaagttgacaaatgacaacaagtttcaactttcaattatatcaactaaaattcacagccaaaaaagaaaattatatcaactaacaaagcatgcaccttgattttgactctgttacttgtaagtggcctcaaaattgctagcccacagtcgcagacatgaggcataagttcttcatcaagtaagatgttagctgattttaggttgctgtgagcaagaggaggcgagacagtggagtgaagatg

SEQ ID NO: 188120 - DNA, 1255 bp, Cannabis indica
agggagaatttaattacttgctgatcatttaattttatgtacaatttagattatatttatttattttcacttaatgatcaacatccacatataccaactctgaatttaaatgatggaagaaattgattttgatttgccaaaataaaatgattacataaaagaagaaaaattcagcaaagatttttggccaacaaccacaatacaagagtgaaagacgtgtggatcgagattttagactatgactttgtttggctaggtttatgtttttggagctaaaaagcacaataaaagtgaaagttgtaccttatattttgttttgtgtgtttttggtaaactattatgtaaagatatgtttttttttaatgaaaagcaaatgatttttttatgaattaattagaaactattgaatttaaaaaataatttttaaaaaattcttgttggtagaagttacaaattttaatttatctcaaattctaatctttttaatcaatagagatatgatcaactgagatagaatcgtcgtggtttggtgtatagacaagtgatggggtttagcattagattttaccacaaactaatagtctcaagatcaataaagacacaactttttttttttttttgaggaaaatcatggttttggttatggtatatatggctatgaatgcaaatggttttctaattgaaggttatacctcttttcatgaaggtcaagtagaattagatttagcattagcattaacaaacaatgggagttcgtgggattcttagttagattaaagatctttattggtaaatggtatctttggaaactgattatctttgtattgtgcaagtcttttgaaattctttttctatgatacttatatttgggcatgttattaatgattgtaacaaattacgaagttagattaaagatcttcattggtaaatggtatctttggagactgatttttggtatccaatttgtgtagttaagaaaataattttagggaatatcgttaaccaatcataaagtgtcacctataaaaagtgttaggcaccaataataaccaatgaaataaacatattattaatttccaaatgaaattaatttttgtatccatttcaattaattattatccctctactttgaaatgtgtaaacaacccctttccttttctaatagccacatttaataagataattacaattttacataataaatgaatgctgtccacattgatgagatagggaattaattagtagtaattaaata

SEQ ID NO: 188121 - DNA, 2435 bp, Cannabis indica
aaaaaaaaagaaagaaaagcaatttgcttgagaaagctactacataatttgacagcctcaaaatagatgcctgaaatggtggtgggagacacatgagcatgtcaatgtccaataaggatggtttacaagtcgtaaatgactgcaaaatgaagtttctgagagatataatcaacatggatgaaaatacaaatagataaaatacagaggcgagatattaggggcaccatctccctcactttaaacagctaacatatctatattatagctgcacaccatggctaattttctcagtaatctatctagctaacttaaacatataataaacaaaataatcctcttttcttgcacaacgttgaccttccatcagctgagttgcacaaccacattgaaggcctgcatcaaggctttactttcctacgactgactaggttaatgtctttcatcaaaactaagcttcattaacagattaagaagtgcatgtgatagaagagtattataatatttaaaaagcgaggaggaaagaatgaaaccttctttgtcatttatcaccaatagtgcagcagcacctcctgcctgtgcaacttctgctttagctgtgaaatcacaatcaccgcgtatggacaaggcaatgcgaccagataactgcaaataggcaaagtaaattgcttcagaaatacaatataatgatttgatgggtatctacatcaaactaattcttaattgataaacaatttcttgaatctataagatcccaaaagtttcccattcagtacaaatttgaaaaggaattttttttatttttaagtaacttagggtgatcaaagtgattcattcctattcccttccaacaaacaagggagaattttttagaactacttgaaaactaaagttcatgaagaaataaaacataaaagttacagataaaatgaggggaaaacctttgatgaagatggggagcagccatttaagggatttgagaaaacagcctgcaatttgagattattatccgcaatagaaggcaacaaagccccaaaccttgcattgaccccgactaaagttttgccttcatcgccatcaatccagttgttaaccttaacctataatacaggaaagtattggaaggcaaaaaacaattagaatatgatttaaaacttgagctgaaaacacaattccaaaatagcttcctcacctataatatttgtaagacaatcatgaatcaaatatgtcgcaacataattataaacattgatagtttttagttattaaacaaaagtcccagagtcaaaaacatgttaactctttaattttatctttcccaaacaaccgcctactttggtaatcatgttcccgacaatcataaatttaaaattagtaatcaaataatttgccttgtaagaagattaatttgtcaataaaaaaataataataacaagcacaacacccgaagatattctactgcatgtcatatatttgtgatttgttttttcttagctatggaacttcaaacaatgctaaagatttcaactaggtctctatgcagtaaaagtcatttctctagtggtatgtatttggtttggataatggctcctgctatacagagaagcataatctaggattgccaatttacacggtcttatgatgttgataatagctagtaatcattcgtcattgacattgatttcataataaaaccacccccaccaaaaaattcatatacaaaacaaaataatcacagcatcaaagcctcaaaaaaagctcaagaaacccaatctgatgcaaaacaatagtttataatgcaaatctgtgaagccagaagaacccccaacaccaattctgaaatttaactctccaactaaaactgggttcctccaaatttaaatacaacatatatgttcaataaaaacgcatagcaacgaatgatctctagttagatcaagaagtccatattcctcaaaattcaatagatcaccgatccaatccataatcaacaaatcaccattctccgaaattcagcactcagctctcaaagttccaaaagcaaatgcctaaatggaatcaagtgaaatccccaaatgcgtttaacaaaaagaaagaaaatcaaattcaatgggaatagtaccaaattaaaagggttgttgcaaaagggggacttgggagaggcatcgtcgtcgagggtgacatcactacctccggcgaaagagagagcgaagagagagaaaacgagaaaaatgcggaggctatgaggatgagaagccattgacactcgtggtcaccgctcctcacgcctgagaaaatctttttgtctttatattcgatctcagaggggaaatgagaggcagagagagatggatatatttgcttgtaattagttagttattaatataaaaaaagaagaaaaaacataaataatgggaagaagaagaagattgtacggt

SEQ ID NO: 188122 - DNA, 3233 bp, Cannabis indica
aaggagtatcttgggtcgtcaaacgacatacgacccgcgtccaacgacattcgaccggcatcgagcgagaaccgaggatcagtatcgcaggaacggcgaccgaagccgtagtcggcgatctcagactgggtttctctgaactgtcttccgattggtttttccaccggcaatgtggctgaactgccaccgttttgacgcttcttcatcttctgcttctgtctccatttctgtaattttttgctgaaaactgaagctgcagaccaaaaactacctgcaatctcctttaaatccctctttttggtttgtgcatcgagatctatgtggtccttcatgggctttaactcaagctctggtatttgctccggttcttcttcttctatttcctcaactgattctttttcttcctcctcaacaatttcctccactctgtcttcaattacattccccccaacaatggcttcttcgaaaaccctaatttccccttcttcttcttccaccaaacactcctcgtctacctcttcctcttcttctatctcttcctccttggactcaaacacaggaccttgaacactcgacgaagcccctcctactccaatattcctagtctcaacctcaatctcaacagctccagtacctggtttcgacgactctttcttaccaccagggaacctctcgtcgtcttgagtgaaaagattccagagagtgttcctaaccctaacgtcacaagacttcctctgtggctcaaagacaccggagaatccctcgttcttagaagcagagaaggacttggttcgcctcaactctggaaaaaacgaagtgggtctgttacgattccccgaagaaggtccggcaccaccaccggcggcggctacaaaggctgcagaagaggaagaagacgaagcactgggcttgaaaatggccttaagtgcagcggcggcagtggaagaagttgggggttttcgagaagaagacgaagcagtagtagctgaggaatgatcgagtacggcgagtcgttcgcaaaggcatgaagggcagaagccagtgaaggactcctccggatgacggtcacaggaggtggaaggacggtggggctgcggcggttgaggtggtaatggtggttgttcagtgctcggattcattaccggttatggtggtggtctgtaatacccactctcatgttccggttcagtgatgagagagaaagaaaacaactttagagagagaaagtgaatgagaaagaaagattgagtgagagagactgcgtgtgagatactgtttggctccaacggaccgtagtgagaaagtgtgagaaagtgaagaggaaaataagatacaaaaacatatcaacaaattttaattaattattattattaatttatttgagtttttaagaattactgaactagtatggcccactcaccgtctttctgtgaaaagacaattttagccctatcactctactaagttatctaccatacatatatcacctgtttcgcaactttttttttttctttattactgaatttttgtaataaaaataaatatcataattcattttttttttaattatgaaaattattacacggttgtcatagttatttattgtttttttaaaagaaaaaaactttttttttttcactaccagtctaccataccatatataaatttatttaagttttatcttatcatttctgtagctggaaatttatcatttattctttttttgcttacctatcatttattattaatactatatataatttgtttttaattgagagggtaagagacagagtaggctaggctaacatgagaaaagaaaagtgaatatttattgggaaaaaaagaaaaagaaaattagttattattttgaaaataaaatttattaatcttgtttttctttttattaatctaatttgtgctttggattttcaaagattcctgtcgagagagagaaaagcaaaagtaaatcacgccatcacaatgggagttagagagagaaagcctttctctctctcatttcgctttctttctttctttctcttttcttttctttctttctttttctttttcctgttttgggttctttttgttttgggacttttctcttttctttttctaatttttttttttcttttaagtcgtttcgcttcttctttttgccttgtgtatatacacatatatataaaaaataataataaatctatggtattagtatttgagaacattaatttaattaattaattaattaggttcaaattttcaattagttataaatattattgatatgagactcacttgtcccaaaaaaaatccatgtgcataatgtaccttacaagattattgtaatcaatgtaatgtaatttctagatttattatgtgattatctcaacatcaatagtgccatcttaaagggatcctatatatatacaattcttttgttaataaatttgaacccaaatagtaaaattgtctaacatgccaaatgtgtaataattaaaataacctttttctaattacattatgattaagaaaaaaaaatagagtgtattaactattaaattattttcttttgtaataatatggagggattaataatagagtaatttgtggtataaataatcaaatttaatttaaatatttaatttttttttatagtaataatacttaagttatatttctgtaagtctgtaatcacctaagcattaaatgtcaagtcattattcacgtcttatttttttattagtatatttaaattttaaaaaagaaaataatgacctagaccaactagaatttgtcacgtggcaaacacttaacaactagatatttacaaaagttcaagaattataatttaagtattattatcattaaaaattaaatttaagtatttacttataactaaaaattaaacttatatatctatgccaaaaattattcttaataatattgattttgcattttcttattatgttgataaacatgtttttttgaacatggtataagaaagattgtgatgtgttgcgttttaaacatgtacaatatatataagttaaataaatatatattttcacactaaatcaattttattattttttgtttaaagcaagtttatcaaatcaaattggtctattagagcactcacaatgaggaggtataatagctaaaaggtaaaataaaatagctaagagttttaaattgagctccatcaaatgatttaaactcttagctattataca

SEQ ID NO: 188123 - DNA, 3567 bp, Cannabis indica
taattgagaattcaaacccttaacccaaaacaaaacaaatatttttgatatatgaaaaaatttagtcttttcatgaactttctttttcttggtgtaaactttgacacatgtagttttattaatttaaagtgaaattaatcttatggtttagtatttgactattttgtcttcttattggtgagtgtcataaatttctctgtttactaatttaaatcttcatgcaaactggtcctattgagtattggcatgtaattgcattattagtccataatggtgatgatgttaaagagagctttcatttctatttgattatttagtcaaaagaaaagccataaatatagctccaataaagcattaacatgaagcttttttgctacaataaatcaccattgaaaaataatgctatgcattcaaaattttaagtataattatatataattttatcaaaaattgacccttcctcttagctctattcttgtatacattccaattgaaattacattcgagccacgtggtatagactacttggatagtagccttgcattgccatgtggctcgagaaatagcgagttctcataatgtaaaggaaaaaagaaaaataattttttgtagttctgagtactaccaaccaatcgcaatgccacatagctcgagaggtaaatagtactaaagaatgtaaaatagactaattttgtaggcagtgtcaatccaattccgaccttgttgcagcaccggccgataaggtagtcagagacgaaatccgtcgagtatgcaatatttacagatttcaacaagctttagcctgccatgactgaccttacaaatgttgttacttgcacggtctggtttagaagacaattaagtcaatgtgtaatgtgtaagcaaactctctaaaacaatctcaaactgtcatctttcctgtttcaacattaactatatctatatctatatatgtatatatatactatgtaccaatagaaaagaaactggattcacaattggagatcactaaacatttttagcttctgcattacaaagtatgaaaatgtatcacaacatcaaacatatgatcattataaacataacaacactatttttttttcttttcaacatgaccaacatttcagaagctgaagctatgcatctttctcaagcaaaaattaaagaaaaaataacaatattttaaaagaaatcaaattcaagataattgttttgatcggggtaagcggctgaggcagcaccgttattagctttgtcgcttgttgatgatactaccggtgatgacaaccgctcaaactcaactggttttggtatctcgggtgggcttgcacatcgaatcaatgcccagtttatgccttcaaagaatggatgctgtttaatctctgtagcgcctcgtttgtatgccaatctattctgtggctctttcacaagcaatcctcttatcaaatctcttgctgagaagcttactactggtgtctcggggaacctcaatggttgcccgactacattgaagagagtagctcggtttcctgatcccttaaaaggggtcttaccgaacaatagctcgtataaaaagataccaaaagtccaccaatcaacagcactaccatgtccttcgcctttgatgatttcgggtgctaagtactcgtgtgttccaacaaatgacattgagcgagcgttggttggctcggctataagctctggcaatggagtgacttggttgcccatttcatttttcggcttcctttctttctttgatttgctcgaaaagaaacgaggaccaaagcatgttgtgggaaccgcacaagttggttgaatacaagagggttgaatacaagttggttgcacacagtaaaccgagtttcttcttaggggatcagattcgggtgctgatgacttgacgagtgttggactaacaacacagcgtagagaaagatcgaaatcagaaagcattatatgcccatcatccctaacaaggacattttctggcttcagatcacggtaaacaatcccgagcatgtggagatactcgagagcaagaagaacttcagccacataaaacctgcaatatcgaaagtcatacataatagcaacgccaattacagtcagttcccgaacaagcacaaatccaacgagcaaagtttgaaactttatacaaaaataatgtttttggagttcatcttagcaaagttctgaaattgttcactctaacatatcgaataaatcgttccatattaagggtagttagctaaatattggattagttaagtgttggtttcattagttaaagagtgtcttaactaactaaactaacacataactaatccaacagtacctaacatagctatatttcatcattaataactcaacaaatcagtttgacatgaattcaactaattaccaacaaggcaaattcaacaaaaatatgaattatgtaaaaatataaagccgaaagagagaaatgtcatacttaacagcctgctcggtgaaatgcttcccgggttgtctctgcctaagagtatgcaatcaccaccaggacaaaactccatcaccaaacaagaatacttctcggtctcgaaatgggtgtatagtgaaggaaggaaaggatgatctaaggattgtaaaatttctctttcagtctgagcccgaagcagtttctttcgactagctaaagaagttttatccataactttcattgcaaaataacattttgttcccctaagctctgaaagataaacacttccaatatctccacaccccaacttcttcaaaagtctaaaatgcccgaaattcaacacaccttcctttgttctaacagcttgaatcgcttcccattgtatgtcattagccttatgaggtttgttaacactgctactcaagctactacaagtactctcatcactcacatcactacttgtacttcccctacaaatactactctttccactctcaacaaactcgccccgttcgctaactttagcgcttccactagtcttagcaagactactaaccccatcactaactttggccgcccccgaagaagcaacattcactcctactcctagatcaccaccattttcgggtagagttttagttccaattggttcttggagtgataaactcgagtttaacttatctactaaacaactttgaggttgttttttgctctcaattgtttctaaagaaacctttttcgaaacaacttgtggggcggttttagggactaaatctcttggggtaactggctctgatttactagtcttggaaatctgtatagggggtggccttcttgagtttccttctgttttttgacttatttttctttgcctttcaggtgaaattctagtactggatgattttgatgccattgatataaactggttttgagatcaaattgaacaaaacccatttactcagatcccaatttcatcacttcattcacaccaccattcataaactcagttgttttcatcttcatgttcatcaaaaaaaaccaagtgaaatttctacaattaaaacaaaaaaaaattaaaaatcagactttaccataatgggaaaataatgaaa

SEQ ID NO: 188124 - DNA, 2588 bp, Cannabis indica
ttgttgtttctcaaatctaacatcttaactttcactttgaagaaattttgatgtttttcttcgcctgaatgtacaaaataacattgcttgtacgctatagaagaaatttggtcatagctttgtaatcttgttgatgcactgcaagtatcatccttaaaaggtatttggttttgcaggataagagttccttatccatttcaatggggagcaccttctttcgacgcaggtgaagcctttgccatgatgatggctacttttgttgctcttgtcgaggtcagtttcctctgcttcctttattccctagtctgccaatgaaaaaccaaaatgcaatatctctttttattttgacactctcttcattgtcgactaaattattttatttaattgtggtctgtgtattgctttggttccatgagttggtgcttgatatatatttcagtatgcatttgatttggcgcattctctttatgatgattatgccattttatcttattgaaaaattgtttctcacatattgacctattatgtgaacagtcaacaggtgcttttattgctgttgcaaggtatgctagtgcaactccattgccagcttctatactcagtcgtggagtcggttggcaggtaacaaatataacattttttgtgtataaactttttatcatatgtgattgattccatgcaaaatgcaggttgctttgtaatagctagatgaatttgattttcaatgtgttgaccgttgagacccggggaatcatttcctcccgaaattattgtcccattacatgtcaattgcttatgtaacaatttaaaatagacaaccctcccgcatatgaaattataataataagcatattgaaattaaactttaataagcatgttcaaatcatatgtatagatgaaaacttggctcttgtggatttttagggactcatgtgttcttatgtattgactaaaacatgaaagcaagtgcaacactgttagtgtgtttttcataccatttcaactctgcttgtgcaagtttgctgaccttctatttcagctcattgctgattaatagtatatttctacattcagggagttggcattctggtttctggattgtttggaacagtgagtggatcctcagtatctatgtacgtcaataacgacacatttctaatcttattaatttttaccctcagattttgttggctaatgagctgattttcaacatgaactaaattttttcttccttccgggcagtgagaatgctggccttttggcgttgactcgtgttggcagtcgaagggtggtgcaaatatcagctggatttatgatatttttctctattcttggttagttgtaaagtatgatatgtcatataattgcactattctgcaccagcattttgtacttattattaccattttaatcattgcagggaaattcggagcagtctttgcttcaatcccagcacccattatagctgctttatactgccttttctttgcttacgttggtacgaacttagattcattattttaagaagctggtccctttgacaggctatttcctagtgaaaatgaatgatgtatcctttcctttcatatctgtaggttccggcggtcttagctttcttcagttctgcaacctcaatagcttcagaacaaagttcattctaggcttctctctcttcatgggtttgtctgttccacaatatttcaacgagtacactgccatcaatggctatggtccagttcacactggtggaagatgggtaaggaccaaatatcattgctctgttattcttaaactaagctttcgaataagatcactccaaatttgattgtttattttgaaataatgtggtttctcctgttcttggcagttcaacgatatcatcaacgtccctctacaatcagaagcgtttgtggcgggctgtgtagcatacttcttggacaacacattgcataaaaaggatagcgcgatcaggaaagaccgaggtaaacattggtgggacaagttcagatccttcaagggtgacaccaggagtgaggagttctattctcttccattcaatctaaacaaatacttcccatctgtgtgagtgagtttggtgaagttaagaagttaaaagggtatttattaaatactaatctccatcttccaagttcttacttagcctctttctataaaacccattgttcactctgttaagtcagtataagaagatagttctctctttttatcctttttacgatgctttagtacatttatttcattatattcctttatgtaaatccaactgagggaagtgaatttaaaagtagcaatgaagaagtttgtttgttcttctctccatttgtgtcagtgttctctttttatcaagtgtttacaagtagatttcagactatgtcataaactcactaaaaagaaaaaggaaacctcaattagtatcacagttaaagacaactctattatcaataaaaaaggaaccccatttcacatctttgttcatacacttaatcagtaaatggtttctcatgaaaacaaagcatatattaacgttccctgaagttgaaataagattctgtgactgaaattgcaga

SEQ ID NO: 188125 - DNA, 5717 bp, Cannabis indica
aaaatattgaatttttgagctgtgcatttactcccatcttttttttttatgatggaatattattaacacaatattcaaattcattgattcttgcagcgtttattgactcatttacatattctttcaagtagaaagaaacatttgaaaatccttgatgatgttagtggaatcataaagccaggcaggtgagtaaaaatggtcacctctgatttttcacttaagcagaacattcatttctcttagtatattactcaccattggaaacttttcagaatgacattgttgttaggtcctccaagttctgggaaaaccactttattattggctttggcaggaaagcttgaccagaatttgaaggtgaaagaaaaaaagccatgacattattcaccacttagctttaaataatttcctttataaaatgaaaacaaaacttaaaaaccatttctttgcatcagttttctggaagggtgacttataatgggcatgacatggacgagttcataccgcgaagaactgctgcctacatcagccaatacgatgaacatattggagaaatgactgtgagagaaaccttggccttctctgcaagatgtcaaggtgttggatcacgttatggttagttcatttcctcaatcaattttcacccaataaagaataactcccatttgaattctaaagaatatcagtgattttgtaaaatctgtagacatgttatctgagctatcaagaagagaagaagaagctaatatcaagcctgatctagaccttgatgtttacatgaaggtaacaataatattttcaatataaacaagtaacaattcacatgttattttttacataattatgctaaggctattctttaacataatgtcataggctacagcaatagaaggtcaagagacgaatgtagtgacagattatattttaagagtaagaatcattaagctttttttttttcatctttaatgttgttaataagtttttattgaagttgttaatacattatcagattttggggttggaagtttgtgctgatacaatggtgggagatggaatgttaaggggtatatcaggtggacaaagaaaacgtgtaaccactggtatagaaactcaactatacttctatacattttcacaaagttaacatgtgaaatacctaattatggttcaaaactatacaggtgagatgcttgttggaccggcaaatgctctgttcatggatgagatatcttctggtttggatagctcaaccacataccaaatagtgaactctctcaaacaaaatgttcacattttgaatggaactactgtcatctctctactccagcctgcacctgagacattcgaacttttcgacgatgtcattcttttatctgatggcaaaattgtgtatcaaggtccgcgtcaacaagtgcttgaattttttgaatttatggggttcaagtgtcctgagaggaaaggtgttgctgactttctccaagaggtagtctctttcagtacaaatttctatatgtatatatgatattgaatcttacatgttatgcaattaaatctttaggtgacatcaaagaaagatcaagagaagtattgggtacgagataatgaggcttacagattcattactgtcaaggaatttgctgacgcatatcgatcgttcaaagtgggactaaaacttgaagatgagcttgcaactccctttgacaagagaaagaatcacaaagctgctttgacaactaaaatatacggtgtgaaaaagatagagctgctcaaagcttgcttctcaagagatatgcttatgaaaagaaattctttgtctacatcttcaagcttgctcaggtgagcaaaattatactaagtttcccatatggtttcgtaaactatatatatgttcttaatctgggttttcctatacttttttagcttgcaatatcggcactgattgcaaccacagtcttctttcgaactaagatgtctcataattcagtagaagatggtggaatttacattggtgcattgttcttctctgtgggtgcaactatgttcaatggaatgtcagagatctctatgactatagctaagcttccagtcttttacaagcaaaggaactttctgttttttccatcatgggcatatgctcttccaacatggattctcaagatacctatatcgtttctagaagtcgcggtttggatgttaataacatattatcccattggttttgatccaaacataggaaggtaataaacaagtagaaagaaaatgtcttaattcaatcattttcttcttccttttcatcatgtttaatatttttcaaattaaacatgttgcaggttctttaaacaatatcttctgttagttgctgtaagtcagatggcctccggcatgtgtcggtttgtaggaggtataactagagacatgatcaccggtggcacggtcagttcgcttatgtttctcatgctttttggattaggtggatttgtgctgtcaagaggtactttgacatcaaatactgtaaaatatttttactaaaaggaggtcaagttaataaagtaatccttatatgtttcacttgcttattttcacagatgatattaagaaatggtggatttgggggtactggatttcacctatgatgtatggtcagaatgcattggtggttaatgagtttcttgggagaagttggagccatgtaattatcttaaacaattctaagttagctttttttaaaacaaattagactgattttcggattttactttctcatgatgaactcaggctaaacccaattcaacagaaccactgggaattgcagttctcaagtctcgagctttctttgttcatgcatattggtattggcttggtttaggagcactgatcgctttcgtcttagttttcaacattttttacagtttagctcttacttaccttgactgtgagtatcagtatctatagctcataaactctaaaaacttcataacagtaatacatatagacatattaataaacatgagtatgcagccatcggaaggccgcaagctgttaagtgggaagatagtgagatcaacgatgataatgactcatcaagccacaaaactcagaaaggtaaaatcaattacgtttgtgtatttccttgtgatccagtctaatctaattcaaatgcagagagaagagaggatgttaggagcagagcttctgagcagagaagaggaatgattcttccttttgaaccacattccatttcatttgataatgtcacatactctgtcgacatgccagaggtggttacacacaagtactagtatattaaagttgtattgatcaaaaaattatgttgcctgatgattcgtgtttgtactgatgccacaggaaatgaaaaatcacggtgtcttagacgataagctggttctcctgaatggcataagtggttgttttaggcctggtgttttgacagcattaatgggagttagtggtgctggtaaaaccactttgatggatgttctggctggaaggaaaactggtggatatgttgaaggggatatcagaatctccggttaccctaagaatcaggaaacatttacccgaatatcaggatattgcgagcaaaacgatattcactcgccacatgttactgtctatgagtccttgctctactctgcatggcttcgtttaccatcaaatgttgattcagaaaccagaaaggttggtactggtcctggaatagatggttttaaatttgttttcacacattaattaacacaatttttaactgtagtcaagataaaggccaattgatctagccataatcgtaaatatgctatataacaattgacaaagataagttcactaaaatcgaaattttattgatttcaatcactctatttatttcgtagcagtttgtacatatagtttcaattaatcatttctatatgtttattaatcagtttgtaccttataactattgataataacagttgtttattgaggaagtgatggagcttgtggaactctctccactaagacaagcactagttggattgcctggagtcaatggtctctccaccgagcagcgaaaaagattgaccattgcagttgagctagtcgcaaacccctctatagtattcatggatgagccaacttccggattagatgctagagctgctgcaattgtcatgagaacagttaggaacacagttgatacaggcagaacagttgtgtgcacaattcatcagccaagcattgacatatttgacgctttcgacgaggtaaataacattttacattctataaacatggtttgtgtgttatatgatgattaaaagtttaaaacaagtggttgcagttgctacttttgaagagaggaggagaagaaatatatgttgggccattaggtcgacattcttgccatttaatcaattactttgaggtaagatgaaatcgccaaaaacaacaaaaattaatttttttagtgtttatccgcaaattttttcaaaaagttctaaattgaaagaacatttcacgttaccaagggaatcaatggtgttagtagcataaaagctggctccaacccagcaacatggatgttagaagtcaccacttcagcacaagaaatggctttaggggttgattttgctgaaatatacaagaactcagaactatacaggttggcagtctcacctgattataaatgattacactaacatggattggatggttaataaattaacaaataccgtttatactaattaccatgtgatgatgatgattataacaggagaaacaaagaagccatcaaaggatttagcataccttctcctgggtcagcagaactccatttcccttctaaatattcccagccatttctcacccaatgcatggcttgtttatggaagcagcacaagtcttactggcgaaacccaccatacaccgccgttaggttgctcttcagcactatcggagccttaatgtttgggacaatgttctgggatctgggatcaaaaaggtgacttgtaaaacttgcaattgcaacaaaattacaaaaacattttatctcatctcaactctcatagttttctctacattctctgttcatcgttttatttaacaatgcaggaaacggcaacaaaccttaatgaatgcaattgggtccatgtacgcagctcttcccttcgctggatcccaaaatgcaagctctgtgcaaccagtagtttcaatagaaagaacagttttttacagagaaagagctgcagggatgtattcaccttttccctatacattagcccaggtaattaattaacaatataaaacatgattaagagattaaaaacacttcttgattcattattcaataattgaaattcaatttccatgacaattatctgaaattcatagctaattttctctaaatttgtgcaggtgattattgaaatcccatacaatttcgtccaagcaacactttataccatcatagtatatacaatgataggattcgaactaaatctagttaaattcatatggaacctgttctttacattcttcacattgtcgtactacacctactacggcatgatgacggtggcagcaactccgaattaccacatcgcttcagtcgtttcatccgcattttacggaatctggaacttgttttcaggattcgtgatcccaagaaccgtaagagtctgagaaaccctaactacacaaattttatactaattaatcac

SEQ ID NO: 188126 - DNA, 2970 bp, Cannabis indica
cataaacaatgttttttttttctagggataaacatatgtttctttattgtttaccgaagacactcttgaggccaggcaacttaaggcacaaacattaatttttatggcaaaatagaacacaaagtcaaaacactagtgtttgacaaaccaataattaggtccaaccatatatttccttggtcttgattagttcaataacctataacacacaaacacatattttaactatttctattctatcacataagagttcaagtcatgaaaatttcttttgagctagcttgttcaaattttggaacttcaaattagtcaaggaagctcaactaaccaatcgttatacctcataatttatgcaaccaaaacccatcaaactcattttcatgcccacccaaacctttgagccagtgtacttattcctctctataaataacccactacattcatcatataactccacaacgaaaaaagactccccactaaatacattattgacatatccaacacaagtacttgtcttttttgtcatcaaaacatgggtttcctcaagattttctctattctatcaataatcatagccttatcactctcaaccaatccaattttggcaactcgccaccttttagacacaccgccggccgcaccacccccggcattgcccaaaattcctgctcttcccaaccccatattgcctccattgccctcagccccaccactacctaaaccaaatatgccacccatgccttctaaccctttgcctactcttccaacattgccaaagcccaacattgctccattgccctcaaatcctttgccagctcttccaactttgccaaaacccaatgtagctccactgccatctaatcctttgcctacacttcccacaaacccagccaataatgttccctcaattcctaaggtaacacttcctccccttccctctatcccaacaacaatgccttcaattcccaccattccaaatcttccattcctctctcctccaccatcaaattgaagagttgactagatactatggatggatttgggtttcatttgccacttctatgttctatctatgatcttgcatgtagttgagtgatttaaattatgtttttggattttgttctgtttgtattatttatttttgcctcagtttgaggatgtcattttcatctagtttttggtttggggcttggatatgtataccatttacagattagttgttgtatttttgttattgtactatgaataaaaattatggattggttaattatcataggattcatactaaactgcaaagaaatatgcacatgtactttattatccagtcaatgccaaaaaaaattggagaagaaaagaaaagacaaaagatataactatcgaaagtacgttccaagcttgcacataacatttcttatgtggagttctagttcttgtaactattactaacaaaaaaactccatcttcttaccatttggtgtgcaataaccattactttacttacttttaagctaacatacaagcattagtagtttgtatccaccaacggataaactgacaaggcatattatcaaccattattagcattgtcttcattcccatctctaggaaggccacacttccatcaccacagctgcttccaatggcaacctaaccataggcatcactgctgaaaaccccaactgtcagcaaccctatagccaaatccaacaccacttagaaccgaaaagactacaaccttctaaggctgctgctacagctatgctatcctcataagatgggatgggattgattacctctttcttcttccaaggccgtggcttaagtttagaaaacagtaggcctcacttagatcaaatcatcaaatacctgtgcttcatgttcaatcagtttgtttttatattttatgtagtatgtacggcaatattctatcggtttgattcatgtttatgaactgtggtctatattgtgtgaaatttatttcaatgtttagtgcatgcattttcttgtcaaatcattctcacaaaactaacaaatcaaacttgtcaaaaggtcattgaatatatgatgtgtttataaacaaatctgtgttttatgcacaaaacatacaagtataataaaaagaagtggtgcaatctgactaatttaacactacagttttagtatgaagattgtggattctatgagagcacgattctcattgtttgacagcacatgctaagatacagctaactctgtttcaatgtttgtaaaaaactaattctctactacagttagccttgatggcatcctccaatttctcaacacggtcaaaatcagctttaaaagtaaccatggtaataccttctttccctgtttcataatcttgcttgatatcttcaacttgaaaagattgcagctgaaaggaaacattttgcataatatggattctttagaaatcttaatccaaacccgaacacaaccctcaccacccccacccaaacaaaaaaaaaaggagagttccctttaatgcatacataaaagattacctgatgatacagaaggcctataagatcaaatgggacctcaacccccatagggacctacaatgcataagattagaccagagattccagacaagaacaattgactatgcaaatgaaaggttctgtctattggatggaaaacgagcaccaacatactaccttactgtagagtgaccagattcataaatttatttaaatgaaaaatagagtaaagaaaattgaaccaatcttctcagctcctaattatggttataaaaatttgagtaagttgtaaacctgcttttatacatatatatcattaaatgcctaaaaacaatttggaagcaaactagtcattaacgaaatccaatcacttttcacagaggcttcgaataactaaaaaatgcagcttttagttttgttataataagaaacccttaaataaaacaacaatatgaaactagcccat

SEQ ID NO: 188127 - DNA, 1889 bp, Cannabis indica
tttttttttaagtataataaaattttgaaaatgtccattttctccatttttaattataaatttcttattttttctttattcaaatgtaagaaaaatattatttctattaaaaaaattataattttaaaaacacttctaaagtataatatcctaataaaaaaataatttaacttttacttttggacccttaagctcttaaattaaacaatgagttaatttagtttgagaagatgttgcactaattagtgatgtctaattatgatattttcttaaaagcatcctttttttgaattcagatcacttagttaaaaaatcgtgttagacaatttagggtgactcctatttttgaagtgttgcctatataaatgcagataacacaaaattattaagtaattgcttgtgtgtacataataaaagatcacattatgatttaaagaagtgtagttgaaacctactactactaatagtgatgattgctaaagctttaaattcataatatctttgtctaatctttaagagtgagttacactcaagcttctaataataataataataataataataataataatgcacacaacataattgaaaggctcaagtcactatttacatgtccctactttgttttgtgatgtaattgagttgatatattggcttatatagccactatttcttacatgtcccataattgaagtaagaaatttttttactattctagaacagaaccaacttttcattggagtagaatctctagaaaggtttccattgaaaagttggaaaattatcatttgtttaaacaatgaacttgaagtcaacctatttagtcaaagcattggaataataatgaactattataaaatgatatgccattgaaataacaatatagtaatatgtttaaactaaagaaaaactaatacattaaactttttttttatgactttacaacatgaatacttgaaataaagtgggaagaaacatttacaaaacattcttggccattgaatgtgtgttctttagcctactctttcctgattgacttctcctatagcttctcaatggagttaagtagaatctcaatagaccattgttgtcgacgtgattgggtgaataccgagcactcctgttacgctgcaatgaaaaatcttctcttttcttaaccgaaatgcctctggtctcaccaccagcgtttggattactcaacaaaccatcgattttgcaggtgggttttcgacagctgacactatagctacgtataagcttttgacttactgatccattggtttcaccattagccactctccttagattctcccaagaattagggaccgtggggatcagccacattccctccaactaaaatatcttcttcgttaacaagaccgcattttggctgatcgcctcgctgtttctgcatcaagttcagaccccacaaattccactttctttgccacccttgtgatttcttcaaccccttttgagttcgcccaattggaggaaccgaatctgcagcatccttagatgaagttgattcaacactctccaagctctcatctttgacagatttcaacttggcatccctcaaatctctattagtgataagcaatttagcgccaaagaacaattcggttgttgctggagagaccttagcattcgaattcaacttcaagtcatcaacttcggctaaaccccctttcctatgcaaggagtttgagcaatcaaaactcctcctgcgcctctgcaaaggcaaagactctgaattgtagtagtcttttgtttgagctgtacccccgggactcatctctccatctttgaccaagttcgtgtctgatacacaactctcattctcaccatcagaaagcttggtatcctctacaaccgagaccattgga

SEQ ID NO: 188128 - DNA, 1639 bp, Cannabis indica
cacaaagttaaaaaagttcatatttatcaaactaacttccccaaaaataataaaattggtataaattagaaaagaaagtggaaccctataacaaatgggccataaaatcataagacagaaagcccatcaaaattggtgttatgtagatttttaactcgttgcgccgtcgtatacggtagtcatggaatggaacgacaaaccctaaccctaaatgggagcccttctcttctctatctatatatatatctacaccattctttagattattaccaactcggttggcttggctgctaaccaacattcaagtaagtaatatgtagattgatttgttttttgttttgaattgtgttaaggcaatgatgatgaaattctacctattttatgaggagatttctctcctgattacaaaatcaccaatggatccttctgagccttcaatcaatttcttacttttcttttctataatatatatgtatataattttaacttaatttgatgggtataaccattgatgtgatgataagcttcttccgaattatctttgtgtagaccctaaattatcagactacaattatctgatcaatggtttaactttttttaatatgtctaaagatatctattggtattttctttcactctttgttttttctgcttcttttgaatgcttgcattctaaaaattaaaagaattttttttctttcttttgggtcagtatgactatatattaataaaatgggtatttgtataagaaacaatttttcttagactcattttttgaaaaaaactatcaaaatcaaatgccatgttcttatgttagttttttaagatttggtttctcttctttctttcaaagactattgattttatgaattgactaacaagtagctcattcgttttagttggtacttaaatgtacaattttaaagatacatacaagtggaaggaaatttactagtaacttaattgtgaaagaattgttaaagaaatatgtagctgtatgtttttactttttagtaacccaaatcattaacggctggttagagattcaaacactgaatatggctcgaaagctcaaattatcttactgctaaatgtaatttagagagttcaatccaagtcagaagtaggagcaaatatacaagtatcctattgaccacttcccaatgaactttgcatttattgcacaagagagcatttgagatagatgaaggctgccagcccaaatgctatcttgtataggggtgatcatctttataagattgcttaacagtaaaatgtgattatgtttagaaatacttggaagttggaaaggaacgttttggaattacctggttgatgaatattttgccatgaaagatgtcgtttatggcaatgtcaacacttttatgaggttcaagacactgaagactttagtgttagtgtgacagtggtgctgaattttaatagtcttctaattgtgatttcaattgaaaaaatttgtaggaagtctttgtagatataattcagtagcactgtggggtatccattagaactgtacataattcagtacataaaattttgtaaaccgtcaaattcaaacaactcgcctaaattgaactgaaataacttaggaaaaatgcaaattgaaaaacccgataaa

SEQ ID NO: 188129 - DNA, 1086 bp, Cannabis indica
gaggaattcaaagcttggaccaaccactagatttgatgagttttatcagaataatggtttccttctttttccctaagcctaacacgtttaccattttagctattgttattataaataacatttataacaagggatttagggaaactacaacatctatcattcctatctctccaccacagcgctatccaacattaatcttaatcaagatcaatgaatcgttaaaatgattctaaagatacacactactttacttcaccacttagaaaagcaatgacttctacctacccagcagagatccaaaacatggatctagcattattcaacaatcacactacgtactattaacctttagaattaccaacgaaaagaaaagatacgattaggcagtaaactgcgcaattgaacattacaaaatcagaatgaagaagatcataatgtaattcccacctccagatacaaagagcggctgagatttgtgaaaatgaacaccacggactggcccatcatgctcatcaaatcgatcaatcaaagttcccatacggtagtcccatagctggatcacaccactgtgaagactcgcaaggatccatggcctcttactatggaagctgagacccttcactcgattactcttcgtttcaaacttcgtcaacatcttcactctacacactagaacaaaacaaaaccaaccaaatcaaatcaaatcgtatcaaaacttatttcaatttttcaattaatcaaatctggaaataattttctcaatctattttagccacaaagaaaccagaacgaaaaatgaacactcatacataaacacgtatataaatcatttcctacagttgctccataacagcacaggtacacaattcaacacgaaacgaaaatgtaacaatgaaaaacgtaaacagatctaaatcaaagaaactccattaacgaaaaattcacctcagatcttgaatcagaaccaaccactatagcatctacaattaacgccactcccacccaggtcttgctatgtgaaatatattttgtgtgtatatatatacgcgtatagagagagatcggaagaaagagagagagagagag

SEQ ID NO: 188130 - DNA, 2174 bp, Cannabis indica
tctgctaatggcttcgctacttttactgctttttggtacttttctaatattatttaattattttaatttgtttgaatttatatggttccgggaaattatcttcttgggagtttcggttttttctattatgcatgtcagtttggatggaaaattaaattaattggatatgtacgcgttgtgggttaatcttctattctaactgaattgtagttatattcatggttgatttcaaacgtgttcatacaccaatgtgttctattctaaggtgtaatgctgaaacattaggacacacaatcatagttatagttgcgaaaagtattttagtttaattgaaatgtattacaatttgttttcactgattcttactctatacatgttcctagacgtctttttagtcaggatactgatgttttgagaattgacagtgaagacccaaaattttaagcatttgtattatctcatcgaagtcagttttatgcttttggactcttattttggagagttgaaagtatacaagcagcttttttcaaccttctttacaaataagtttagtatttgagttaattcaggctgtagattttttttccttgtcatgatggcgctgttaacttgatatgtgaaaaggtgtaagctggttcattaaaattgtactttggcacatgcactaccttgattattatgggcgagattttgataatttatataatttcaggactagaaatacagatatcaaaatcaaatgctcttatatggtctattctgctggtttgaaatctttattggatttttatcatttatttatttttcatgatggatttctgctactcagattcaggttcaaattgctaagtaaactgctcaaagttaaaaaaaattctcatagaaatgttaaacaatgttctattgtgtatcccctctaactagactaccaagagcttctatgtttattcttgtactcaatttttttcgtccttgaattcagctatttgattgcatcaatgggacttcaagtcctgtggagcttaggactggcatgtcttgatgtttatgctttgaggagaaagagggacctccaaaatccaatcctagtcagcctgtttgttgttggagattgggtatcttactcatttcttatatgtcatagcatttctttgccacaaagaaatctctaatcattatcatgtggatcatatgcctaatttttgtcttaaatttgagagatgattttgactaatctgttaaatcctgctggactttttatgttgacatttgctatctctattgtcacaactttaaaatgttgtggtccttgttttcttccattatcagcatctcagtgatcattcttaaaaagctggcattcatatcctcacagtagatcagacaacaattatataatcattagtgtgaatcaaatactggcatttcattttgtttccccctcttagatggataaattgaaactagcttcctcctcattggtctttgtgttattgttgatgtgccactttttcattggctggttaatgagccttaacacataataagaaggataattctggctttcacatatggtgcaggttacagctacattatcactggcagctgcaagctcttcagcagggattgtagttctatatgcgaaagacatgaatttctgcacagctcaatttcatctcccatgcagcaactttcagatttcagttgccttggctttcctcacatgggctcttattgccttatcatctcatgtgatgttttggatcttattaacttcagtttgaaagactgttgcgtacctgcctcattatcaagacaagtgctacagttctatagcaagcaattactggcttcaacagtctttggggatctctctcattcagttgcatcatctttgtgtgtgagcgcaaccttgtccacgatcaacctgcgctgcaccctcgtttcatagggctccatccatttattattaatctcaagtttggagctgatctatcaaaaggaggcacatttggattcaagttttacttgctgtagattctaaattttacattgttatatacttgtgatgaacaaagacggtaatgaaacaaaattttgtgtaactctcccatatgtttgcagaagttgtattatctcttgaaatgatgtgtaagcgtcatgcaaatgaaatg

SEQ ID NO: 188131 - DNA, 2472 bp, Cannabis indica
ctcatcttacttaccataatagatatgatatatgatatatgttaccttcattttgtaatttctattgtagtttatcatggaatttatgtctatcttacctttcacatttgatgatttttatgtaacttttcatcacattaaatgggagagtaatttcaataatgacttttttttcttcttttctttttgtaaggactttccatagtgaattgacaattttttttgttcaataatttttttattttagaagaattatatgaaaaaaattattttcctttcatatagaatttatcattttagtttgaggaatcgattcaatcataaataaattagttaaaaaattctttttaaaatattaagattgttggatttaaattttttgtagaattctgtttgtttttactaacttgacaattgtctatatactaaattgttctttgatatctactaataaattttactttaaattttaaaatgtaccaaattgtacttttagacttttattagcattagtaaaattaaacaaaaattattgaatttaataataatagttccacataaatttttaacaggctgaaaattttaaaaaatatatcaaaattcgggttgacaaaaatcataattaaccatatatatatgttttaataaaatcatatcaaatataatatttttaattaccaaaactctatatgagttaaaatttaataactactaagtataaatatcataaattactcccacatcaacactgtaaggcaaatacatattttattttattttttctaacacaatatataatattagaaaattctataatgcacccccttaaaaagatgtatcaatacatctctatctgttttaatattcgaaataattttttagtcaatttttttttcatcgtcatataaattataattatttaatacatcttgtaaaaattttaaaattcaaaaaacttatgtcgaaaacaaacagtgtgttgcacgcgtgattattttattttatagtaaaatagactatttaaatattattttttatatggtaaattattttaaatttttcaaaattttataagatatctcttataaatgccaaaataaataaaggtacatcaatatattaatctaaacaaaatacacggtagaatcaccataaccataaccaaaatatagccaaataattttgtgtggttggtggtagcgatttgtcacggccagtgggtcccttttaatttttgtgattgagtacttggacaaattgtttttctttttttttattatgctttattaggaaagtgacatttcgatctccaaaataaataacaattttttttttcttttgaaatggaataaataaacaagttattagcacacattcccatcccatctacaaaataaataaacacaaaattaaaataaaaataaaagagagattgagcaagaaagggcggtgaattgttgtagtggagaggaagagaaacaaaataattaatgagaaaataaataaataaataaataaataaataaaagagtgcaaaaaaggaaaatcgaaaataaagccagaatcttcgcattaatcaataatttcttcttcttcttcttcaactcacaattccatacatttagattccccttcttttaaccctaattataagacacagtgagactacttttcataagcgtcgaccatcgtgcattggtgattggaggtggtacgaatatatcccaattcaattcaattcaatttcattacgtattatattactattatattattcttattctttaatgttttcttggattggaatttttatgaatattcccaatcaagcgtcatccttgatctaacttttaccttaaacccttaggatttttcttcactctccccttccaatcacactttggattcgatgggttatgcttttgtttgattcgcaaggggaagagcaacccacctagatcttaactttgtcctttttctttttttttttttttgtgggggtttttggaattgagtttcttagggtttagtttttctttttgcttgtgttattgtgatgttgaaggtagtggcaatggcggcatcggcgctggtgggcatttgagtgagaggcattcgttatgttgttgtcgaagaaacaaggcataattcgcttctttgtcaaggagatggctgctcttacaattcccagcgacgcttttttctacagaggatttcaaatcgacccctcctcttcttattcttcttcttcggagcaatctaacttcaccattccactttcgtcgcgttattatagtacttcttcgtctgtgagaggttgctttgattcagattctcttactaatcacaacaataatcgcaaccctcgtggtcgttcactccatactaatagtagtaaagccaacaatgggggtcgtctaagcagtggctttgatcaccataaggctcaattcgttcgtgatttggaattgg

SEQ ID NO: 188132 - DNA, 3012 bp, Cannabis indica
gaacttgactctgtttctttttcactctctattttttgcagcgttttcagtagcattgacttctgtttgttacttggattacagtcttgttcttagcttctggtcttctctttcctcgttcttcttattcttcttcatcaccatgtacgttttcccggaaactttctcttttttctttctctgatgatatccaaacctcggcgcgttttcctgtctttaccagcttcttgatcaggatctgaacgtctacgttaccagtgactgtaactctttgttgttgagaatctataatcgtggtataaacacctgaagaaaatggtgaccaaaattaaagtatgaacagagacaaaacagagtcttttgcaaagaaaaagaaaaaaaaaaaaaggagaaactttacaatgccattcttaaattgtgttacttttagtattacatttaagtatatacataatataccatcaattttctgaagagttttcttgacttttctcttgcaaccttcacagtgaatggaaactttcaaatcccatgtctgtaaaacaagaaaaaaaaaccaagttatgaaaaagaaaataagagaaatggttaagttagaaatataaagtgaactttactaaccttgtatttgagtgattcggaggcctcttgagctgagattgaagccattgggaggtaaaaggaccaagcttgaatttgagaataaggtatatatgaaaaaagttaggagctttaaatgaagtgtttttaatttgaagagaacatgaagaaaatgattgaagaaaacagccaaaacgtctactctatagtctgcaatacatgtactctgttagggagcaaagggcctcaaaacattacgtgaaaatgacaaaagaaacttttgctccctctttactctcttccgacttagattttctttattcatgtattttattatttgagaaaaatatgctttatactatactagcttgagtatttagattaatctttctcataatgtaggatctctatcaaaagactcttacaagaagaatctatctattattatccattttggcctctaagatcctcttattgtggaccacacttgtgtcaaggctgagaagaaaacgacaacaaacaaaacgatctgtacccttaaatttcctttttttttttttttttttctcttttactacttttccattgtttttttctttcttttccttgttttgtgtattgtgttgtactaatatgcttttaaatttgtaaaataaaaggataaaataaaatgaaaatcttacaattccctctgcattgattgacaatacctatcactaattaataccatttctcttgctcaaaccaaacaaatatttccattatgagtaatgatatggtacacatacagtgagtacacatctcattactgaaatgaaaacagagaaagcacagtactaagtatactactcactcatgggatagcagaactttttaggattctcttcttgaaaaaaaaaattatactcttttgttttgtggatcaaaattaccaactgctgcccttctctctctaatttatttgttttggaaagatagtcatcttggaaaatgtacacattaatgcaaaagatgagcttacatcatcacaaacaatggcattaatgatgaaagacattgcatgccatagacctcatagcattaatctaaacaccaaattcttaattgaacccaactagttgatctgatccttccttgtagtcaaaggctatgatagtttccaacagctcactcattcaatctaatagtgtaatagcttcactattgatattcgcacattacagtgtattgcagataacacagtttctcttagtccctatatatggaaaggtcattgaattaacctaaaacagaatgttaacccccaaacaaatgaagacaaaaactgcataaaaaagatgcttcaattgaagataacaggaaaagttatacataatttgcttcagataacagttcatgtcataaaaattgaagacagcaaggtcgtggcctattctaaactctaattgaaaagtaactcagcgaagctataaaccactatggtcattcattcatgcatgttccactattggggggaccttcaagttttcaacttctttgttctccacctcctccttgggcaattcatttacttcttttccagtcttggtatcttcggcctttacaacatttcctgagacttcctgcagctacacaagctcaagatgaattaatctaggtctagcatctgtcatgtattgtcaatttatcagagtaaacttcagaatcattttgatgagaacatacccccaagtttctaagactagtggaaacatcatcttgttgctgttgaagggtagtcctcaaatctagaaattcctattaaaacattttaaaaatataaattaaaacaattatttttatcataatgttttgcaggtcaaaaaaatgtggacaatgtaaagcaccacttacagtccgaagttgatccacttcagtgttgagtgatttcttcagttctgaaagctcctgcatgaatgaaaagaatattgcattgacacatacatagaaaacatccacaacatgtaaaagttaaagcatttatcaatcccattttatcatctatcaatcaaaagttcgaattcttcaaatatacatatcctatctaataacacactgaaaaacacaataccatgaaaattcagtgcctcccagttcaacaaacaagactgcagacattattaaaatcatttcctaagtaatgatttagctaaatacagatcaagcatcatcatttgcaatccttgtagtgtacactatttaagttcagaatgccaaacacaaacccaattggtagttttggaacaaagcgatgtaaaacagcattttaaaaagagaaatgaaacaactcaactaaagaacacttacatcgcggtaaaccttgacttggctatccaactttgatctccaactttgtaaatcctaacaaaaata

SEQ ID NO: 188133 - DNA, 2540 bp, Cannabis indica
cctattcaaaaacatttattgttgtattatccaaaatgccatatcaaacaactacccaaaacaataataataaataaataagacttgaagtcaagccgaagaattaatgaaagcttaagttgcatttcttcggccacatttattttgcctttatttatacccacaagccatgatccacgagggaggtacgcggtggagaatgggtccacctttgtgtgccttaatcatccacacatttaataaccaccacaaatttgtagtgactagtgggctctacctctaagttttgtccagttcccactacaatacaacttcagctcttatagtagtacccaacttacattgttagttatttaataccatcttattttaacttataaaacaatgtctacaatgaattatcctaagtggaatttaccggcaaaatatatgaaacgcacaccatacgtcaatgtctaattacattatacgacataaactcttatcttatcccttgatgatgataatattataataaaattagtgacctatttgagtttatatggatatataacaattaagttacctaatgtagttgttgtttatgaattatgtttatgcttaggccaataaagtctgagtcagtggaatgagaaaaggccactaaccaatcaatctcctttatcttagtcctcctcattagaagtttccgggtgttatggtacaaactacataagcataatcatctctttatatctcgttatctagtgttatctttcctctttggaattgttaattaaagtatgtgtcgttttgctctctcactctctctactacctaattaaggtttatggtctataaatacatttgtcttctcttactctaactacatgtacctctttcctatccttacgagaagagaaaactgtcattaaacaagcagggaaaaaataagaagcaatatgggtggaggcaacggccaaaaggcgaagatggctcgggagaggaacttggagaagcagaaaggagctaaaggtatatataatacaattaatgcttttattatttattattattgtttaagaactttaataatagttttctataaatttcccaatctttatgtatgcttttttgctacccgattagtaggactgtggtaagatctattcttattgtcctttttccaatacccaattgagaaaaagtcagcaaaatccttacttaagactcaaatttggcttcccattaatccagtagaaagtatatagtttgtatatctttcattttcattatgtttatgggtattataatatgaatagacttatcatggttcctctcttttgggtttttaggaagtcagcttgaatcgaacaagaaagccatgtcaattcaggtaagtacagaaagatgcaaaactccttgatctctctctaatttttcatccgaaaagactcttctttttacaaaaatcagtattgaattttgcaattttcaactttcaactaagcttccaatttattgtgaactatggtttcagtgcaaggtatgtatgcaaacattcatttgcaccacaacagaggtcaagtgtagggaacatgctgaagcaaaacaccctaagtctgatgtttacgcatgtttccctcatcttaagaagtgaaatggtcatgtttatatataaggaaagagctcgtagagatgtctttcaactgaaccttcatcattgtatcttattcgccctttaagtttgggagtttatcaaaatgcgtgcgaagtcatgatatgctttaatattaattacctcaactgtattcactataaactacaaacaattttagtcccccattgtgtgttgaattacaagaatatgcttttttgaacaaagaataggcttgttttaatttcacgatatttttcacaacctgaataaactagaataaaattttgtacaataatggcgcctgaggagatgaactgcattttatactcaaaaaacttatccaagtcaatctcaagattaggaagtggtacgcagaagagtgatgcaccagctttgaccatcaaaaaaccaaagggatacattattttacatctgacctacaaatgaccaaaaatatacagattgaaaaaaattccaaaataaaactacctaaaggagaaagcagcaattttttcatcaggaatacttgttatttggataatcatagaatgattaaagttaattaactataatactaaaacataatcattttaatgcgttttgggaaataagtataaactagtagtgacaacaaataaagatgggtggtgtcaaagtgataaacgtttgggtaaggtctactcaaagcactctgtattaatcccttgaagacacgatataagaaataagtttacaatacaaatagctcgcagggggtaaaaatattatgaacatcagaatacaacaaaatccagatggatggccttttcaaggaaatcatgcaatttagtgaccattaatcgaaaaagaatggtctgaaaagaatatatgccacgaccggagttttaggagactataggct

SEQ ID NO: 188134 - DNA, 1832 bp, Cannabis indica
agagagagagagagcatacagtcttcaacatccttaagctggtagtaatgtggggctatttcaaccaaccactctggctttagttccgtaacctgcagtttgatacgtaactagatgtataaaacaatgaattgaagatagacttctaacaaaatagagttcagatttaaaccctgcaatgggaggggagttacctgtctcatatattctttgcttgtaagcaccaactcatggtatacaacccaccttggaagcacctgagaacatgacaacaaaataatgaatacaacatatgtagcaattcatagaactccttgtgatcaagcagtacatgtgattgtgcatatgacacaagtgcaattttcactgcaagtgaaatttttgcatgcctcagttcttttgaaagtaaatgaaaggtgtgtataagcaaaaaaatgaccaggacacaagataatggctagaacagctgatataatatgatccctatggatatttgcgatgtaaaattaatttactagcccagagcaagtagtcaatagcatttattgtactcaaataacaagtactaaactatccccagttcaaaacagattcagctacccacttcagaaaagacatcatgactaaaatctatttagcaaattgaacccaaataagaacaccataaaggaaaacaaagtgacaaccagattccatttacctgggcaagccctgagctggggtgtatatggactgtttgtggatgcttgactgttcgataagaaccattcttttgcagcttcgcagaatgagggaagtaacctgaaaatagctttctttaataaatagttttagcaattaaaagaaaatgaagctttaccactatatatggtcattaaatttgaaacataataaaaaaaattaccagatgtaattgatttctttatagcttctaaatcattgggatttgagactagctcaatctctactctctccagaagtccctcaagttgatctctaatatctcttgcacgtttcatactcctaacctacagcaatgagcaactataagattggtcgagaaaagcctcataatttttatgtgaaggattttattcaatgaatataatagatagaacagagacaaagcacgacagcatggggacaaaagattgctgaaacaggaattgataaataagcacccctccttatgggctttttttgtatgcaaaattgtattggattggactacctaattttatactgtttagtgcaacagtatatctaagtatcgttgcagtatagaaataaatgaagtataaaataaaattaaaaaaaaattataattataagacaataaagtatttaaataacaaaaaaaaaaatactattttagaccttgtgttttgcaaaaattacagattaaaccctctgttttgttaaatgaaaaatggaccctatggtggcgtttggtaacacttttttaattaattttctgattttaaaagtagaaaagtgaatttttttttctcaaaaacatgttctataaaactgtttttacttttcaattttataattagaaatcaaaatttgaaaaacaaaaataattactttcaatatttttttaaacagtttttttttcttaatcaatcttttggattacgaccagacccggacccaaatcccctccccacagcccgacttttaacttgaacccgaatccgaccccggacctagacccgacttacataaaatcaaaaaataaaaatgaattttacagagcacacttttattttctgtttttaaaatagaaaaacaaaagtggttacagaacgtacttttgtttttcaaaa

SEQ ID NO: 188135 - DNA, 1362 bp, Cannabis indica
gtccaaattttttgagtcaacaaaatgaataaataataaattactatttactatattatttctctctcttacaccctcttataaataattcaaaaaataaataaaaaatgaatggaaattttataaggaatagatttagtgtaaacatgatacagtataatgaaaatttgaaaactcacgatcataaaatgtacggaaagactatgtaaaagctacggaatttggactttatatttggtcatatgtgcgacttaggcggctatgagatttaggaccatactatacactgtatacacccatcttcttcttcattcttttacatttaataataataataataataaatcatacatgctttgttattttgttatgttccaatattttattttatattttttttaagctaccaaatcgatgttaatttggtgtgataacgaaaataaaaaataaaaatcgttggggtatttattgcaattcttataaatttttgacttttaaattaatagtagagaatagagagcctactatttgattttacgtacttgtatgtatttttctttgaataataagcttgtagatgttgaaggtgtgtacgttgggttaggcgttttcttttggttgcagttaccttaccaggactctaactcgagaagtggagtagctgatgtcaattccattgttcgaccatcggcgcctcaacacgaatgtcagattgtttctgattgccgcgtcggttttggctctcgctctctcttcatgatctgagagtttatgtaagtttttagcctaataatatttttcatttatttagaaaaaatcatctcttaattttgtcatataaaaagagttttgaaatgtatatataaagaggtttaatggcttggtttttcctgttgtggccgaagctattggagttcaggaggctttgagttggatcaaagaccatgcatggcttcatgtgacattggaaacgaacggtctctcggacgtggttcaagctattcgaagcactacaattatgctttttatgtttggcaaaattattagtaattataagacttgttatgtaatttgcgtaatgtttctttttattttgtaaaacgatcagcaaagcaaatgtagtggctcattcctttgcgagagcctctctattctaccatgattgtcttttcaacttgaaaactgttccgattaatttgttacttagtttgataattgagttactcgtttaaaaaaaaaaaaagctaaaaaaatattgttatgttttttttttcttgtcagcgaacaaatattgttagaatattataatcaatacaaaatagtattgttcaaaactgttcgattttgttaaaaaaaaaaaaa

SEQ ID NO: 188136 - DNA, 3165 bp, Cannabis indica
attataattattcttatgtaatagtgtctggggaattaattactgttagggatttggatgaatcatgtgttgttgtattaaccactttagtatctgatcaaataaacaacaatggaaatgctctttcattcatggatattcacaatgaaatggcctttggatttgagctttcatggactatatctaccagattccaacttcaaactggattgagtaaaaatatattgcttagtcttttaacttggcttattctaacaactacttttgtttttatgggaaaattaattatctgtttttttttttggatgaatgcaggtttgtggcaagaatttttgagcatccttagtagtaagtatatattttattcattctttatttcaaaaaaaaaaaaaaatcttttatatttatttcagaatcatcttattgatcatcaagaattatttgtcttgcagcttactgtattttggcattaataataattggtaagagcactaattttaagattattcatctcacttttttattttctaaatatcaaagtagaaagctcttattttaaatcccaagaatctggattaagaaacaaaaatcttcttaataatctcaacaaagagtggtgtttggtggcctatgaatgtatttaaatttttgttttgtaatcgctcagcatttttctaaacagactctttctcttgatgatgggagagtttagtggtcaaaattgccagagttgatgtaaatttttggatttgttttggcttaggcctaaggagaagttccattcattcaaaataaaaaataaaaaacaaaaacaaaaacaaaaatcttcttcaaagttttgcaagaagagaaaaatatcctggttttaattatacttgttattttgtgctagtagttttgcacattttgcttcctttttttaattaagtagttttggtggtttaaatatcatttttttattgaagttctatttagaataattgagattttctaataaagttatatgatgaacaaagacacttaattataagcacttttagttagagatacttgctttgatttattgagttaaaatactattgccatttctcaatgcaggaggtttcattgtaggaagggtcatattagggactatatgtgtgtgtattttgttgatctacaaatggagaaggagacatttatcaatgtatgatcatattgaagaattcttacaaagtaataacaatcttacaccaataaggtactcttattcagatattaaaaagatgagccatggatttaaagataaattaggtgaaggaggctatggttctgtatacaaaggaagacttcgtagtggtcatttcgtagcaattaagatgatggatacatccaaaggcaatggagaggatttcataaacgaagttgctacaataggtaggattcatcatgtcaatgttgttagattgatcggattttgtgtcgagggttcaaagcgtgctcttgtatatgattttatggcgaatggatctcttgataaacatattttctcaaaggaaggaattgagtctttgagttacaagatgatgtttgaaatgtcacttggagtggctcgtggtatcgagtatcttcatcgaggatgtgaaatgcaaattttgcatttcgatatcaagcctcacaacattcttttggatgagaattttgtaacaaaagtttcagattttggcttggcgagattatgtccattggacaataatactgtgtctctcactgcagcaagaggaaccttaggatacatagctcccgaattgttttataaaaacattggaggagtttcttacaaagccgatgtgtatagttttggcatgttactgatggaaatggcgagtagaaggaggaatctgaattcagctgagaagtcgagtcgagttcatttcccatcttgggtttctaaccaatttagtgaaggaatggacattgattttggtgttgacacaatggaggaatcaaagataataaagaagatgatgatagttgcattgtggtgcatacagttcaagccttctgatcgtccttcaatgaccaaagttgttgagatgcttgaagaacaaactgagtccttggaattgcctccaactaaattctcttactattcaaatgaggatcatggagagtgtagttcatcctcaatgtggccatccacagggtacaattactcagataatactactttaactcatgtaccaaattaaggataagatttcaactacatatatttgtaatgtacaagaaaaaactataaataaacaaattatttattagttcagcttttcttcttaaacaactctgttctttttatggttacaaaaatcaaacttgatcagaccctgctaaaatctccacaaagtatccaaaaagcataaatacagcccaagacaaggacaaaaacattgctccctttttctttatgtaagttattatacataataagtctctgaatttttgaggacccttgtgacttgtttgtcccaataatccaaaattagatcacatttttaagtaaataaatactctttggtcaatgtttctgactcatatacacttgattctctcatttcatattgtgaaattttgtgttatcttttctttatttccaaagctattactcaatgctcattctaattcagatatagcttctagctctggattcttgcgtcttctaggcttatcaacaattgattttggttgaccagtagagccaaaaggattaggaggcaatgttaacttttctcctccttcaagcatttgtaccacaactttcatggaagggcgatccgtagggtgccactgaatgcaccataaacctacaattgcaagtttcttggcaatcttagcgtcttcttctttctcgatatggattcgtaagtcttctccttcttctaggagattatagatccattcgggataataaacttgactagtgttgtcttctttaacatctgtaatcttcttcccaccaaccatttcaagcaacaccatcccgaaactgtaaatatctgacttgtatgaaacatttccaaagtttctagaaaaaacttcgggtgcaatgtatcccatggttcctctagctgtagacattgacaccatactttgatcttttgagcacaacttggccaaaccaaaatc

SEQ ID NO: 188137 - DNA, 1572 bp, Cannabis indica
agaattactcaaattattagtgttataataaaccttctgtaaatcaattttaaaaagacattttttttatagattatatatgcctttggcaaactataatgttgtgtattatatatctgcctgctttttataaaattttagaaataatatctgaaaccatttctctaagtctctattacaaattatttttatcgctattttatgaatcacattgcagtaaataattaatttataattactgaattcgaacacacgtctttgaaatgagaataatgataataacaaagattcctttaattaagcaggttcccaaaattaagaaaagaaagcatggtaatgtattgtgttttataaaaattcataaataatttagcatcttttgtttttgataattccttttaactttatcaatttgattaatattattaaaaatatataaaaaaaaaaattgtatttaagtaaaacacatactaccaagttatacaaactgaattaattgaagtatgttttaactgaattgttatctaatttgatagttgatttgatggttaataaattaaatttatttttttctttaaaaataaataaataaaatcatatatttgtcatatacccaaataataaaatgaaaagggtaaatatatcaaaaatttaagtttgtaataagtcactcaaatttagtgtatgtttattttaacaagtacgcaatgtttgtaaaattaaattttttctttaattttcgtcagtataaattttattattgtcttaaataacgcatatatgaggcacaaattcaacacaattggatttaaacaaaaacgtgtagtatgagacgttccttccaaatgttattttaataaatttaaaacggagtctgtactaatgaaattagaggaaaattatagtttcataaatattaaatatacttataacgttaaaaataaatattaaatttaaaattaaaattttaattacttatacttgttccatttataacaataatatcccataatataagaggggccttaataagatttaacacaacaacttgtaaattgtaatgcttactgaattgatcacgagattcatttataaatatatatttctttttttaattttgtatttttctacaacttgctacgtgatgttgatgttatattttttttttataatataataataataaatattttttttttcaagatcagagtcttgagaccccactttataataatttggtcaaataattcgattgagtccaatttttttgaaattgtatcacagttaagtcctaacttaatttgaacttttttatcatttttaggtttacaattttttgcaaaggtaatttggtcaccaaataaatcctatttttgttctttgtttttgaatgttatagtgtacatagtaacagattaagttactattagttttgcaatagaacctttttggttgaaagtgtcgaaaataatgaaaatataagaaatcatatggaataaattttaataattaaatcaaatacataactatgatggttatatttactcttaatataaaataaaaatggcaaaa

SEQ ID NO: 188138 - DNA, 1731 bp, Cannabis indica
atagtgtgagtagtaagtaataacaagactcatcaaccctatctatataatagctctacctatatatcaagaagaagaaaaaaaatgaccgttggagaagaaacacccagttgtttcccaattttcataataatatatttaattaattaagattgtcacatgtaacacacactatatatacacacacatacacaaaatacacagatgttattgtgtctccaaatcattgaaaagctctctctctctcttcagtgtttcagctcaagacaacaattccattctctcttactctttctactttattattattattattgaattgttcataatttgtgtgaatttattaattaatcttcatttaatgcatgttgttatgggttgttgttgtactttcaggttaaatatggtgttcattattctgatcacattatggactacaacacaagcaagtgttgtgagcaagagccataggcacaagtggattggacccgtgggacaccgcctcatcaccgtcgatgtaaagggcggctcggctcagttcaagtcggttcaagcggcggtggattcggtttcggagaacaatacagttagcattaccatactaatcagtccaggatactacatgtaattaaaaatgaattaattaattaattataattcatgtgaatgaattgaattaaattaattaatgagattgtttaattaatattaatgtagagagaaggtggtggttccagtgagaaagccgtacataacatttcaaggagcagggagagaaaatacagtgattgaatggcacgacagagcttgtgatcctggtcctaatggtcaacagcttaggacttacagaacggcttcggttactgtttttgctaactatttttctgcaagaaatatcagctttaaggtatgaaattctttaatgtattttcgatgtgggacaaccacccatgacccaccacaacataataatatataacatattacataatgtagaatacagcgccggctccgttgccggggatgcaagggtggcaggcggcggcgtttagaatatcaggggacaaggcgtacttctcagggtgtggattctatggggctcaggataccttgttggacgatgctggacgccattactttaagcagtgttatattcaaggctccattgatttcatcttcggcaacgctcgctccatgtacaaagtaatatataataatcttatttatatatatattaaaaaagagcataacccttttagtacgtactacaatcgttcactttaatttgttatattatatatatatttttggtaagtactatacagtgttttcttttttcatgacgtctgtgttatatatatgcatgaatgaattataatgaatgtgttgtgtaatgtgtttatatgtttataggagtgtgagctgcactcgatagccactcggttcggttcgatagcggctcattacaggaactcgccgtacgagaatacagggtttgctttcgtcaagtgtagagtgactggtacgggtccattgtacataggacgagccatggggagatatgctagaattgtttactcttttacttactttgatgacgtggttgcacatggtggatgggaagactgggataacatcaatcgtgacaacaacaacagcaagtaagtatatattacctacttacacaattaatacaccttaataaacctctaacaaatactataatactaa

SEQ ID NO: 188139 - DNA, 1032 bp, Cannabis indica
tcatctcattctttggtttaatttgttaataataattataattatgatattaattattaatacaacttttattattacatatatcatggtatatattggtataattgttgtatattatgaagattattaatttattgttatgtatgcatgtgaatttcatcacgtactataattattagttatttaataataatagttaaatactatgttcattaattattaataaaagaagatcattataacaattttttactgaataataattaattaattacattgttataatcatttaacttaatttaattttggcttatttttttccttaagtaaatataaattccattactcataatctacattattaaattaatggtcttatttagggtgcatatataaataaatatattcataatgttattataactaattaatgaaagttgatatatatagacttaattatatatcaatattagttccgatcacacttattaattttaataattataacaactagactttgatcagtaccagctcacccatgactgttgactaattactcatattataataattatatatattaattcataattttattttaattataatttttatggttaaaaatgtgtttattgaaaaagtgtgtatttgcgtggaagaaggaaaagggaaatacttacctaattttagattcacggcttttctatatatattaattcaacacttatatgtattaattaattaattaacacaattaatctcatcatcatatcatattatattattaattaattaatatgtacaccaaaatattttggtgtaagaaagaaaattagtcacccatatattataggataatgttttatttgacgtattaaaaaggattttatgtagagtttattttttttaatattttaggttaataattaatgttattttttaatttatatattttatttataattatttattaaaaatactattatatccaaaaaaaaaaaaaaagaagaaaaaaaattggtggatatatat

SEQ ID NO: 188140 - DNA, 1261 bp, Cannabis indica
atttgtgaacaatgcttagtttttaataagtttaaaaaaagattattgtacaaaatatatattttttgccaattactttactataatattaatttttatttttttaaacgataatattgattatctaaatcgcgtattattcctgtttaaaaaaaatcgtgtattgttcattttaataataatatatataaaaaaaagtctacatggtaatgatgtggctgattcagcagtttgaaggtgtgctgctgcagccgactgtgggtccggcccgtcggagaagtttacatcacgcgctgttttagcacgttgttaaatactgaggagaactctcttcaaagatgaacgcgtggttgcggaggacaaacgagcaggaaaggagagtagccaaatatgaaatttcatatttaactttgccaaatgcaatgccaatctggtaccacacatgaaaaagtgacgctgagttctcaacatttgacacgtgtctcattcacttgatattatgtccacttcgttttttatagattccatgttgtatttttcttttaatattttttttttgactttttcttttaatattttaaagacaaatatttcacataattaaaaaaaatgcttcctgtgctgttttaaaattaaacttcttccccacgttttcatttaaaaaaattcctggaataagggaactaaaatattgtcagttgagttgatgatccatataacatcgtgcattcaatcttaatattcaaaaaacaaaacatcgtatctccaattttagaaggatataaaaatgaaaattagtatacataaattgaagtctcttaatatttcaaaaaaaaaaaaaaatgaaagtctcttatgtatagtttaatataggttgtttgttgatcatgatctcttatgattaaaaaaaatgcaatttggtaattattgtataggagtattatggccatgcatgtctatatgatttgatgctttattcatattgtaattgtgtatgtgcttgaagaagtatagcattaatcttcttactaatatagtaatatgccttggcatgtgcaactatatttatatggtaaactaaaaaataataatgatctattatatgataatataatagagtgatgtatagttttgatcattcaccaaaattatgtcatgatttttggtcatttctcgcgatcatatattttgaatgaatcatcaggcacaactataaaattgtatctaaaaattatacattacgtaaaaaaaaaaaaaaaaa

SEQ ID NO: 188141 - DNA, 2941 bp, Cannabis indica
tgtaaaagttttgggataaaaatctacctcattaaatatcaaagctcagacatctatctacaatttcactaatatgggtgaactggacttctaggtgacctcctgtgtccatgcctaacaggggagcgtgacctgcttcgatcacggttcctgtccctagctccatctcttccatttctggatctccattccccacttcttcctccatctcgattacctctaccattccaatctcgagacctttcacgatccaagtcccgatctcgatatctgtccctctctcgctcacgatcacgatgcctgtctctatcacctgaaacacttctccttctactatcaagttccttctctctttgtttcctccgctcttctgtttctttctcccttgctaacctttcttcttcccttcccttctccttagccaactaaaaagcagtagtttttacttattactaatagaaagaaaaattagacttttctaagttgattgctcttgaaaggggagagttaccttgtactcagaaatgaaatctcgaaccatgccataaccaatatgctgtttcccagtgatatgggattgagtcctctccacagcatcattggctacgagaaaagaaccacaaatctcacaaagggccatcttcttctcttgtgcaagcagcaatactttatcaggcagggtctgctgagtcaaagctgccttctcagtattaagcgtgtctacctgttgaagcaagaacaagagctccaaattaacaacattaaatctcatggtgatacattcattaatagttaaaaatttaaatgctaagaaatatagaattgatgaagtttgtgaaaaagtttggagaagtagatgagcaatcaaggaatgattgatgggcacctttctcatgagtgcttcagcttcatccaccttcccagcttcaccgagagattccacttgttccagcaagttctttatcttatcctctagctgagataactgttcagctttttcagatgacaatggctgagcaggtgcaggttccacctcttgagcaagtcgttcccgtccacgccttactcttctgtccaagtccataacctacagatttcacatgtagtaacaaagtaagctttgacaacatattgaaagataatcattagagatcataaagccgaaaggagaagtgaatcccaccaatttctcacaaaactgagctagctcagtttcaaattttggtacaaatgcgtcatgccttggagacttctcaaaactatcatcacaaacgaaaaataaagtcaccattagatttgaaggaaacaatttaatattaggatcttgttagaaaataaaataattatgaacttgcacaaattcgagtaggagacaaggctatgtaaagccagcaagttatcagggtaagtgaattatataatgcaagatgcacataaacaattgtaaatcaatgttttatatcttaaagaacttgagagaagagaatgcagcacaaaattcaagaagcagaaattagtgtagtttgcttgcataagattcaactgcatagcacaaaattcatcagcagcatgtatcaaaacctcataaaacatcaattcattcacctttctttcaacttcgggtcgtgtattcttgggcatggtcctgaagaaggtagaaaaaagacatctattagcaactttgcacttaacattatgcaaaggaacatgataaactacttaaagacttcaaaattcaaattctaaatgaaataataataataacacattcaacattttttttcaacaatttgatacttgaagaagaagaaaaaaaaaacagaatcatcaacataaattgaagatgcaaataagtcaaactcaataaaaattcaacacaatgtaactcacccaaatcgctccgagtattgacgaagagatcgtggggacaaaaacgaaccatgtacgcaccgcaaacctccttatcatcccaagtaacttctttgaacccttttctctcttcgtccgtcatattacgagctgggtttcatcattcaatcaaaccaaaccgatcagagaataaatgaaattaaatcaaacaaaaagcaaattcaattgaagaaaataaaatacataaacaattaattaataataccccattacaggaatagtagtataaatacctgcgcccatgagttcgtcaagcagagctctctgagcgtccatggctacggtgagtacgaatcaaaaggggaaaacaaataatgaaaccctaagaaaatggagaaggttgggggaatggaatgggatagtactagaattgtgaaagtgtaatcataaaatcctaggttttcctagggtttggtctgtagcactgagcttctttctgtggacaatagacttgcggagagcgacaaggaagctaatgcttctgatgttcaccgaacaaaattttaagatgcggtattttatttttattttgaggggattatttattgggttattctacaatgtaccccttaaaaagatgtacagatacatcattgacttgtttcggcatccagaaaaaatttttagtttaattttttttcatattcatgtacattatagctatttaagataacctacaaaattttgagaaattctgaataatttacaatatagaaaataatgttcaaacagtctattttacacgtatataaaataaaatagttaagcgtgcaacacactgtttgaacatagtttttggcgtgttaaactttttcaaatttcttaaaattttgtagaatgtcttaaataactataacgtacatgaccataagaaaaaatttgactaaaaaattatttcgggtgttaaaacagacaagggtgcatcaatgtatccattttaagaggatgcattgtagaattttccttagttatttattttttaaatattgcattttaaaaaaaatgaatatac

SEQ ID NO: 188142 - DNA, 3888 bp, Cannabis indica
tttccatttaccaacctgcaggtttgttttacaaattccgatggtacagaaaatttggaccctcgacctcctttcagaattactcttcccaagatgctgaaaagcagcactcatgctcttcctgggaataagaagtctgcagctgattcaaagaatgatgtctctatggctgatgccgatagcgagaaagagaaactttttgttgaggcatacacccctcctgaccccggtccgtatccccaagatcaaccgagactgaactcagttagatttacacccatacaggttctatgaatcttcttttttcaagatattacttttctttagataagtgggaagttttcttgaggttaaattttataaaatttgttggtgtatattgtactacttgtatgtttggcatctagaaacaaattatgtggtaccaacttcgggaatttgaacaaaaaaattgcttttggtaaattgtttggtccaaggaatcctttttcttttttctttttcctttctcattgtcccccctaccattggttcatctaaattttttctagtttaattgtcaactaaaatggacttcacagaaacttttgtttgtgttatgtgttccatttttcactgattacttgtattttatcacactgtacagattggagcaatcatctcgggagttcagccaggactaactatggttgtgggtccacctggtacaggaaagactgatactgctgtgcagatcctgaatgttctttatcataattgtccttctcagagaacattgataatcactcattccaatcaggcccttaatgacctttttgagaagataatgcaggtatctgctcgaatttagttactatggggaaaacggtggtagtgcattgttttgtgtatatgtgtgtgtgtaactttttaattaatcatttgatatttcagagggatgtgcctgctcgctatcttcttcgacttggtcaaggtgaacaagagcttgcaactgatcttgacttcagccggcaaggtcgtgtgaatgcgatgcttgtaaggcggttagaattactcagtgaagtggagaggttggcaagatctctccaactccccgaggatgtaggctatacctgtgaaacagctgggtacttttggctgcttcatgtgtactcccgatgggagctatttctggctgcttgtgctgagagtgaaaataaaccatcatttgttaaggaccggtttccattcaaggagttcttttccaacacagctcatccagtcttcacgggggagtcatttgataaagacatgtgggccgctaaaggatgctttagtcatctcaagactatgttccaagaacttgaagagtgtagggcatttgaattactcaaatcaaccgctgatcgggcaaattatttaatgacaaagcaagccaagattgttgctatgacttgcactcatgcagctttaaagaggaaggactttcttcagttgggtttcaagtatgacaatttgctgatggaagaaagtgcccagattttggagattgaaacgttcattcctatgttgcttcagaggcaggaagatggttatgcccggcttaaacgatgtattctgattggtgaccatcatcaattgcctcctgttgttaagaacatggctttccagaagtatagccacatggatcagagtctctttacaagatttgttcgtcttggcattccttatattgaacttaatgcccaaggtagagctcggccgagtattgcacaactttacaattggaggtacagagatttgggagacctttcatatgttaaagagggtgcaatatttcatagagcaaatgccgggttttcatacgagtatcaattgatagatgtcccagattatcacggtaagggggagagtgccccttcaccttggttctaccaaaatgaaggagaagccgagtatattgtcagcgtttatatatacatgcgcttactagggtatcctgcaaataaaatttctattttgacaacatacaatgggcagaagctcttgcttcgtgatgttataaatcgacgttgtgttccatatgacttcatcggtcctcctaacaaggtatggattatgtgctttctttgacagtactagaaatgatatattggtatgaggagagtttggctgtatgaaatcctattgattaaccattgaagacaggattttgaaattattttattctagttgtaactttcacttgcagattccatctctataatgctgctcttcttaatgtctttcaggttacaacagttgataagtttcaaggtcagcagaatgattttatattgctgtcacttgtgcgtactcggtttgttggtcaccttagggatgttagaagattggttgtcgccatgtctcgtgctcgacttggcctgtatgtgttttgtcgtcgttctctgtttgagcagtgctatgaacttcaacccacctttcaacttctacttcagaggcctgaccgccttgggcttaatttaaccgagatttcatcgtacacagaacgccatgtagaagacactggtcccacacatttggtcagtagtgtagatgagatggtcaccatctaccagcagctttatcaggtatgttgctttcttcatggccttttttgctactttatattttgatgaatcgcttctcttgttacttttaatgctttattatgtcaaagtataagcaactgtgtgtgtatgtaatatgtatatgtgtctctgtatttctggtgtatttatccattttcttctcatttcaggcaaagtttgcaccttatccaggaaaagctgctctaatgacagaggtgttggaggagcagaatgatcatcaaaatcctatatcattgcccaatggcatggaagctggagcaccaaattctgaaaatggtgcaccagatgaaaccatgtccgtagcagctgaagtaccaaactcggaatacagtgcaccagatgaaatcatgtccgttgtagcagctgaagtaccaaactctgaaaatggtgcaccagatgaaacaatgtccttagcagctgaagtaccaaactcggaacacagtggagcagatgaaagcatgtctgatgtagcagctgaagtctaagctccgagaatggggcacccgaaaatgtaccagatgaaagcaacatgaaagaagactcaaaatcaaatggtcccgagagtcatttgaacaggggggtgatggataataataatcctgaaagtgattctcacacaaccaacatggaagaatagattgggttttcggtgatttgctgacactactcttaatcagaagtgggaactgtagcctcaagtctactccataccaaccaggcagtgcaattgacatgatttcgatcaagataaagcttcaaaacgtttacgattaaaaggggtttacaaatgatcacttgctgtttaggttggaaagcaagaatggtgaggactccaaatcttctaacttacaattctctactttttgttcaaactcagaaatcaaaaatatttgagggttccaaattgatcatgaatgtaatactttaccaagaatgtgtttgttggacatctcttgtaagtagaaagaacttgaaaaattgtggagtatttcttcacaattcaatcttttttgtctctcctttatcttaaatcattttcatatttggatcagggctgttgaatatgtcaattctctcacaacatttcttatgtatcatattcaagatcaatatttttgttctataaaacttgtagatcaatttgcggcaaaactctcaaactatcaatttacttgcaaaaaaccattcaactttatattttagtgggaaaatctttcaaagtactgtttcgttttcagtctcgttaagtcttaatttt

SEQ ID NO: 188143 - DNA, 2283 bp, Cannabis indica
aaaatgaaggcaaaattaagtgaaaatagcaaaagggcatattagcattcaagatattaagtaggagaaatcacattccagttatgcagaagagacaatggtggcttcatagtgtttatcttatatgtattcttcgaaaaataaatagctaattgtaaacagacagccaaatccaaaaggccagctcccttcatatcaaacttaccatataaccaaccaacgattgcacccatttttttttcttttgctcaaggtgaaatgcaactcgagggtagtaactaagcttcaagatttcttcttcctactagtaaaactttcatgagattgattggcgaaaagatgccccgtagagaaccgtacttcttttttttgtttctttgctgggtttcgattttttttttattattattttcttgggccaaaatgtagagggagcaccatccttgaaaatcactcttcaacaacgttcacaagttcgtactcgatcagagaaaggttgttgtcttctttcacgttgaattctgcaggttcagtgacttcgacacggccccacttgtccacagctagcctcattgatcctttgaacatgtcgattttagcattccgaaagataacggttgaaccctctttcatcaggtccactggaaacatcaagtaagattaatgcacatttaaaaaaagtaaaacacatttgttggataaaatttgaatgaataaaacacatttgttggaaaaaaaacacattcttggtaaataaaacataccagctacataaccagcactgcgaaagggaaaaaaacctttcgtgttcttagctaggatgcataaccatcattacgacaagaaatcttgcctatagtattctagaacagaaaaccatgcatatatctactctacgtgaatatttattcttttcagcaactagatttgtaagcttgcaaaaccaaagacctcaaaagaagtaaaatatttctgttgttactcaacttcccgtcggcaccacccccttaagatatctcccaaaaaatacctattgcccggataaagacttactgaacatatttggcaatgaaatacacatcaatcacaatgaaatagctttggaaagcttgtctaaattaagctgaggtccatcttgttgtcaataaaacaaacaagcattgagtcatggcaagaaaagaagacaccctgtctaaagaccccaaaataatattgtgtaaagacttatggaaggaaaaagaaaagttaccaagtgagttccacatgacaacttaatcatcttagaaaacagacaacaatgagcaatgcagaactgaccaatgaattctaataataattaaaagcacaaaaacaatgagagactcatgaataattaaagtagttgaacacaaaattaatagcctgtacggttcttgcggccatccgattccatcagattacaaatcccttcactaacatacttttgttttaggtttcaaagctttagaatttctaacctagtcagcttatctaagtacgctatactaggattgcaagagcatcagtcatatagcactgcctagacaacgacaccacattgtaaacatacaagatatgagttaaaaaaagaagaagtatgaagacaatggtgataagacactataatggtacaaggtagtcaattttagaaactttccagtacacctaacacgcaagattatcgtacgaaatgaaaatgaaaacagaattttgtaaaaacaaagactaccatccaacaatcaccataaataaaagcataatataagaataatagctgcagacaaaatcattaatctctaaaatccagacaaaagaaaataagcccatagttagcacacaagaacatatgttaacagaacagaaaagtccccaggaacagaacatatgcataattatcaaaagccagaaggattctcaacattcagcaatgcatcaattaaacagaacattaattcaatattcacaccttggtcatttctagctgtgaaaataatcattccagtctcatccccaaccaagcattcagcaattctcatttgacgaacctggggaccatcggcacggcccttctgcaaaaccattttagtactgacaacctttactgtgagagtgtgcccactggtcccaggccgcagctgctcaaccttggtaaagactggtttcctcaaacttgtttttgattctgccattacaagaagcctacacaaccaaatgttaaaaagtttcatcagaattgcacaaaaaacataaaaacctcaacaacaa

SEQ ID NO: 188144 - DNA, 1564 bp, Cannabis indica
gaggtttctatgcttaagaatctcagtggtgactatcatcatatccatgagttttaagtctttctgtgatatctttaaaattagtctattctgtccctgcactatgttcgttgtatagtggtggtaaatctcaaatttggtgttaggtttattcttcagataaagtcagaagaagaactaaaagaaaatgaaacagttacacttattatgctacaaattcaattagtatataatgttcatgcagataatatctgattcttctaaaccagattgaaagtgtgaagtcatattttgaacacaacttgcagtgcctcagtacatggaaagagagtagtgactgtaaaatgagtctttattttatgtattaactatattatgacactcttatgtgtgtgtttaatgtgtgcagatatattaaactatcaccagtccctcctagtttttcaaatatatgaagttcgaaacatatgtttaatactgaattgttatgctttgttaacatcttctttaagtgaaaataagagtatatgtacgtttcgacatttatttggttgtaggtactttgattaccttttctatattgattttgaggcatctatggcagaaccacgtgcacaaagtgctttagagcagttgcaggttttcttctcccctcttattttcataatattattctttagaatataatatatatactcttagctaattattgggacttatgtaaaccaaatttgttatttactagcaggaacttacaacttttcttcgggtacttggttgttatgccatggatacaactctatagctgccgccggttattccatgtgcttaagagagaatatggcccttcaatctgatctaatatactagaaaaagcttgctcctcatgccattagagtcatctcaattaagtgagtttcagagtagaacttgtttaaaccttgtgatatggttggcccatggggcaaaccaagagattattctgtcctgccttagagagaaaactcttgtcatttatcatttgtccttttcgtaaagagcatatatcagctcataaactcttctagttggctaatatttaaatgtacagtatattgatgaataaatatatctataatatgatcacaaattatgtaattattagtaaaatgtgagccggaaccatgaagtaattttttctaataaaataatgatgcaaaaattactacattagtaatttatagttgggttaagattgtcatgttatgaacacactagtctttttgtgggactttttttagaataatttcgaaaggttttttgtttcaattttctagacctttaaaatcaataagtatatggcacaattttgaggggcataattgaatacacatttttgagtttttgacatttaaactttctaactaggccaggttgaatattcgatctaattcaacatttttattctcatctaatccaatttaattaataattggatttggaaaatcttcatccaattaaatcaaagtataccttaaaatgcaatccaatctaatctttggtttttaaattacatgtccaatta

SEQ ID NO: 188145 - DNA, 1814 bp, Cannabis indica
aattaaatatttaagttgaatttttaacaattataaatttaagctatagagctttttaatacatgccgttaattaattattaaattattatcctgtctgatattttttaattagtatatttaaattaattttttttaaaaaaaaattcataacttcgactaattaaatacttacgaaattttaaaaatataatttaagtattattactgttaaaaattaaacttaaatatttatttacaattaaaaattaaaattaaatatttatacggtaaattatcctttatattcaagatatataattattttaaatttcattttttttaaaagtcaaagaaactttttttttttttcaccaaccaatactcataatccctctagtataactacacatgcattgtaattaggagagaagaaaaaaatgcgccaaataatccaaactctgacacaaatggcctccaattggctgtgttcagatatccaattttaagatcagattatggccttatctctacacactaaaacaattaccacatagttacaattctatcatccatattcaattatcatgcatgcatattaatcaatatgaaatacttaattatgtatacatatcgttagaaataataatactaataataaaagatataaatacgtacacatttatttatactagacccatgctattatttatttttgtatggaatgtattatttaatataatggttgagactgatggagcaagcagaagtgcactactacatgcatgcttgtttaaagatacttcaataaagagacatccaatttccaattctcaatttcccaaatctcttctaattgtttttttccttaaaaccctaaatttcttcgttatgtatggcagacaatacccttggtaggtgcccagccaaataaatgcttctactggtttaaatgatgacgtggcagtttatgtaaaggaaaaaataatactaacaaaaatgagggtacttaagtctacagtgcaatttagggacaacactttttttttccttgcatatacttataataataattgtatcttcaatatttttactgataactttctatttctatagttaggacaaaaaaaaacaaaaaaattgtaagtctttcttttagtgacaaatttatttttgttatggtaaaaaatatatttaatcaccaaaaaattattaatattatatagtactttttttttatatatttataagtttttttttttcaagaaaagcttgacataatttataaaccaaaaacagagttagaccatctagtcttttataaaagataccatcagtaccagagactattattaacactactgtagagaatatcatttgagtaaaggaaatatataggcaaaatgatgctttttcagtaacagtttttttcttataattaatgactaatagttataaaaaaaagaagaagattgtacatactagtatcctgtaatttcttattctctcgcttaattctaaagttatgatacaagtgtacatatataaagtataagattcttttgtttggactggagggttgaattggaagatatgactatttatatttatatatataatatataccatgggcgcatagatatatgtgcaatgttaatatatatccataatgtggttgatggaagagggagggggcctcataatatattttgtttgaacgctgagcttatagtctggaccactctctcctctatttatacaaacctcttctgccacactttcatatcatcctactcatttcaaactcactacactatacaaactctctctctctct

SEQ ID NO: 188146 - DNA, 5887 bp, Cannabis indica
agagacaacactagtcttctcactcttttttggtcaggtcctcgtaattggcggacgaccattccttagctttatatcattccctttctcttttccgttttattttattttttttctttttctttttctctagctgccacaatctgggtttttgagtttattcttccaaaacacattactcttgatttttataaagaagtaaaagtgattattccccttcatagtgtttaaagctcaatcttagtgctttgaaaatatattatttagttcccacaatgttgagaagaccaacttttgattacccaataaacactttatatcaagagagagagagagagagagagagagaagagctaaagtttgcatcacatgcagtccactttcacatacacaaaagccaaaatttccctcactaacaagaaaggaacaaaacccacatcccataatatctttttacaccactctctcttcactcttcctcgagctaatataaaaaccatatatatatacacataccatatcgtcacttcacttacaatatatcccaacatccatatttttctttgcagaatccaaatgaaccccattaacccaaaaatatcaaacatttaagtagtactagtaatagtacttcttcttcttcttcccttggcacaatacaagtacttagtttattattccctgccaaaaaacaaaacagtctagctcacaaagtgtttgataaaaaaaaatgagaggaggaatttgtacagtacagcaggctctcactgccgaggctaccagcttagtgaaacaagctgttagccttgcaaaaaggcgaggccatgcccaagtgactcctctccatgtagcaagtgccatgcttgcaacctcaacaggacttcttagaaaggcctgtttgcagtgccattctcacccccttcagtgcaaagcacttgagctttgcttcaatgtggctctcaaccgccttcctgcatccagtcctagcccattgttaggccctcactatgtcaatccttccttttccaacgccttggttgctgccttcaagcgcgctcaagcgcaccagcgccgtggttctgttgagaaccagcagcagcctatcttagctttgaaaatagagttggaacagcttatcatttctatcttagatgatccaagtgttagtagagttatgagggaggctggtttttctagtactctagtgaaaagtagagtagaacaagctgtttctttagaggtttgttcccaaagtccaggtagtaataatggtcagtctaaggagagtgtcaagcctcttaatggtcttattggttctcatcatcacttgtctcaatccttaccttctagtcagtatcctgtttcggttagtaagccttttgatcaaattaggcaagaggatgtgaataatgtgttgaatgtcatgttgaacaagagaaaaaacactgttattgtgggagagtctttggctacagcagagggtatagcaaggggagtgatggagacatttgagagaggaaatacttctgggaattatagatacttgcagttcatcagttttcctctcttctctttaagaaatatttcaaaagaggaggttgagcagaagctgatggagcttaggtgtgttgttaaaagctatatgggaagaggggttgtcttgtacttaggtgatctcacatgggtttctgagttctggtccagttgttctcagcaaagaagaaactcctactttgccatggaccaaatattcatggagcttaagaggttggtctccggaataggggacaccagtggtagagtgtggctgatgggaatctcaacctttcaaacttacatgaaatgcaaaacaggccacccttcacttgagacgatttgggaacttcatcctcttacaatcccagttggaagcttgagcctaagtctcaagtttgagaggtaataacaacaataataatgataatgataatttttttacgatgatgatgattattgaagttcaaagttaagcttttacgtatcaattattgaagaattttgagatatgacatgcttcagttcagctagctttcactatttactttttattctttttgtgtgtaaatgattgatactaaatattgtttttattctctcttatagtgatgtggaagctgaggtcagtactatcatgacatccaaagataagtctggtcttgaaactgcagaagagaataataagcacctaattagttgttgtgctgccgattgctcctgtaataatcttgacaaacgcaatattaccaactctagtactgtctcaacattgccctcatggctccaaaaatgcacagaagagaacaaaaaaaacactaccaaaaatcaggtttgtatataataatttaatatcatataatgtacagtttgtaatcgtgatgtatagaatatcattctgatgctttgtttttgtctatactcttgagcaggaatattgtatcactgttggggatctatgcaagaaatggaactcattttgcagttcaggccctaataagtactcaaactttgctgagaagcccttcaacttttcatcattgtctcctacaaattcacacgattgcaaccagggattgcatgatcatcagtcacaacagagtaggccggttactacttttgggcccaaacagcagtcaccaaaagagtaccaattctgggttttggaaaacagtgatgatggttatgaaagcaatgtgaaaatgttcattccagaagaaaatgatgatgagccagctgtagctaaacctgaactcctatcaaatcccaactctagtccaaattcagcttcttctagtgaagtaatggaggaggaccaagatgaagatctcccaagtttcaaggagctaaactcagagaacctgagaattctttgtgatgagatggagaagaatgtgccatggcagaaaggaatcattcctgacattgccacaaccattcttcagtgccgttcaggaatgagccagagaagaggcaaattcaaactcaaggaggagaaagaagaaagctgttggctcttctttcttggtgctgattccaaaggcaaagagaagattgcaagaacgttggccaaacttgtttttggctctcaaaatgagtttgtctccattggtctgagcagcttttcatcatcaactagagctgataactcaactactgaagaatattccaagatcaacaaaaggactagaaatgaatcgggttgcagttatgtacaaaggtttggtgaagcagtgaatcagaatcctcacagagtgttcttcatggaagatttggaagaagttgaccattattctcaaaagggtatcaagaatgcgattgaaagtggaagaataacacttccagatggcgaaactgttccccttaaagatgccattgtcgttttcagctgtgaaagtttcatgagttcagtgtccagggccagttctcccacaagaggccaaaaatcatctgatgcaataataatcaaagagaataatgatgatggacctgacacagaggacaaaaccccctgtgtttcacttgatttgaacattgcatttgaagatgatcaccatgaagatcatgatgaggattcagattcccacgttggtttactggaagctgttgataggaaatttattttcttgggttaagaattttaacaaggagggaatattgggatttcatttattatcagttaacttttacttgcagttttttttgttcctttttttaagaattacatttaggtttttacaagtgcttggttggttggtggtatggtatatgggacttacctaggaaaacacaatgttgttcactttgtatttttacgatgtagtgacgaatatatatagtctgagtaattaacaatgtgtatattaatttctctctactcatcctttatttaatttatatagaaagtaagtttttaacgaacttatgtagatataatttataactattcattggaattacaatattgagtgtggtatagatattaatggaaaggagcataataatagtgatttgggtcattataaaaccaagaaattaatgtatagtattaggattagtagtagtggtcacagtttgtatcccactgtggaccatatttaaataaagttgaaagatatagtgcattatggaaaacacagtttgagtcttttaattcatatataagactagtttgtatttctttttgacaatataagtaacgtgatgtctgatgattactaatcccaatatgtgatcttcatatatactctttcctcgactaaatatattatgccatgtccctacccaatttaatatataatatatagaaatagtagtatatgcgtaaggatttttaaggctttggaccaataatgtactttatacatataacataaattattattaatggacacacaaagattaaagtcatatatatagtggtatattatagactagaaagtgttttaatgtataaaagtcattatataacattattctaagaaaggacacagttaaaatctcctattaatatatatgatctatggggagaaagatgctaaaaatctataatgctacttgcttgtactgtatgtagtacatatatattaatttataataataccacacactaataaaaggtatatattcaaattcggagtaaaaataggacttcacggtcacacagaacaagtatatatgagttcaaatacaaatagtagatcaagcaaaaaaaatacaaaatagtagttctaatacgtagtcttctcttattaatatataatgcatgaaatagtgacaaaatttgagagcttatttaaaataataaagcaaaccaaacagaaggtccgttcttctaattgtacgtacttttactttaatgaacgcaaaaaaaaaaaaaactatatatagcctcatatatctatgtatagagatctaattattaattaattaattagcttaaaagatgaggccaataatgttacttgttatgaagttatgaacatatatatatattgttttgtactgcttaagaagtgcatgtgtatgaataggatataggaatatatatagatctatatggtgggtgtgatggatcggattatactgctttatttcttaggctgaaaaagggtgataatacgagtgagtatatatgacccgtaaatagtgttcccacttgtacatgttccctaaagctactcaagtccttgctgtacataccgttgcgtctttttgcatcagaattattcatatatctacacacatatttatacatagttccatatataaaattcctgagaaataagtataaatatatatatatatgtgtatacatacataattaattctcttcacctatcctttcaatatatattctattttttggttttatgtccagaaagtgtagataataagaataaaaaaaaaaatgcaggcgcctacctcttgaccctcttaattattcagacgattttgatgtgaaagtgaagagcgtatattatgtgtaatcaactttttgcaaaacttgaattaatgcatgcgcatgcgcttacaattaaaagtgttatttattttttggaatattaatattttcaactagctctctacgttattttctgtttttatatattatttaatttcttcatgacatgatataatctaaagaattaactatacatatataattaagcgattgaaatctatatcaaaaactttattatatataatgaagcagggaaaaagtctatataggtagcctcccggctacttttccttatcttcaaataattaattcattaatctgttctttccatactgttcatttcatctgttttttttttttcattcccatatatacaatatttttcaccgg

SEQ ID NO: 188147 - DNA, 968 bp, Cannabis indica
aaaaaaaaaaaaaaaccatataatttaccaatactttgttttaaaaagtggatttttagcagaatatcatatggcgaataaaaatggaagtttgaatatgcatgtgtgtcacggtgagagaggggtaggtccatgcacgttgaaatgtcacaaatttcatgcagtgtacgtccacatgaatatgaatgcttcatttggaacactaatgataataaagacaattcattcttttttttttggctgaattatttatatatgttttcttcgtccgtacagatattattggataaggtttcgattgtgtttccctttaaataattaaaggtacggtccgaagaagaagatttataataatgaattgattgttatactatttcttatttaacaatagattaaaatagaatattatatatcaataaaaggttaatatattgtgatttgaaaaaaaaaatattaatatattggttattatattatgtaatctatattatatttatttatataatatatatagtataataatataaaaaaattacaaattagaaaataagatatgtactctgtggattatgcttagtaatatgtaattaaaggtttgtttggtacgccgtattattttgtattgtattgtattgtatgggctcgtttggtacgtcgtattgtattgtattgtattagattgagttggattgtgttgtattgtactgtattgtattagtattatttaatacaatactatgtttgatattgacttgtaataatagattgtgttatattgtattgtattatagtattatttaatctgggtctgggtccgggtttggattcagggtctgggttcgggtctgagttcgagtacgggtcgaggtccgtgtcagggtcagggtcgggtccgggttcgggtcagatttcgggtcctatttcgggtccggtctgggttcgtgtcagggtcagggtctgggtccggt

SEQ ID NO: 188148 - DNA, 1247 bp, Cannabis indica
ttttccattggatcctgtgcattttttagatcaccggtaacttttattcttggcctcttgttagaaatctaaattctttgttttcattgataggctgtctaatatatgagctcttctctggcttgaagttgagcaaaacagaggaattgcgcaatactgcatccattcctaaggttttctttagattttctgggacacttttttatgttatcttttgcttatatgctttattttattgtaagcatgcatcttgactattttagtccacagctgtgaagtcatttacgggtatttcttaaatttattgtagttaccaaaatatcattatgtttctttggctttcactttttttggaagattcatttcatttgcatatgtctattttcttgtctcacagtctctgcttccagattatcagcgactcttgagttccttgccttctcgcaggctgaatacatcaaagcttttagaaaacagtggtgagattttgaatggctttgtagactgaaaagttatctgcatcaatagtcctcgatagtaattagaatttcacacgtacatagagaaggagagagctaggagtattctatatatatatgcttattcctctttttctttggctagatagtgcttctcaagtcatggattgctttccatcttcttgcttttgtttcattttttgggtactaagtatcacagtttgatttacagaatatttccaaaataaattggtggataccatacatttcatggaaatcttaaatttgaaagacagcgttgagaaagatacattcttccgcaagcttccaaatttggcagagcagcttcctcgaccaattgttcttaaaaaggtgtggatcttggagttgtcattttatttttggacaaaacatacttttctagttatgttgctcatatcacttccactggttcctacagctgcttcctttattagcttctgcccttgaatttggttcagctgctgctcccgctctgactgcattgttaaaaatgggttcgtggctttcaacagaagagttcagtgctaaggtctcaatctttctgctttctatggaggctgtctttgctctgatgctcacagttttttttttaaattaaataaattaatatataaattgtggtttttttttttttttttgggattttttaggtgctgcctacaattgtgaaactctttgcctccaatgatcgagctattagagttggtctcctgcaacatatagatc

SEQ ID NO: 188149 - DNA, 4650 bp, Cannabis indica
aaaactcagatctggtctgaactccattcctggtcgttaataaaaaaagggttgatatcctgtttccacgagctgatctcaaacacgaatccaaaacactggctagaaccgagcattgtcaaacatagaacccagtcgagatactccgcgagctttaagaccattcatctgcacacacatacacacacagagaacaaatgtgaccttggtgttatggattccaccaccactcgcgcgctagagaagagctaggtactgatgagagaaagaaagggagaggtgagtcgaaatccatcgttacctagttgcccaactactgagacaccactatatctccggctttgctttcccaaacagtggcaacaatggaaggagagaaagagagatcgggatgggttgttgattccctctagcgctgcactaaagcaagagagaaaaagagagagaggtcggggtagagagagaaagagatggagttagggtttaaatttttttagggttcatcatgttcattttatacccaattattatttatctatttattaacaaaaattagttatatttatttatttaagtaactttttttatctttttggtgtcggttctaaattaagatttaaaggttttttaaccttttaagtgttggattagaaacgacaccaaagaattttttttttcctaaaaattgtattacctttagtgttgatttttttttaagtgctgaattttaactgacacaattgagtactctttagcgtcgattataaacttatataattaattgagaaacaacactaaaagtgatattttaattttcaggacaaatataattaattaatacataatcggaattatttacaatacatggattttgatacgccctatgaaacaaaaaatttcaatctttttccatcaattaattatgatttgtataatatttggcagcctttgaattttcaaccctaatttattgacctatccatgatgatcatcctatatatatcttttaattaatattacacgaatcaaactattcacgtattcattgtttatcttctaaaaatagagttaatataagttaggcatctctttctttcacgtccttttttcagtttaattattttatgtcaccctagacaagactagtacttaattggtaaattatatatattaattaatatatataataaagactgtaatggcagttgataaagaataagtcacaaagatatttatatatgatgttaactagggttttcgcctagctataactagccatgcatatataccacacgtttgattattgatcaccaaattattaaaattgacttaattaccaactattctcacaagtctcacctacaattctcactacgtacgtacatatctataaatatatatatatatatatatttatatcttcttaagccaaagagattatttttaattactagtactcatagtggaataaagataagatttttatattgtatatatacaatgattttgtgaatctctctaatatgaatatgaacaaaggtttataattaattaattaataattattatcatcaaaacgcaccatgcacggttgcacatttttagtcaaacataattaattaagaaagggaaaataattaaacttattcgatgaatgtttccaatattgaaaagtattcgtttttccattttaactaaatttcatggtccccaaatgagaaaaaggcataaataaggttagaaaattttgcatatgcatgtatttgattctgctataaatataaccctagctagttctctcatcacaataaaattataagctatagtttttatctagagccaaatattatcactcgaaaccttttaaccctagctaagacatatatattttattttattttatttttacttgaaacctcatctttacgaaaagaatacttctccaatctattgttaactaatataaatatatatatatatatataatatatcataagagatatatataatttgtatttattagatatggaaggaagtataggaatattattaataatccaacaagtttgcaaactagtcctcgtttgcagcctccaacttatggaaatctaataacagttttgagcattgatgggggtggaattagaggtcttatcccaggaactatccttgctttcttagaggaacaattacaggttcgaatatatatatataaacatatatgaatatatatttatatatataaaactagacattttagtaataataacaatataagaatgatgatttataatatgtttagtaataactttttcacttttagtcacaaattttcactataaaaatttttacttttagtcaaaacaaaatttgtgaaattaaaagtgaaaaagttatcactaattataaatcaccattcttatgttgtgacaaaaaaggttcgtaactaaaaatattagtcacaaaaatcacaaaaatattagtttttgtggactctatggctaaaagtgctcgttgttctgagaacgccactccttgttgtaaaggggagggatttcctcctgtggatcccattttctcattctctaatctaagatgaatactttgtctttttttttaaatgtgttttcacgtacttattgtgactaaaactaaactagtaacaacttgtatctaaatactatgttttagtcatatgttgtaactgaatataatttttttgtaataatttattgtaattaaaagtaagatttttttatagtgtcgaaaactctgtctcttgtaatgatatttggtatctgtgcagaaatacgaacacaatcatatttcttaaataattgagattttttttagagattaatttgttttaattttcagaaacttgatggtgaagaagcaaggctagctgattattttgatgtgattagtggaacaagcacaggaggtcttgttactgccatgttaactgcccctaaccataataaccgtcctgtctttgctgctaaagatgttaaagatttctatctcacacattgccctaaaatcttcccacaaaataggttaattataatatacttgaatctttattattattataacatatataattattacacatgtttttttttaaaaaaaaaaattaattaattcttatagcatgatataccagttgtccagtgtttcctcaccttacaaagattgttaaagcattatctggacccaaatatgatggtaaatatcttcataaacttgtgaaagaaaagcttggtgaaacaaaattaaatgagactttgaccaatgttgtcataccaacatttgacattgaacaactccagccaactatattttctacctatgaggtaattaattttattggaaaaatacactacacccggtatattatattttcatatattttttttatctgtttcagtattaaaaaaattaatttaatgattttttgtaatagtgtatattatgtcagtcacatgtaaatttttcgaaaaattataaataaattacaatttaaaaaaagttcaaatattttgttacacaattggttgttttttcttatagacaaggtaagtaactgtttaagtcttatttcaacaatttaactatttggattttttttaaaaaaattataagtagtcttaaataactacaacgtacacaaaattaaaaaaaatgctctggatgcactgaacatatcagaactatcattttttgaggtttatatattggagagttacccaattttatatatacgtaataataataatatgtacacctaaaatataattttgcaggtgaagaaaaatacatcgtcaaatgttcttctgtcggacatatgcattggaacttcagctgctccaacttatcttccagcacattacttcgaaacgaaagatcccaatggagaagttattagaaaatttaaccttatagatggtggtgttgctgcaaataatccggtatacaaatatttaataaactttcatataataatattccccacacaaattaaattactttaatataaaaacttcattactaaataacactcctctttagtgtaaaccctaaaaaagatgaacttgtaaatccttttccatttatagcatgtcaagaagttataaaaccaaaaaaaattatataacaacaatattcaatggcaatcctaagttgtattgggctttatgaaaaataatttttttgaccctttatataaaaatagatggtatttttaaaatttattttaaaaataagtgttctttttaaagaactttttttttatttaagcccctagactaggtgggtcgtaggcacaggttcagcccgtacctcagcctaggatcaacttaataatattcattataatctctatatgttaaaacaaaaataagtacatcttttttaaagggttattacactggaaaaatcactcaaaaatatagtgatattcattaaagatataaaacattattaatatttagttattaactatcgttaagtggtgtatatttatagactctagtggcaattggtgaagtatcgaaggagataatgggagggagtgatgcattttttccaataaatccattggattatgctagatttctggtgatttcatttaggaacggggtcacc

SEQ ID NO: 188150 - DNA, 2334 bp, Cannabis indica
cgttcttcgttttcgaatgcttattgggccactaaaactgatgttccctccaatcacattgaatatcagtaaagacatttgtacgtgacaaaagaccagtagcatctaggatttggacatttgaggatgtggaaatttattttgtttcctaacaaatgcatttttcgttaatttacaaccatttttcatggcaaaaattaaacacaggtcaaaattaaaacgacttgtcagccacgcagttccccaacaaaagaccgttaaactgaagtaaaactttcttataaaagatgtgatatttgccaacagtagaatcaacaaccaaactttaaaaattacagcgaaaatggcaggaaagttggcactttcacaagcattattccttggttcagtaattcttgctctgttgactagaattaatgctggtgacattgccatctattggggtcagaatgggatggagggaactctagaagaaacttgtgcaactggtgattatgactttgttaacatagcttttcttccaacctttggtaatggccagacaccagtaatcaatctcgctggccactgtgatccatacacaaatggttgcactggcttaagctctgacattaaatcttgtcaagcaaaaggggtcaaggtattgctgtctattggaggaggtgcagggagctattaccttacctcttctgaggatgctagacaagttgcaacttatctttggaacaatttcttaggaggaacttcatcatctcgaccactcggggatgctgttttggatggaattgatttcgatattgaaggaggaacaaatctacactgggatgatcttgctagatacctatctggttacagcaaaaagggcaagaaagtatacctagctgcagctcctcaatgcccttttcctgatgcatgggttggtggtgctcttaagacaggcctatttgactatgtttgggttcagttttacaacaatgctccttgccagtattctggagacataaacaatcttgaaaatgcttggaaacagtggacttcagatattcctgcaaccaagattttcctaggactacctgcagcccctgcagccgctgggagcggctttatacctgtggctgaccttacttctaaggttctaccagctattaagggttcatctaagtatggaggagttatgctatggtctaagtactatgatgatcagactggatatagtaaatccataaaaagccatgtctaatagtctaaattactctcccactgctatgggagtatgtatttgttatacatgtatatgactataatgtataaatatttgcagaattatgagctattcatacatattacatatcagaaattgtctttcatctaattttctgaaaatctattaagactattttcacatcctctgtttcaatgcacacatgaagataatattagcatatattagtagagcatataaatatatgtatatgtatgtgatttgagaattacaaacagcaacaaaaaaggaagtaatcccaagataatatctataaactattttccatctcattgatcagcgctctcaacatatatatcaaagcaaagaaaagaactaaaacagcaacatgtagaaatgaaatcagttctagcgaaaagatttcaaacttgataggtatatatgaataaaaaatgataacgtgctcaaaaccactaacaatagaccgtcaccattctaagttctcaacttattacttgaaaaataatgatcaaatgcgaagggggaaaaaagggagctaaaagaagagcctccaaaatctgactcttcagccatgagtattaacagcttcccagaccaagttcttggggatagggttggtgagatctcgtgcttgaagggcagcagtcctgagagttttaagggtggaaacattggcgtcccagaatgataagctcctgtaaggcaaattgtgcttcttgcaaaggtcaacaacaataggagaaatgttcctcaattggcaacgaggcatgcgtgggaacaaatgatgctcaagctgaaactgcagccctccatagaaccaatccatccaaggtgagcatgaaatatctatagtcccagcagcctgcttctcaaaccaatcattcccaccagggtgaccgagataaacatctgctgagaaatggttcaaagtgaattgaacatgttgaactgatgtgactgcaaagctcaagagcacaaacatcgtcctctctgtccaggtgggcaaacatgaaacaaggagagggaaccaagtccagaacacaagggttcccattatgttcaaagctctatttgggataggtctttttgac

SEQ ID NO: 188151 - DNA, 5703 bp, Cannabis indica
tttgaaacaaacgttctgctccatttgaaatggttgtaaatgattcttgcaaaaaactaatcgaagagggtgtgccttacaacctcatgccaagcaatgaactaacaaaaactgtgtcctggttgtaatataaacaacgcaatcatatgaaagacaaaaatgataaatcaccataccttgcatcaaagcttctttctcctgagcccacgacagcacatatactgctgataatccatggtggtatatacgcatccttaatttccacactagagcggaaaacagaagacaagtgttccatggattcatctttcacattagagccgttgtctgaaatcgaaatatgttctgctcctttcaactccatgcattttatctgagcaaagaggatgtaaaatttacacaaaataaaaggaaaaaaaaaataaaaataattaaaagtaaagaaacattctgcaatctgcataactaaatatgccattaatgggaaaaaataattggaaagccatatcccaagaaagagtgttctccacactaagtcaaaaataatggtttcaacaggtcaatagaataagaaagtaaaaacacatatattacacccacctccggagcagaaaatgcagcattttgaaatggcgcaggtgaacacagtaaaggaacatccattcctgccaaggctgtcacaaaagatctgcatagagccaaattggcattaaatctgatctgcttagccagaattatcaaatggggaagttgagcagaaactagagaattgctacaatcttatacctataatttaacaagatgtcgtataaactatgtgcatccttgttgccactgaaaaccagcaaggattctggggtattatcaacatctgatggggaactccgtcgtcgagtctgaggtattttcagatagaagcaccaacaagttaagaggtagatttaaaacctttgtgccttgtaaataacacattaaagaaacaactgccgaaaattgatttgaggtctatcactatcaaacacaaatgagaatacaatgcaattcaaacatgcatacgcaaatagataccaacctggcccaaattctgtttctcaatctctgagagctcaacaagatcttcagttgtaacttgctctactttggaatggcagagaggcatagagaaacacacgtcctaataaaaacaatataaaattggagatataaggcaatgttaaataccagaagaaacaaggatgcacatagtttatacgatatcttgtttcttgtaaactggaggcatgcttgtgcggaaactatatcctctttaagtgtgaagttcattttattattatttttattggatagaaggggacatataaagaatagttggtttcgcgcaagaaataccaatcaacaattctcattgtacatacacagtattattctgcaacctaaattttaaaaataagaaaagagacacgacttacatgctctttcaacaatgctcggaagcttcttgttgattgggatatataagcattgcacaggcgtttggttctccccgggccatcacaaccagtaaacatcaccacaaaatgtgtcgtgcaaactaaggtaattcaaataaaaactgatgatcaatgtcaagtcaagtttaagaaacacaaatcagttcaagaaattggacacatgctattgacatacagaaaagaacacaactaaaggtaatcattctcttttatgcattaaatatttaaacacatagagacaccaacaataatatggcatacgacaaacacttgcaaagtttttaaatctgttgtagttgatggaggaagcaatgactcgtatagtcttgcagggatatcttagtaaatgtttggtaagaaagcaaaataattccaaaagtactgcctcaaacctcaataacaacaaattataaagtaagcacgttattatacaattaaagataggtaccataaaagatattacagatgccaccccgaagcatgtagtaaaggcttcgaaatgagtcctcccaggctagttgtcgttttcttaaaaagtccacttccactgcacaagaaaattctaggtaaggagagagtagagtcttcaaaacctaatcttgataagggacttagttaactcacctctctcagctgctgatgaggtcaacactgatattactgaaggcggcaaggtagattgaggatgaacccatgaatgaaatattttagaacatacttgagaagttgagttaagtcttgaattgttgctacttttaccatcagaacaatcaaagtaggattcaaaagagggcccaccaatgtaggcacaagacatgagtgctttatgaatcctaaagaaagaaaattgaattgagcaacaagtaatgcaaacagatgaattgaatttgaatgtaaaagaaagaaaaattgaattcagcaacatctaaacagataagtaggtggtggaaaagaacatacaaaatacaaattaaaaatacaattaaaaaatacaatagtcgacattaacatgtgcatgattttgaagtttatcttttgacaatgaagtacaaaggtagatgaagatcactttatattttttctgtgaacatttgacggatatgattacatgatcatgatgctaactttctagtttctagtttctagtcaataacacaaaaaaattatctgaaaacattggcaaatagaatcaactacacaataattcacaagcagatatagatatgaatgagtcttaagagaacctagaagacctgacccgaatttcaaaatcaactccaacatgatctttttgatatttttcccatttaattaaacactcgaagaggattagctttagttttcaagaaatttcatcttttatggtttgaaatttgggccgtgtcatctaggttctcttatgaaacttcttggaaaaagatcatattggagttaaggatgatcagagcacaataaactgaatgggaatagaaatttgatgctagttgaaggaccattttcatgcatacacaggagaaaccatttagccgagtgagacatacctctaagactaaattttagatccaatctcctaacatgaaatgctgttgctcacagctatagatgtacttaccatgatatatgggaagaacatgaaatccgcatactagttttgagagtaaaatccaagggcactttttggccaagtaagcagaacttgtccaaattagccattatgtgattgacacatctttcagaggaagaagcagatactccattaatgcccaaagtttcacgagcagctaatccttttaacgctttgttctattaaacacgttaaaataattttagcaagcaaaatctatgagtgtttgtttgtgtgtgtgtgtgtactgtgtgtgagtgagagaggaaacttaccatatcaacagttgcaaatccagatgatttgccatctcgtaatgaaagttcattaacactacgaaatgtactttgagaacctttttctgttgtttgagatatttgaaccacatcatctttggcaacttctgtagaaccagtggatttttctggactaccacaaccaaaaatacagaactaaaaaattaagcagcaaagcaagtgcctacatatcataataatattcacattaccgaaatgcataccaaaagggttcgtgccttctcttagcagccaaattagagagcagagcgagattcttcaagctgctaggttgctccatcaagacatcctgaaaaagtaacaataagttttgcatgaaatcaacaagaatcaaagtggacattaaaatcaaataaaacttttgaaagaatatacatttgtaatgtacaatgtgcagtttttacaaagtatacaaaccttagcattttcttttccagaagccattctaaacctagatttctttgcaggatatagttcatccaaacgagtgtcaatgtatttagggttccttgacagttctggtttcttgaggctattactcccctcactataattacacaacagaaaacaagtgaattatttatgggttgaaactaacgttacggaaaagtaagaaaagctcgccttatagaaccaagcaaaggggctggagattcatcaatgatctctaccacattaatccgcttcaactgctccccctgtcatatgaattggagtaataagactaagaaactgaattcacagttcacacacattttagtcgcagtaactcagaaacttaccctcagttcagatggtgtctttcttttggccatgggtgcacccttaatagctccacgaccaatctggagtgaagggggtggaagagaactaggttgggcaacttctgccatacaaaactacagacaatggcaggaactcttcaattaatcactctgcccctacaaagcatcattcaatttgttaaaaaaaatatggagaacccgtcttttaatcaatattattcccccattccccatcatatcgatcaaaaactatgactaggtcaacttagtatatacttcctttgttggtttaacattccacagtattattttgaagtccaaatctagatagagaatgggagaatcccacacaaagcaacttaacagatatggagaggaaatgcaagagttaacgcgttttggattttctatagaaaaacataagatcaagctcctaagaatacaaagaaagaaagttcgagtttcacaaactacttgcccaagaaacctcattgaaattttgtcaaacacaataaacatcgcataaagggttccattaccggacaatgaaccagcatcagaaaatatactaccttgaccatcgaatctaactatatcgcttcgcttactacccaatacaatatgacccaaaatcatagattacgctctatactgaataagattaattgcataaaaaccaacttacgtcgatggaggaccgatatgcattcgaaaaccccaaaaatctctgaacgaaataagggatttttggaatcgattgggcccaagcggagaggtgtaaaaggtaagagagggagggagaaaagaaagaggaaaggaaagatggtgggaaatggtgaatttggggttttatttgaacaaaatttggaattccctcctgttacttacgccgttagttttctaacggcttagcaccgtttctttcttgaactttatggatttgtttggcgggtagttttgaaacaattttttaaccctaaatcaaacattaatgaaatgataaacaataattataagaacacatttgtacccacgtacgacagtgctattgtggctacgaatcaaaatctccggttaaaaattagtattgtgttaaacttatcgacacattaattaatctaatttttattagatatgttaactaattttgttcactttattagaagtttaattcttttataaataaaaaaataattgatatgtcaaattttaattagtttaacacagtataacactattttttaactagaaatcttgattctctggctacttgatcatgcattttgctcctaggtggggtttagttggaatgaatgaaataaaataaaatagaaaagaaataacttttattttattcttttgtttggttttattttaaagtatttaaatattatttttattctaactatatttttattccttctaatcatatatcgcttaatggagtgtttgttatgagtttgagt

SEQ ID NO: 188152 - DNA, 2500 bp, Cannabis indica
cttgtctctctctctctctctctctctctctctctctctctctctctgtaccctagagctagaaatattttcactaactgatcggagagcggagaggagtaattccgtttcactcatatgccaccggagaaacaattacttcactaacaacaggtactgtacttaaggtttagtatggttgttttgagttttctcaagtgattctctctgttttgttttgtatatagagttctacattggcatcctacatggataatatgatttacctattatagtttataatgtttagttctaaggtttcgaaattgtatatattattaccttttgaaatgttataatagtatgaatatgtgttaattttgttctaatctggatggaaagatttggccagggccaaagagaatttcataattttctgatttttgttcaataaaataaattcggcatctttcttgtcaatcaatctcatttgtatggtatttgttcctacatatgttttatttcagtactgtgtttatgttttggggataattgtatatctcggtgttgatgaagtgtttgatgacattgagaaacttctctccaaatataatcagtttatggtgtttctaggaaattttaattgtactaattttactcagatataactgcattgaaataaacaacaattagaaaaatcagtcaggagtagactggagctgtatggctctactttacccaagcatttatcttctaatttcgattttgcatatgaggagtgcatatcagttttggcaaatccagtttggagtattttcttgtatcttgatgtattcccacacatgacttggtgtttagcttgcttctaaaattaattttatatagatacataatacacatgtaaaagcctgatatgttatagtgctatactgtcatggaaaggtgttgtagttgtggactcacaattatgtttcaaaccgactattttcccattttcgcaccttatatttttctgtttattttctagcctttgtttattaatttctttgcttattcctgttcaagtattttgatttcaagttttttgttcaattgtagaagtatgtgtaattattcacaaaaagatttttccatgtaaacatatgataatttgcaattttgcttaatacaattaggatggacagaattcaaagttcagttgaaactgcattgaattctcgagataatgcaaatggtgataggatgagtgaaaagatgattgatgtggtggatgggatgcatagcagagatactggacttgttagttctccaaaaagagaccttgcaatatttggaggggatacagattttgaaccctgcagcggcattgagtttgaatcacatgaggcagcatactcattttatcaagaatatgctaagtctatgggatttaccacttccataaaaaacagtagacgttcgaagaagtcaaaagaatttattgatgccaaatttgcatgttctagatatggtgtgacgccagaatccgatggtggtagtagtcggcgcccaagtgtgaaaaagacagattgcaaagccagtatgcatgtgaagcgaaggtcggatggaaagtggataattcatgaatttataaaggaacataatcatgaacttttacctgctctagcatatcattttcggattcataggaatgttaaattagctgagaagaataatattgacattttgcacgcggttagtgaacgaacaagaaagatgtatgttgagatgtctagaaaatctggtggatatcaaaatgttgggtctgttcgagctgagatgaattttcagtttgataaaggccgctatttgggtcttgatgagggagatgctcaagttatgctagagtatttcaagcgtatccagaagagaatcccaattttttctttgcgatcgatttaaatgaagacagcggctagaaacttgtttgggttgatgcaaaaagtggactgattatgtcagtttcaatgatgtgtttcatttgacacgtcttacatcaaaatcaatgataaattgccatttgctccttttgtggggtgaaccaccactttcagcctatgctacttggttgtgcaatggttgctgatgagactaaatcaacatttgtgtggctactgaagacatggcttagagcaatgcatgggcaagctcccaaagtaattattactgatcaggacaaagctttaaaggcagccattgaagaagttttcccagacacacgtcactgctattctctttggcagatattggaaaagattcccgaaactcttgctcatgtaatcaaacagcatgaaaatttcttgcctaagttcaataagtgcatctttcagtcatccacaagtgaacagtttgacatgagatggtggaaaatggtcactagattcgaacttcaggatgatgaatggattcgaatgctgtatgatgatcgtaaaaaatgggtgcctacatgccttggggatattttttttgctggcatgtgtac

SEQ ID NO: 188153 - DNA, 3696 bp, Cannabis indica
ttaaaaattttaattagtctaaaaaaaacatctataggctgactgaccgtcttagaatttttgccatgcctaagtaaaattataatttctaattacatctaatcaattccattgatggcaccttgagatgtaatggagaactatataaaagctgagccaaactttgaccaagtttctatattttcattgtaattgggactggaccagtttcttgaagttcaaccaaactaagtgtatgatgatgttaggattttggtggggtttctgtttatggggtcgtaataaaattagttggatatgagaaaatgggtttgtcttccttattaagtgattgggtgggtgagcgattttaaaggtacatcataactctaaccaaactatatggtacttttctttctgctgaaccaaaactattggtacttaagtactattagccagattttgaaagggaaatattttgacataataatttgtttttttttatcatgttaggaaccgtacgtgcattaattctctagggatgaatattgtatttcgtttttttttttagagaaaatagatcatttcattaaaataaatcaattgtgatagagaatttaaaatttttagataaatatccatctaaatacaatccctcgtattagtaatagaagtaactagtgtatgaacatcattcgcatactacaaaatgacattataagaaccacctttaacaacaactattaaagaattaatatccaaaataataaaatttaaactaacatttaaataaggattattcagacaggccataaccacatttgaattacaattaatactaacaagattaaatttataattaatggtatgccaacattagccccatcctgataacaagaagccccaccacattaacactaaagtctcccaagagtctcactgcccacgccaaccaaacaacaccatcatcacccgagatcacccctaacctgataaaccccttaccaggaatcatcgatgcatctgtggccaacgagaaacatccagcaggcagagatgaccacagcacagtttgaccaaacgtcgacgctaaagaggaacaatccatcaagaatccacgccgaaggtgctcatgaaattccaacaattggttttcgacaagctccgagacaacatcaattcttgattgagcgccacaaaataatattgagtttctatcataccacagccaccacatcaccatcaatatcaactcaaagctctcccgggaaaactcttcaaagaggaaaataaacacctcctatagctagaccatggccacatcggtgtagaaatggccaaatccccaagcaaaaatctatgtaggatgcagaatagagcaaaatagcatcgcatgttccagagtttcagaaacttcttcacatctcaagcacaaagtcagaacttaaaccttttaaaagattagtgtattgctattggtatggctgagtaaaacattcaccatagatagaccttaactatgatactcagagccccgtgacccgaaggggaaagactaggatttgtagaatcccatatcgcttggggatggtcaagtgtgatgattctgagactacctagttgaagatgatttaaatagattgaatggtactgcctatataaacaaggtgcatcttattttctggtagcccattacaaaagaacttcacagttaatcatgcttgacctagtgtaattttgggatgaaaattttcccaagaagtgtgcgagtaaggacaaagcatgctagaaacacttgtgttggtttatagggtcagtcgtcattccaaaaagtagccagagtaatgtactcgtgtataagagccatcattctgtgggtgcaagggcccaatggcggcttgaaacgaggacgttatcaaaggtatcagagccttcacctaatcgaaagtgtggtcgacaaggacgtcagactgccaaagggggtgattgtcataattagagccccatgatccgaagaggaaagacccatatttgtgcaatcccacattacctgtggatgatcaagtgtgatgattctgagactgtgtagagacggcttaaatagattgattagtactaccttatatctctaagtttacccagattaaacacattaagtccccacttttctatgcaaacgagttataccccaaattccaaaataggattattcgaaaacatgcaagtaaaatgcaaaaaataaaggaaacttacttgtaataggaagtggggatagatgaacgtcatgacatctaacacaataagggaatgactagttgaggatcctgtcgatgttcgcttgaagcagatcctggtcgatatgatgtccgcttgcccaaaactcactagggttcaactaaaaaaggtaggacacaagagaacatttggtcgggataatgaacgaaagcaggttgggtataccgaccaggtccgatcaagggatcaaaaacaaaaattttgcatgataatgaggttagcaatccagaatttcaaaatttcgaattaagggttgattttttctaagccccgaatgggtaagtgaaagtgagtatcgtggaatcaaaattaaaatgcagatatgatcaagcaatgtgattaagcatagtcaagagtttacattcttaaacctaaattttctatggttctcctataacaagttaaagaactatcaagttttacagcaagaacccagaattaaacattcaaacatataaaagaaaagaaatgaagaatttactcactattcgaagctttagatttgctcggatgatgctggtcggtgtttcctgaggattcttcaaaggatttgaaggaaaatagatttcttgctctgattcttcaaaagcaaaaatggctaaaagtggttgattaaggtttttagccctatttatcagcagattagtgaggcaaagtaatcatttcaaattttaaataccttgagttccccctaaaagtgtacgttgtgcactcaattatctgaaggctaatcgtcaaaacgtgctaatcctaaggcatggtttgaggtacatgtcagtcggcattaatgagccgaaaattgaagaggtccttggtcagagtcacatcgagtcatcaactgacacttcgaacacgtgccacccattcagataaggatccagaccgagtgaagtccacgtgcgaccacgaaggtctcgcacagacttggcgggaaaatgttatctcattttttgcataatgacgtggcagaatacacaagtgacacatgtcttgtattcctcgcacctgtgcggagataaatgtcccgaatagacttcatattatacatctgcatgcataacttcttattacccgagcagggagaggtcagactattcgagcaggagcaagtttggctttctgagctacttattaggatttaactacttcagaatactctcgtgaggtccaagcacgaaagacaatccctacaatcgtgggattgggtaagaggaatatggcaacatgttccaatttcctattttgtgtatcaattatgtaattaatattctttcctagtttacacattgtaagtaaaagggaaaccctccctcatgcattaaagccctataaatagtgacttagtctcactgtaaaagggatcgaaagaattgctttagagagagatctaagaggattgctaagagatttcattgtaagagc

SEQ ID NO: 188154 - DNA, 1449 bp, Cannabis indica
acttatgccgcaatttttctaaataaaaaaaagtaaatttttgtgaggtatttcaaaaaatagaataaaaaatgtaaaatttgtatgaagtcttttaaattagaatttttgtgagtgctcttagtttattagaataatgaataggagatatatatagtcttaatatttctttatacaaacatgctataccaagcttggtagctagtaaatgtagcaatattctagttttgatagctctagctctgtgattctgtagtgcaaaggggaaattgtcatttaaaattagattttggtaatgatgactcatcaatttgataataatgtcaatcactgctataactgaaaacacaaaagttaatattattctcaaaagttaatcgttatattttgtgtttacacttacacaaaatcatcaccaaaatcacatttgggcactgcagaatcccacttttcatatcaccccaaaaaagaaaagaaaataaaaaatctgaactatcctattttcgcctcaaaaaagaaaaaaatcagaacttttttaaacaagtgtccaagttcaaaagatttggtttgatcattggtgtaagcattataagacagaaagagtctctcatttgggttctccaccaaagttcatattattgttgaatctaatgggtactcttttactttgcttagtattgtcagttttgttgtaccaatctactactaatggggaagatcatcatcatgatcatcatcatcagctggagtttctgagtggggagttgctggaatcggcgaaggaggcggagttctttgaatggatgataaagataaggaggcaaattcacaagtaccctgaactgggttttgaggaggagaggacgagtcaactcataaggactgagcttgagtcaatggggattgagtataaatggcctgttgccaagactggagtggttgcctatattggttctggttctaaaccagtttttggtctcagagctgacatggatgctctccctttacaggtttctgaaaatcatatacaaatttatatattcatgttttattgcaaaaggttgccatgtgatttcatttccaattggattatgagaattgatttttacaagaatccaaaataattttaaaaataccttcagccaactaatttataataatgtcaatatgaatttccagaattagaaaaaataaaatagttatgctttcccaaagttaaatttttatttctctaggtaaaaaatagacgaaattataaatgttatgagtttttataatttttttttataaaaatatagttttttttcaaaaagattattttatggcaaattgaaaaaaaaattgaaaaatatgagaaaatcatgtaagagtaaccaggtacccttatggtaactagaagggtaaccaattatcataaaggagtaaccagttaccctatgttgttttttt

SEQ ID NO: 188155 - DNA, 2111 bp, Cannabis indica
agagagagagaggagaaagcgcgttcaatgttcactggcaacttccacttgccagacacaaatgtgtaaagcggtacaaacctgattaacagcttcaccaaaagcaacaaatgcaaactctccaccaggtgcaagaagaagaccaactcttattgctgatatgattgaaacaccaaatagtctaccaactatagcaaccaataaagtcttgccaccaattaaaagagccaatgatccaacaatgacagggaagtttgaaacgagaagttttggatcgatggacattccaacctgcaaaaagataatataatcattatcgattagtaaatattaagcaccatttttcacagtattcatggaatacattgatggcataacttgtccaaaatgcttcctacttaaaagtctggtatgaacaagttaaatacagcatttttctcttcacatttaatataaaaagaaggaagattacaagattttaaatggacaccaacaataataataccacttacaattttctgggatttttcttctacaatatgttaaagatttcatctaagaaatttttatacaagagatgtattacctaaaaaaaatcaatttgaaccaaatgaaacattaagaattgccaatatgaagaacgtaccgtcatgaaaaagagacccaacaaaaggccacgatatggagcaatatcagattcaacctgcaaggaaaactcggtttcggctaggagcaaacctgccaaaaatgctcccagcgccatcgaaagtccagcctgttcaagagataaatatattatgcaacttcaagacgagacaaataacataaaaattcagagaatgctaccctggcagtaaggagactagttcccagaataacaagcaatgtgttggcagagaagatctctgcattttgattttcagcaatttgcctataaattgggcgaagcaactgaaaaaccacacaaaaggaagttaggtctggcataagacatattgacagcaaaagctaagagcgcctagtattgaaaaataaaaagtacaaatttaatgctcgaagatttgagttaaatactatccacctttcccaataccactttttcataaaacttgcttatagatgaactcaaatactatgctagtttcagtctataaagttatttcatttatgacttccagacccaatagaatataccaagattgattactcttgaaaatataccacggcatcagtgagcactaacaataaccatttcaaataccaaggataataggatatttatgcatactaaatcaaagtttttcacagttgaaagaaatttttctagtaataaatagaaacatagcatggataccactcaatttaaatttcctagcattctcaaattgtgaaccattactgccaaaattctgaaggccataatatttgtaagttacacttacaaaaatcatcatcgtattttttaacaaatcttatcaaatacgcatatgcagagaactctaggcaagattgtgcaataactggattaatgaataataaaactgcagcagtatttgcataaacttagttttctatcaattttgcagtcgtgaaaataaatgtcttgagtatacaaagacttaccaagcgaccaccagctataatggcactgatggcaacaacagctttaacagcagcaagtccaagagcttcagcaatggcttgaaaaccaacctagagagcaaagaaacaaatatttaaccttcagtaagatgaattctcgcatgatattccttctttttgtgtgtgtgtgtgtgtgtgtgtgtgtgtggtggtccttgtatcgaatctgtgtaactcaataattttttttttaaaaaaagctgcatgttagaggaatgtaaagtgttttgttgtggcccagtggaaaatttcaagcagtagttgtgtttttctcagcagatataattgaaacaaacaataatcgaactgaaatttagacatgaataaatgagaaaacataaacatgagttgcctccgaatcatagagagaacaaataaaaaagggtattttaaaacagctgaaagaactatatatatatatatatatatatatatatatattctgttag

SEQ ID NO: 188156 - DNA, 895 bp, Cannabis indica
gataaggttgaccaccacagcatctgccaccaacacataaatgactccaaatctcacataccaccggaattcacgaatgtaaactttagtttcaagtccaagcataaccaacaaggagccccaagcaagaaattcgatgatcaaagatgttatctgtgaacaaagaggtaagttatattgcaagtttcagactctactagaaatgaaacaactcagaatttgaagtacattcttattatataagacaaaataattcaccaaaatgactgaaaacccacctcaaaaggagacagatcagtcttaccatccagattaaagagtgaaatatccaaaacccatcttagtaatggattggcagtggtgtatgcagccagcaaacccaacaagtaattgtagtaatttgacctcaaacgaaacctttgtgctttggaattgttcttgattagccatattcgatataaacagaggcccagaagaaccaaatgagaaaaggagtccaccaaggagtcaattgcacaaggtgtatacgaaccaaaagcactgtctactagtcttccccaaaacccataagcttgtggctgacagtaccaactaagtggcttaaaccccatatttgctcctcttcaaaacttcacttatgcttgctaatcactatgtgttcttccacataatacacttcctacaacataaatcccatttccacaattaagactttgtaattaaattattcaacatatatagaaataataaaaataatcaagtgggtttcagagtaaatataacaaacagatagcaaacactgcgaatcattaattcaacaagtacacacaattcagctccaaaaaccaaagacccagaaaccattaagcgggaaaattagttttttttttttgtt

SEQ ID NO: 188157 - DNA, 2075 bp, Cannabis indica
ttttttttttcatttttttttggtgtcttacatcataaagcgggttaatgttgctgcaggatgtaacaattcttatcccaatgttatcttcactttctaaaaatgaggtatgtgctattcttaattattatctttcaggaaaatctttgttttctctttagcaatggaataagtggtttctcctctttaaactgtttctagtgataatattaggcctagttagttagaaggttataatagaacctaatagtgctagggacttttaaggttcgtatggtatgttggtattacattgtattgcattatatattatgttatgtatttgcttgtattacaaagctgtataaatatatgataaatcaatatcaaacaaaatactatataaaaatttgatatataatgctaggtacctttcattcgtacattggcacatgtttcttcgtcaatgaccttgaacggtaataggaaaagtttttcggtcaatcccatatgagaattttgtttgcagtgattagagaagccaacatttcatagctcaagccttggtggatggattccataggttaagggatattttcctttctagcaatttggaatgaagaaaaaattgacgttgtgatgactaagtttgaaggtgacaccttactggggtaccaggtagatcacaaactatgacccatgctactttggtggtagttaaggtgcattcaagaagggtcactacctaagctatttagtcctctatggtatgatgtatatgttaaaggttattgcctaaaatttattgagctttcgacaccattggacaatatttcgagtgaataaacttttagcttcaactaggaaatgaaaacattaagaggacatccatcccttgggaaaactttggccactctatgctatgatgttgattgttaaaaatgaggggtttgggatattagtagcgcttaacatgtgaacacctcagatgaaacagtgtaagttatatgtggaaggaggcaggacacattttggacagcggctaccttggttgtgttttgggcaatgtagttggaaagaaacaatagagttttcgaagaggaagaggaatcaacggtaggactccgggagaaattttagttctggttcgcaacttgggtgtacctagctaaggggtttgagggattaccttttgtggatctcagcaaagagtggtcaacttttatgtgttcaaatcattatgagggtcttagattttatcgttttagggcctcactttgacgtttttgcttttgtgttaatagtattcgtccgccataagtgaggctccctaataaattttcgaggttagtctacgacatttgacctctatctctttagaacaaaatcatgtccatcacttgtgtcaatagaaattcaaattcttttacaagaaatcaaggcaaatcatgaggtgtttttaaaattccattacgccttcctcctagtcgagaccacgagcactccctctcattaaagatggataccattccaataaatgtgaggccatattgatattgttattggaatttaatccttttgccctctaactttcttggatgtaattgctaagacattagtaggttaagaatgaacagatatatagatgatgtgttgaagaatgagggaggccttaacggttaggggccagtctaagacaatggcctctgtctcttttttcaaaaaaagaatgagggaggcctaatagttgatattcttgctctttaaacaaaaattcttagctcacggttggcattcgcgcttcctagagaaggaggtgatgttattcttgaaattaaacaagaaaataaagtgaagcacaacgacaacttggacacagtactactagtgcaaatgaatcatgaggctcttgtttcttggaggatgaaactattcttctgggagtcctttttcgttaagattaaatagttgttctttaaaagaaaccaaagcttggtttttgtcacagctactgcaactcagaggtgaaaccccacctgaagaggagttgtcattgctccattgtaaacaaccaagaacacttccaccccaaaaaa

SEQ ID NO: 188158 - DNA, 3370 bp, Cannabis indica
tacttggtagttattaacaaaaaaaaaaaaaaaatctatgtactgttattatcttatcgaaaaaacattatatatgtactattatctcaaatttaatatttatgcattgttaaaaaaaataaaactaaatgatatttatgcaaataaaaattcttggaggtagatatagaatcgacggtagttgtagttcgacaatgtagtagtagtcacgtggaggaccattatgcaaaagaccaataaattaggggagctaaatgcaaaaacaaagtaagaataaaaaagaaatgggacccaagttaaggcgaatagagaatatgaagccccgcctttaggccaaaatggggaaaaatacatgttatgaatgatggccggtggccgaccttttccccttttccgtttctcagttacacaaaattttccaatttctaatcctcacaaagcggaagtcagctctctctcttgccaaccattttctaaaattattattacaatattaatacaaaaataaaaaagttctcttttttttcttggaccatctacttttgaacttttctttctttccttctaaattattcattattgaaggaaagaaatcctaaattacttatacagaacaaaaatccaaagagatatccattaagataaaaaaatatatatataattacagataaagaaacagctgatgtttatgcctggaaagaggttaatgaaaggtgttgcatttttttcttccttttctagttataattttttttttcctgaatattaaatttattattattttagcctttttgctacttatttttgaatgcggttagctttttactgtttctgattgattatctattcaattccaaccaaaacccaattaacttttccattagctattattattattattgtacaaattattacattactaatttttattttattttttgaattgaaaagaatatatatttaaatacagaactaggttggatttaaaatatttaaatgcttgaatttttatttatatttgtcatagaaaaagataattaatttgttagattaattaattaatgagagaagatttacagttcatctgaggttgtggggagtgctcttttttgctgcctgttagtgataagcacgcctggcaactcatcattccctccaacccattctctctctcctagtcttttttttccttctctctctctctcttaccattttctttgtttctttctctctctaaagtttccattttccctttctttcttcttcttcttcagcccccactttactctgtttctgttcagcttttccttcttcacctttatttttatttcttggtttttcgattaaaaaaaaattggtttgattttctcttgaatatttcgattagattggatctgggttccgatatagttttgatttggaatcgggtttttcttcctcatccgctaaaggtacggtcttttctttataaattccttcacttttcacttagattttgataatgtaacggttgttttgctcaattcaatgagatgtagcttttttaatgatttttcatggatattagctaatttcagaatttgttgtttttactttttcaatatctgtgtttgatctgattgagtaattgctcggttctaattcggttttactgatccatgaccaactgtgacgatattttgctgagtttcagctgtgaatgtgtttttgcctcctctttttatgtgtttgaatcttgtcatattttaattttagtggtattgggttttggacatttcgaattttgtaataaagtacataggtcttatgatgtcattagaattttgggtgttccaagatcagtttttggttaacacatggtatgtgtttcgtattcagtacaactatttgattgttttcttagttaattctgtcactgttgcccattgtttcgtgcacgtgtgtctctctatcagctatatgtatatttatatctttctctttcccaaagctttcacctgtttcattttgatcagtctacatcattttcccatatgcttcctgggttttccgtatcgaattcgggcttaaatgcagtagccactgaacaagtatttttttttttggtttacattgagagttttttctttcgaaatttctcttggttactgctcatttatccttttgcctctcttttgttatctcaagtctaaaatttgttttactgtgtatgttggtacttttattgttttttttttcttaattttgtgttgttgactgtgattttaagatggctatatttcatttgcatctgtatatgattataaaaatgattactggattctgctttgagtctctttagatgatatttctcagtttgttacagacaaggagtttgaatcattgtcaagaagtttatcgatactaaatgtctgtccacaatgaatgctaggtcaattatcaacaaacataaaatataaggaaaatgtgctattttttttaagattcaacaaaatgatcatactgtctatcttgtggagattatagagtatgaatgcttcaaattgcttatgaaacaataagatgacatagaacatggcatggatattaagttgttatattattaaaattgtggattttgatagcaactaattttgtgtgcctcctcatctgagtggtggtggatgtaatcatgtaaggtattttatttcttctaaagaatagaatgcaatcaaaactgacatttttgatagttaaagaggttcctgtaatttgtgggtgggtgaatttttaatgtgaagcatatttggtagcttgggaagaatctcttcttataatgctcaaagagtaaacaaattttttggctcaagaatgctagtaccttgttttgctaggttttcttatcaatgatgaacatctttcattatttctatcctttaagcatctgtctttattataataatgcatttcctgctaatttttatcatgtgatgttcatcatgtcacatatgttatgattgtcaaagtacccttaaatatttaatcacatttgataagttctatttgattctatgctctcaaaatatgtcaatctcagttttattgctttcagggtaatcttttgtgagcccaagttctaaaattttaaacagatagctacgaacgaccacatggcagtttccatgagagatttagattcagctttccagggagctggtcaaaaggcgtatccttctttgtaatcaagttttcggcatttaagatgcaaattttctgctatccaaaattacaaaaaattcaaacatttaaaattataatgaaataataataatatctgtgtacagttactctgctaatcttattgtttttgttgctcttgtttttttttttt

SEQ ID NO: 188159 - DNA, 5300 bp, Cannabis indica
  modified_base (4)..(4): a, c, t, g, unknown or other
gggnggggggttgaaaactactaactagggtaacttgctggctgctatgtaattgagaaggttgaaatgttgttaggtttgactggtagtatgatataaatgttgcaggggagatgacgatgagaaagaatatcttataaagtggaaagaacttccttatgatgaatgctattgggaatttgaatcagacatatctgcatttcaaccagagattgagaaattcaatagaatccagtctaagtataagcagtcttgtaataagaacaaaaacattgttaaagatgctgctgaattaaaaaagaagcaaaaagaatttcaacagtttgaacacagtcctgatttccttactggaggtaataactttctctagcatgttcatatggtttcacatttttatatgttgttagtcactttattgtaaatttctaagtgcatttgtgtgtgattaaaggtaccctacatccttatcagctcgaagggttaaacttcctgcgtttttcttggtccaaacaaactcatgttatacttgctgatgagatgggacttggtgagttttcttatatacatacatacatatatatatatatattttgtttctttctttctctttaatagattgtatattggtttggactttgtcaatcttttgatctttgttgttttcaggcaaaactatacagagtattgcgtttttagcgtctctttttgaagataacattggtccacatttggtggttgctccactatcgacattgcgaaactgggagcgtgaatttgcaacatgggcacctcaaatgaatgttgtatgtatatggtgggatttttctattagcaacatggtcggtttgttagtaccatcctaagtggaaatttatttgctgcaggttatgtatgttgggtctgcccaagcacgtgctgtgatacgtgaatatgaattttattttcctaaaaatcataagaagctgaagaaaaagaaattcagtgcagttagtgaaaacaagcaagaccgcatcaaatttgatgttctcttaacttcatatgagatgatcaacttagacacgacatcactaaaaccaattaagtgggagtgcatggtaacatcctgtggctccttgtttagtttctagcttaaggtctgacttcctgtttaacgttgagttcatatgtagattgttgatgaaggtcaccgtctgaagaataaggactcaaaattgttttcatcaatgaagcaatattcaactaatcatcgtacccttctgactggaactcctcttcaggtctattgttgaattgtgctatttttcacacacaacacacacacacacatatctatttatggatattacttaattcattacagttaatcaaatcagattaagttgttagaagactgctattctttttaagcaatagtatggttatatacttttattatctctacaaaatctcaaatttacttattttccattggtctattatgctttcagaacaatctcgatgaactatttatgctcatgcacttccttgatgctgggaaggttagtataagaacatccaagtaactgaatatattctggtaaattttaaagtggtttgaattgatttatagagctcttttgtttcgtttttcttgtttatttaattgcagtttggaagtctggaggagtttcaggaagaatttaaggacatcaatcaagaagaacagatctcaaggctccataaaatgttggcaccccatcttctcagaagtacctatctcaaacttttctacttataagaaattattgataattttcatgttaggtagttttcaaacaagcattaggtgtctgatgattacactgcatctcatgatgaaacattagaggttaaattttgttttacattttaacttgtgatgttcaagcatgttttcaagaaaaatagttttcattactctctttattacataatgattataaggatccaacaatgattaagaatggcattggtttgttattataagtacttgtgcactcttgtctcataggttagttttttgggagtgagttctacccaagtggttgtaccattataatgcaaataagtgggtatggttacataagcattggatctttaagtaccattcttgctgtttattctttaaataattttattttatgtaattcccttccaatcgatttcggtatttttgtacgctgctgtagctgggacaaatctttcattatttatgcatatgtattcataacattttgagaattatttgcatacaagctgttgaaaaatatggtcgcctgaaatctgtttacattcatgtttaaatgtcaatactcttttctaaaaatgtgtgaattccattgatgttctccaggagtgaaaaaagatgttatgaaagaattgcctcctaaaaaggaacttattttgcgcgttgagttgagcagcaagcagaaagagtattacaaagcaattctcacccgtaattatcaaatactaacccgacgtggtggtgcacaggtaaggggtgtctattgctggaacaaagatttttttcttattgcattctgatctaacatatcattgcggttcaactccagatatcattgatcaacgtggttatggaactacgcaagctctgttgtcatccttacatgttagagggagttgagccagatatacaagattcaaatgaatctttcaagtaatttatgagattctttttaagtttgtctgtgataagtaatatatgttatttgaagtgttcttgtattatgaactagagtttttatttttctgttgctgttttgttctctcttacatgggatagacaactagtagagtcttctgggaaattacaattattggacaaaatgatggtgaaacttagagagcaagggcatcgagtacttatatattcgcaatttcagcacatgttggacttgctagaggattactgtacatacaaggtatacaaattattttgttcaaagtttgagaatattgttgaatttactagtgttgatagctgatgtatcttcatgctatggatgtgtgattttattttcagaaatggcagtatgaaaggatagatgggaaggttggtggagctgaaagacaaataagaattgatcggtttaatgccaaaaactcttctagattttgctttttgctttctaccagagctggaggattgggaataaaccttgcaacggctgatacagtcattatatacgataggtgaactgttggccgacagtatccttttaattcttgattctgttggtgatcatatttatttgtgttaaggtgttcttacttaatgtgttctggttctttcattattgtagtgactggaaccctcatgcggatctacaagctatggctagagcccacaggcttggacaaacaaataaggttgtcattagttatccaccattctccactccccaacaccaaaaaaaagaaaaaagccactgtaattagtggaggtttctaatggtggactgttgttgttgggatgtaggttatgattttcaggctcataacacgtggatccattgaagaaaggatgatgcaaatgactaagaagaaaatggttttagagcatttagttgttggaaggttgaaggctcaaaatattaaccaggtaaccatttttagccgtggacttctggatatagagtgaatttgaaaatgtttcatatccaattaaattggcatgaaaatgttagaaaacctcttgatatttgatatttaaatcttaaaatgattcctgttaacttatatttgttcatggaattctttgaatcttctacagagtatttattttgttaaatctataaccttcttgctttgcattttgcatgtgatgtgctttgaggcagtatctaattgggtaatttataagaaaactttataaaataaacactaaatcttaatgatttctgttcgttataggaagagttggacgacatcataaggtatggctcaaaggaattatttgcagatgaaaatgatgaagctggaaaatcaagacaaattcattatgatgatgctgcaatagataggtaaatgttatgatacttgagctttatttcactatattgatggcgttcaatataatattgatgacattattgagtgtctgtcttcactagattactggaccgagaacaagctggagatgaagaatcaaccgtggatgacgaagaagaagatggatttctcaaggccttcaaggtttatttcttctcacttgaatattgtcattaagtgaatcacatcacatatgtcatattttttttttttgaaattttgttacaagagccaagttttaatagtttcccctcctatagattcattgtatagatctgattttttttttcaatggttagattttgaaacatgtcaaagacttttctttttgggtcatatacatttatgatttttttttggttaaatatgtcaagttgtggtgcattcttaaccagactaggaaagatactaaatgagattttttatttttttcttttcatcacttcactgcaaaattgcaccactaattttcttttttatcttttttggtgaatgtcctgcaagccagaggaacaatttttatttaattggaccacacaggcacatagcatattatagcattgtttacatattttttttaagatggtcaccacttagaccttttgatcttgaaaatgtaatgtaattgttttgttttattattttatttttaactgccttgataatttacttcttatggatttccctagtatcccatttacaagaattaacctatcaggtaggaggggaaatcatgggaagtaatttagttctgtagtattagtatacaagtaaagaagaaaatcctgtaattactttttttttttattaaaaacaaatcctgtaattagttacttgccttagatgggaggattttggatatctcagttaataaacctaaaatgtaatattttgtaagaatttacggtctaaacatatgttggtaaccgaaagggtatgtattgtctttccttgttttgttttcaattatttatatttttctattaggttttattttaaataataacatcagcgaatcgtattgtaggtagcaaattttgaatatattgaagaaacagaagtggtggaagaggaagcgcaaaagcctgctatggaaataaatcagcagtcaacagcacagagaggtcgacgttctgggaggagttgctgagagacaaatcgaaagttcacaaagttgaagagtttaacgcgttgggcaaggaaaaaag

SEQ ID NO: 188160 - DNA, 11382 bp, Cannabis indica
cactatgatttgtcatctatccatgatgaagattctgaaggtgaagtttatatatttctgtcaaacaaaggtcctataatacttagcgttttctaataatacgcttttaaactgcaggtggatataaaaacattaaccaagggagtgatgagttagataatcaatcagctgagaaatacaaagttagtattcaagaggatcatgtagaaaatgcaaataatagtcaaggtacccacccttttatttttctaattatgctttctttatggaagctttatagttcatcgattttctttatatttttctcattcatgaggctattgatgtgcagatgagaaggcagggacactaattggtacaacatgtttggaatataacaatgaaatagttgtgttaaaggaagatgttgaagcagagtcgcggtctcattttacattggagaagttgcaagagggaagtgagtgtgagtctccaagtgcatcaaacaaagttatagcaagtcagcatcaatcttttggtgatcacaaagatgttgcttcagagttgaatagagaccattcattttctgctcatgatttcatttccatggctgatcaagttaatgtggaagagaagctggaggagttggaaggaaagaagtgtgagtctccaagtaactcaaatgagatggcgtcaaacgaagttttgcaaactgtacaggaatttcaacaacctcatagtgatcttgacaatcatgttcctttggaggatgaaggtgcttcactagctgctcaaaatctcatgtttgagaatgaaaaagttgaggtagaagataagtttgaggagttggaagaggagcaggagagtggagatttgaaggagacatcaaatgaaattacacaatctgtgctagaaattcagcaaccacattctagtgaaattgaccatcatgttgcttcaccagctgctgataatcttgtgtttggcgatgaccaagttgggtttcaagataagtcagagaagttacaagaggagcaagagcgcgggaatttagatgctattggatccttgtcttcagaagttacaaaggaggcaacaactgaagttattccaactctactgcaaattgagaaccttaacaaagatgatgctagaatggacaatactttggccaatgaagcacttgatatgcatgacagtgaccgtggagctatagttgggcctgaaaatgttgaagatccacaagctgatgctgatgttgaagttccacaaactgaagctgaagctgatgctgatgttgaatttccacaaactgaagctgatgctgatgttgaagttccaccaacttggacagatgaagaagttgactataagaatatggatagtgcatataagttggaagaggagtattcttcgaaagtagagttatctattgatatctcctgtggctcaatgctgaatgtttctccatcccatggttagtatctttgactgtattttgattttaaataattgtaaatttgtaatattttgagttagactaactaactggcataaccactaaattgcaggagatgaaaatagatctcataatccctgtgaggacgcagtttatacaacagaagaagaggcaaatacaaaggaagaaggtattctgttactttctgttgcattgtttttagttattagtttgaaaatttacatgttcttgataagtttgtaaaattttgattctaggaaatggagctgcaagtgacataaaccaggaaattgatgcaactactttagagctttctcaagtccaagccaattacaatgatggtgcagcaaaggattctgctttagtaacagacgttgattgtagtattgaggaagctcttgaaaacaatcctgttggaattgatgatgtaaatgatggtgcagcagaggattctgctttagtgacagacattgattatagcattgaggaaacactcgaaaggattcctgttggaagtgaggacgtaaatgatgttgcagcagattattctgctttagtgacagacattgattgtagtattgaggaagcgcttgaaagcaatcctgttcgaagtgatgacgtaaatgatgttgcagtaccacaaagtgttgagtgctttgttccttcactaggtagtttaactctacaatttggcaattcagcgatgaatgtttactgtcttttttatttgattaatttgagtttttatttcaagtcctcattttttttgaactttttggaaacaggtaatagaacctcagagcttcctgcttcagaaacaaatatggatttagctgatggtgacaaagagagagctgaacaatcttatgataatgggaagcacatggaggttgaggaaaatttgacaatgaatgaacagcttaatgaaacatcagagcttcatgttccttcatcagagattgcttgttttgaaaaagttgtggatttaggagatggtgaaaaagagggagttgaaaactctaatgaagtccttgtagaagccaatttagaagacaaggaggttgaggaaaatctgacaatggatgatcaagttgaagaagtttctgaaagacaacttggagagcatggagatcataataccccagctgtttccaaagagatgatttccggggatagtggaagtcctgatgagaaggaggatgcatgtgccatcatccaagagtatttagaaaatgagacccgtatgcatcttgtgcatgaagagagtgaaccagaatctgagggatgtgaaagtgatgcagtagaaggcgtagagacaaatagtgtggctgagcatggttttgagaatatgctggaagatggtggagaagaagatgaagaagcttgtgcaatgaacactgaaagaacagagctggaggaagaagatggtgctgtctctgtcaatgatgaagatctggatgaaaatgtttcatgggtatctgataactctgtatcaggggatggagaaactgagagttttgaagttgatattggtggagaggaggaaatctcaaattcccagagtgttcatgttgaaaccacagtcagtgtagatgtagttgtgggtgctactgcagttgatgtcaatgatatctcggctgaagatgaaattcaagaacaaactgacggtggtactgacactatattgattaattcaaattcccaggctattagtgttcatgctgaaacaacactcagtgaagatgaaattcaagcacagaatgacagtctccgtgattctgtattgattaattctcaagaaaccaaagtagtttcaactgatgaagctggtgatgggagcttggatcaaagaattgcttttgatagtgttgaggacggtactgagttggcaggtacaccacccatttcaccacagaaattggagaatgattgtgatgagaaaatcacctcagacattaagacattagcagaaaacacaattggcagaacaggtttgtatagcattactttttgttctagaatgatttctttgtcatatagtattagctggttgtctttccttacttcgttctttcaagttttgaattgtatcctccattaacattctaattatgttatctttctatatagacaactcttcttctatggtggcagcaggaaaggactctccttgtcatgtatacagaaatcttgtcacagaaagtgttgaagttgtggagaaggttaacactgacaaaggtacagatgcaattctgtttttaacttagccaaaaaaaaaaaaacaatcaataacatggacgcaccaacttaagtcttacaaaaattctattttctcattttgtaggaactgatctagaaaatgtgggttcatccataaaagtaaataaagaccttggaactgacgcctcaagataccacagaattatgttggaagaaggggacaaaacaggtgatttctctctggctctcagcagtctttttagcagcaataacagcaaaacgaattccaaggacactggagcctcaagatacaacagaattatgttggaagaaggcgacaatacaggtgatttctccccggttctcagcaatctttttagcagcaataacagcaaactgaattccaaggacactgctgcacgtgtggaagaactctcacttatgaagcctgaagagggtgtgtttatgctcactaaactttacaaatcaaataaaaaattggattaaccgtaaagttaaatatttacaaacattcttgcaggaactgaccttgaaaatgtgggttcatccttagaagcctcaagataccacagatttatgttgcaagatggtgacaaaacagatgatttctctctggctctcagcaatctttgtggcagcaataacagcaaaattaattccaaggacgctgctgcatgtgtggaagaactctccatactgaagtctgaaaagggtgtgttctctaaactttacaaatcaaataaaaatttggattaaccttaaagttaaatatttactaacattcttgcaggaactgatcttgaaaatgttggttcatcctttgaagcaaataaagaccttggaactgaccatagagcctcaagatgccacagaattatgttggaagaaggtgacaagactgatgatttctgtctgtctctcagcaatctctttagcagcaataacatcaagattaattccaaagaaacccgggaaatgcatgatttgcatcattcagaaactgtgcaattttctggtgcatttaaggacactgctgcatgtgtggaagaactctcaatattgaagcctgaagagggtgtgtattcttaacaaatcaaataaaaaatttggtaaccttaaatatttacaaacaatttttttaatttttactgtaggaaccgatctaaacaatttagattcattcattgaagaaagtaatgaacttggaactgaccgaagagtcagtggtatttgtatggatctgcacaatctattcagtagcaatgacagtaagattagttcggaggaagtagatgcagaagttctagaaaaagtggtaatatattctggtgcatccaaggacactgcagatgtggaagaaattctagaacctgaaaagggtgaccaacaatgctcagatattgctctttctagtcaatcaatgcaattgacacctcaaggttagtacaactcatcatctgttttaatacagttaattgtttgattaattgtagctactaatctcttttttgcaaaaattaaaacagatgacaaggcagtggagtgtgatgctgaagagtctttaagtactggttttgagctaaatttgggtttcgaagatagcaaaacatttgaacctgagagtgaggaggtgaaaaatgaggaagatactgtagttagtatttcaacagtttctgcttcagttgtggaagttcagattcagcatgaaaatcactttacttctttagatgagctcatctatgaaaacgagggatcaaaggagtctgtctgtcatgaatccgaggcactcgagtttaaggaatctacagagattattggcagcataacagctcctacaaacactagtgatattgtagagacaagggagttgaatgaaaatatttcagaaggaaacactactaatattactgctgattcagatgagcccagcagtgaaaatggaggttcagcagagaaaggtaatgtatatttaatcatcacctacccctagacaagtatgtctcagttaaatatttccttaaaaatattgagttattgttattctgttctcaggtatttcctcagcggaattgtgtggtgatctaaagcaggaggaaaatgaaaatgttgttgaaggcatggttgggacagcagaagttagcaatgatctgtcagaagcacaggtaacaagttcctatgccgctgctttggatgagtccatcattgaaaataacgtcacagaagagaaatgtaatgttggcggttgctttgagcacaataaagatgtatctgctgggtttgagagttctatagatgctgctgaggattcaaagcaagaagaaatttttgtgaacaaagatgattcagaactgaaaggaacaaatgtggaccagttttcttcaactccatggaccggtaagcttaatacttcagtatctcttacttcagtttcagaaatataaggtctaactctttggcccttgatctcattttgcagtttcttctaaatcaaggctcctgaagttggaatcacatcaagattatagtaaggagtccataagtgattctactattataccacagaataacattttctcagtcccagcaactccaaagaatctcaagatttctcatgatatgaaagagaacatgccaagcaccaagagggaacatttcagcagctttacagcctcgaaaaaatcacagaagagacgccctctggagaatttgccgaatatttaggcattcattgaaacctaactgaaatcttaattaatattagatgatgcatagagatttgaaattaattctggcatatctcatgcagaatttagatagtgttagattgatgtgtatgctaatttagattagtattcttctgttgtgtaataattacaaatttaaatgcttcgatttgtgctttgtagaaacaatgagtttcataaggtataaaatattgaactttcattattttaacaaaataaataaataaacatccaaacaagagatataaaatgaatattctgaaaattacatcacttggattgcagtttatttttctgtcaaaaatacaaaaatacaaatgaaagagagcaacatataaataattccatgtttaggggaactcatgaactttttcaaacacaatctctccccttttgtagacagacatacaattttgagttcccttattaggaaaaggtataataataagattaagaaaatggggactaaatgctctctcctgagattacagacaagacctgagtacaatctccctttcaaccatgtataataaagaatcaaaatgaaaaactttgcaaaacaaatctcaatgtgtcagattccagttccttttatatctacatgcatccccaaccaactaactcttctgcacttccatcttttaccaagatgacatttttctttcggtacggtgtccagggatgccttcatcttcaacccgaaaagagaaaaaataaaaagaaaaaggaaaaaatcttacacttgtgcatatttctacacagtttttttttttctacataaaaatcaaacctttttgatgaacccttctgttctgttgttgtatatctttttctagtcacagtccaaaccacaaacttccaatacaatatcacctttagccacaaatgggttgattctaacccacaaaagtgagaaaattgatgctagaagaattgaccacaccacaataatggttggaagtctgttctgtttgcccatgaaacctttgaggaaaggatagagatgaagaataacccagatggcgaaaaagagcctaccgaagagtggaccccatgaatcgtaaccattgctgatggcatctgaaattccaacaatgactccaataatgtttatgataagcaaagtcattggagggatcaataaagttgtccacttgaacaggtagagctctgagaattctccatcatctgcggcttttgatgtaacggtaaagtttgtgttaacaccagctaaaaccttaagcagaccctggaagagagcaaaaagatgagaggaaacaccaccaatgacccaaaattgctcgttcctccaccaatcgtgtatgccaacacctccccattgcatctcgagaatacttgttacagcaatggaaataaagagagccatgaaaaggatactggcatagttgctaatctgtagaagaccaaatcaaaaagcttttgtaattagcacaaaccgaaaatgcaactaagaaaggacaatataaaaacatcactataaaaaatagacttgatgagatgattacctcagggacaataaacctcccggtaacaagacatatagctggcaaggtacagtaggcgagcaacgggatagatgtcaaaggataaacaaccgagtttatgtacgaaaagcgctctaagtgctttaagccacacccgtacccataccatataggacaatgcctgctcaacaatatctcaacagatccaagagcccaccgaagaacctggtgcaacctatcagaaagattgataggagcagaacctttaaatgcaggccttttaggaatgcaatatactgatctccatccatggcagtgcatcttgaagccagtcaaaatatcctctgtaacagaaccgtaaatccaaccaacctggaacagaattaaatgtcaagtttctgttaaaagaaatgcttgcagacccttcaaaattttaattatagatacacaactgcatacctcttttccccattcggttttatcttcatatccgcaactaataacatgaatggcttctttcaacagtgaagcagaagatgcacccttgggaacaccgccattttccattagcgacgaagcaataaatacacttgactgaccgaatttcttttccattttcgtctggggcatcagcgatgatttttcgttgtctattgctgaaaagacagttcaaataacagattaatgttatgttatgtcatcaacaaaatatatcatgaataaagaaaactaatggaaataatgtggtcttgaaataggatgttattgccccttaccttctactcgctcaatattttctagcgcataaacctgctttgtatcatccttgcttttcgacttctttttgtcagtcttcggcttcttggttttcttcctagacccacaacacatgcagcaccatctcggccaacaattacaggttctcattggggacttcttcttggcaggagcatcatatccatagagtgcttgccttctaaacacacacccagttccaacataaattggtccttgaatcccatctaaacctttcatgttgatctgtatttaattatgaaaaagaataagcttttcctcccaccaacataaaaattaaggcattttaaggaaatgtatgtatcaatagatgaatgtcgagacacttacatcaaagaaaacaacattgcgatttgagtatctatcgtgacgatcaataccatcaaatctttgaggaaattgcacataacagatcttcttccccgaagtagggtccatcatgaagcacatggattcacgaagtgctttgctgttgtttatgtagtgatcacaatcgacattgagtatatagggagcatttgagatgattgctgagactcttatctgtattcattaacaaaagtaattataaatacataatcaaataaaaaagatgattaataaccaaattgagagagagaggctcaccaatgaattcatggcaccggccttcttgtgatgatcaaaacctggcctcttctcacgagacacataaaccaaacgaggtaaatcgtttccatccaaatcacgaacaccattttgaccaaggaaaacctgaacaatatggtaaatgtaagtaacacttttacacacttaattcttgagaagcttataacttgttgatgaagcaaggatgactaacctgaatcattccagggtgatccctaacattgtttccgggccatggagttccatcttgcattgtccagccatcctctgggaccttctttgctgtggcaactaatccatttatccgaactttgaactcctcataatctctctgtaccaacacattgacaacatcagataaagataccatttttgtcatcaactatatcacaagtaaaagaaaaagaatgcataccttcattgctcggcgctccctaacaaaagttggatctactttgtctttgagataatcaactttttgggcaaaataccactccggtgctcggggttctaatttatatttcttagcgaaagggacccactttcttgcaaactcggatgtttctgagagggcttcaaaagtcagcatggcagcaccatcatctgagacgtagcatgcaaccttgtcgactggataatctacagcaaggatggacaaaaccgtgtttgctgtaatgagaggaggctctttcataggatcgactgtactgacaaatacgtctacacatgccaaatcagatggcttcccttctttctcatacctatacagaatttcatatcaacaaaggcccaacataacacatacatatacattttcacattataaatatcaaagggagggaaagaaaatgagggagaaaagttggcacctcaacgataatcggtcaagatatgtttcacgttcaattggattccatttaggaaattgatcaaatacccatgatacagcaaaccaaatttcgcatataactgaggttaaccataatccatatgcatcgttgacagggtgaagaattcgatagtgaaaaaagaggcaaacaaccgcaatacgaagaaggatgaccattctatatggatttatcttgcttgatctaattggcaactttcttgaaagtggctgcctaccttcatccatcctataaaattgaaatgaacattaatataaaatgttaccaaaatgaacaaaggaaaatagctaaagagacagttaaatgaaggagtattaagtgatgcatgaactaaaaaagaaagtttcattatcaaattttggaaaattgattttgtaatttagtcaaacagcttcttaaacttcattatgatcatccaacaagttctgaaaagtgtgatgaaatcaataaactataaactataaatatatatatttaagtaacaaccgaaaaatgaataagaacagaaacaaaaagggcccctctaagaagaaattggacaacattagcaactctttactcatcttttttgttaagttattctccacactaaatgccaaaattaaatacggacattattgaaaatacccttcatctaacaagaaaaagcaatgttatgaacttccatgaactttttttatgaaataggaaagaaaactccacttgtaagagttagttatttttgtcttctagtcttttataagttaccatgaaatggaggctaactttccaagattacagatgtgttgctttcaacacctaaactcaataattcacttggattgaaaaatcaaacacttacttaggtaaatcagcatcatctggatcactcccatcatcaccgccatttccaccttcatgcttcaccacctgaagtctctcattctgcttcttcctccattcctccatacgatccttccacgcaatggaaccataaccatatacagccaaatccttcttaggatccattggccttggttgaactgcataatcaaataaaagcctaaccgtcaagcctcata

SEQ ID NO: 188161 - DNA, 1774 bp, Cannabis indica
cagaaacaatataggaccaagttagcaatttttattatagtattattacttagaaatccttatatcaagagagctaatatatatataaaaaaatagatttcagcaactaaccaaatatatccctttgtaggagacaggcgtttctctagatggaaaggatcagttgttgattcagtgattggagtcttccttactcaaaatgtctcagaccatctttcaaggtacactcaacaacagataattatttttaaaccaaatggccataaaatgttcaataaaagcattttgtatcctttatgcagctctgccttcatgtctctggctgcacgatttcctcctaagtcagcacgcaatagcacgcaagataattttaacacagcaataaaaggtaaagcaataatccccataataaatctaaatgacaccatcaaatggcacgacgactcaagagaaccaatcaacaatcaacacacagcaccccatcaatctgctgatggtcaatggagagataatacagcaatgaccataggaaacttgacagaaccacaaagccaaagttcagaagaagaaatcatattgtcccaaaattcgtttgattcctcagtcactcaagctactggtggaattagatcctgttcaggctcaaactcagaggcagaagatccctgtactggatggaaacctagcaacactcaagtttcatctctaagggattatcctatgaaacatcctgatttcccttattcaaacaatccagactatctgtacaggcaaccaggtccccattctggaaatagtcagttgtgtatgacaactgggcctagagcaccggaagtatgttgctttgaaaacttcagtgaagaaagcacatcatcttggcattcaaccagttcgagatcagcaaaagggccagatacaacttccagaacctcatgtagtgaacaagctgaatgtttcggtaacagctctgagcaacagaatcaaggctggaagtctcaagaaacaccatcagctgacccttgtgcattattaagctcacaattaacaagccaagaagcacttcattcagacaccgaatacaatcgatcttcttgcagtaattatcagcatttgaagagtgatatgtttcaagcagaaagcagttcactaacaaaccctgccaaattttctgatgcacctgccaagatgcaggaagcaactgcacagactgtttcacatgataataagctcacagaaaaatcttttgaagctggcgatagtatttctgcagtaagtatccagatggagaaacataataagttggtagagcaaagctctgaccatactccaaatgctgcccacaaaaaaatttcgaaagcaaaaagaggaaattctacaggtcaaaataataatgaagttgactgggacaacttaaggaagcgggtagagatcggtggtgaacaaaaagaaaaaagcaaagatgcaatggactcaatcgactatgaagctattagaacagctaatgttaaagatatttctgatgccatcagagaacgaggaatgaacaacatgctaacaacgaatcaaggtttttcctaaccctcatacacactcgcagtcattgtaatgtgaaaatattaagatcatacccaactgtataaaataaagtgatgaatagcagtatcaatgaatcagacagtagaacaattcctagggttcaaacatattagaaatggatccaaacaacactaatttgaagtttgcaacacctatacgtgtgtgtgtgtgtatatat

SEQ ID NO: 188162 - DNA, 2594 bp, Cannabis indica
gtggtgggaagaggaaagaaaagtgttcagtgggagagttgattctttcattgcacggatgcatctagttcaaggtacactttcttataattttttctctatatttaataaaaacaaaaaaacaaacagtagtgtttttaatttaagaaaaggaaatattcattgctaaaaaaaatagcagtccaaaagatatataagtttaaagtgctctgctattcagaaaggatgctaggaaacagtccaaccttagagtgtgttattctgtagtgccaacaggactaacagctatgtccgtgcttggatgccagaaacaatttatgaccaagttaccatttttttattattattcagaaatccttacatgcagagcaaaaaacaaaatatacttcagcaactaaccaaatatatctctttgtaggagacagacgtttctctagatggaaaggatcagttgttgattcagtaattggagtcttccttactcaaaatgtctcagaccatctttcaaggtaaacaatgacatataattaattttaaaccaaatggccatacaatgttcaatgaaagcattttgtatcctttactgcagtttgccttcatgtctctggctgcacaatttcctcttaagtcaacaagcaatagcattcaagataaggtcagcactacaataataggtaaagaagcaacaatccacataataaatctaaatgacaccatcaaatggcacgaagactcaagagaaccaatcaagagccaaaacacagcaccccatcaatatgatgacggtcaatggagagatgatacagcaaaaaccaaaagaaacttgacagaactacaaagccaaagttcagaggaagaaatcatattctctcaaaattcttttcattcctcaatcactcaagccactggaggaatcagatcatgttcaggctcaaactcaaaggcaaaagatccttgtactggatggaagcctagcaacactcaagcttcatctctaactgattatttactgatggaaaaaagtgtctcagttcaggaagtttatgatcgtgtagatgtatgtacagcatttgagaaacacaagcatgtaaaaatgctaaactcaagctcttatctgatgaaacaccctgaattcccttatacaaacaatccagactatccgtatatgcaaccagctccccattctggaaaaagtgagttgtgtacgacaactgagcctagtgcaccagaagtatgttgctttgaaaacttcagtgaaaaaagcacatcatcttggcattcaaccagctccagatcagcaaaggggccagacacagtttccaaaacttcaatatgtagtgaacgagctgaatgtttcagtatcagctctgcacaacagaatcaagtttggaaatctaaagaaacaccatcagctgacccttgtgcattcttatgctcacaatcaacaagccaagaagcacttcactcaaacactgaatacagtcgatcttcttgcagcaattatcagcattggaagagtgatacatttcaagcagaaagaacttcactaaaaaaccgtgtaaagttttcttatgcacttggcaagatgcaggatgcaactgcagagactgttccacatgacaataagctcacagaaaaatcttctgaaactggggatagtatttctgcaataagtatccagttgcagaaagataataagttggtagagcaaatttctgaccatactccaaatgatgcgcatacaaaaatttcaaaagcaaaaagaggcaattctacaggtcaaaagaaaaatgaagttgactgggacaagttaaggaggcgggtagagaccggtagtgaccaaaaagaaaaaagcaaagatgcagttgactcaattgactatgaagcaattagaacagccaatgttaaagatatttctgatgccatcgaaaaacgaggaatgaacaagatgctggcagaacgaatcaaggtttttcctagctctcatacactcccaccattgtgatgtgaaaatattaggatcatgcctaatggtataaaataaagtgacgaatatcaatgaatcatacacaagaacaacttctagggttcaaaagtattagcaatcgacctaaacaacatttattagaagtttgcaacacctatatacatatattctaatttgatttttcctttaagccaaaatatattttatctttctttaaaaaaatcctagaatgtatttcaagtttaaagcatccttgaatttaaaaattgcttcacaatgttacaggaattcctaaatcgcatagtcaaagaccatggaagcattgaccttgaatggttaagagatgttcccccagatgaagcaaagtaggttatatgaaatatcaacttgcttgagaatataacaagttcgattacattcaaaacctgctacatacattacaacacctcatacattgatgatatttaaagctaaggttacttgttacatacgtttgatttgtataatttctctacaaaacctgctacagggattacttgctaagcattcgaggactgggattgaaaagtgtcgagtgtgtgaggcttttaacacttcatcatcttgc

SEQ ID NO: 188163 - DNA, 3105 bp, Cannabis indica
aaaagtttctatatagctctgcccaaacaatataaaatggtccttcttcaaaagatgaaggaaaaaagatacaaataagactgtcactccactactaccgctatatattcctgtgcatatatacttaaacatttttatatacatagatattatagatgggttgtaaattaatgggcgagtgaatcttttaagaaatatacagcagatattgacgataatttaaaatcatttttagggcaagggaaaacggataaaggatcattgaagagtttaccattacattcacattcagctgccaaactaggattttattttatttttatttattattttaattaaaaaaaaaaagaaagaaaaactaaggttcacatgtttgcttcgtgaagtggaattaatcattcactcaataaatatatatatagagagagagagagagaatataagaagaaaatactaaccctagtagtaataaaggcacgttcttcgtacgacgcagtttcttctgtgctcaccgactaaaccgcttcaatgatacataagatcataccatggttaatttaccaaccttgcatgggttggtattttattaatatatatatatatatttatgaattagcattgtattaattagttagttaaaaatattcaatagaaactatcttatagacttctcttatgaatgcaaatgaattccaaggaaaagcttccagagctgcgtgtcatcgcacgattggtctgcaccacagatctcccaacggatttcgtagtaatcgactagctcaagataatgcttctatcggagtacataacttttaatatttatataatatatagttaaaagtccacttcttcaatttaccatatatatcatgaaatatatttaaattcatatatattaaataaaaaaaaatatacatatatacattattgttctgaccggccggccactcaaaactttatctatgaaatattatattatattatttgtctgttgttatggtcaagttatatgtatattaatatatatggctaacattttttgcattgaaatctctgaaactgaagagctcacggatcacatataagggttttgaacagaatatcatattatgtgaataaattagctatatatatatatattacatgcatatgcgcaccgaaacaagaggtatacttatatatctaaatcgtctaattaatatcttccttaacaagcaagaagattatataatatatatatatatatatgccaaggaatccacttaaatggtatgaaatttatgagcaattgtttaactgtgtgaaatgatgaaatgatgaccatcgagttactcatggatcaaaagatatttgtaattttgtcttttcatcctctcgcttcaacatcaatttttaatttcttaattatggaaaaatttgacaccgaatcaatgtttgaaaatatcgaatatactgtcaaacaactagttatataaattaaaataattaaaaccctagctagtagctttagcccacaaatttgacaaaaccacaagccaatatatatagattaatctcatattgtaaaatctacgcttattttcaaaaaaaaaaaaatctcatattgtaaaagcaataactaataattaattactaatgtactagaaaggtacccaaaattcatgtgtttattagacaaataatcaacttgagataatcaagagaaattaagcaccacaaaatttgacaatcaatcaaaccacacaaaactccaaaacttaattatatatcattgctccaagttgatatgccaagttggtactgggtattattattgcctgtatcaaaacatacatctcacatgcccattaataatagttttaaccaatattcatgtaccatctaattatttgattccactactctaaaacaggaattggtatctataaaagcaaaaatcacttccaatatttttcatcaatcaaacaaaccatttcataaagagctatacatatttttctctcttttgaatccttaagtacatttgtttgagcattttactaagatccctacatggcttctagggcacaagtgtccacttctcttcttgtagccctaaacttggtgttcttcaccatggttagctccacttatgtaccatgcccaccaccaccccacaaacaccaccacaaaaatccatcacctgctgtccctaaccctaactataagcccaagtactgtcctttggacacccttaagttaggagtgtgtgcgaatttgttaaatgacttggtgaaccttgttgttgggaccccacccaagaccccttgttgtacactcataggaggtttagttgatctagatgctgctgtgtgcctttgcactgcccttaaagctaatgttttgggactcaaccttaatgttccgatttcactgagcttgcttctcaacaactgtggcaagcgcgttccctccggcttccaatgtccttaaaattgtttggatttcatttctgtttatctttgatatttctttttctgtttaatttcctgtatctttaattctattttattttattggttattggctcatctcatgccatgataacacaagatttatgaataaattattctgatttatggttggagttgtttttattgataagtgtatctattcatctaaattctcttctatactacttcgattatccattatttattaattttcttttttgaaagaacttcgatccattattttatatatatttatatattgttacatacaagtatacatggaaattattattcccaaattactaaattagtctttggctaattaacaggattttttttttttttttttttttgttggaagataatgaaaatattcatattgactagttaatggacgtactttatgatcaaacagcatgatacatatatatatatatatatatgcatatcaaatcgatcgtgtacacaatagtcaagtgcatgtaaaaaaactcatagctattccaattaaaagtataaatattatagctaaattgttgctgtacagtgaaaacaaatatttattatgccgatggaataatataccaatcctaacaatgattaatatcattta

SEQ ID NO: 188164 - DNA, 3199 bp, Cannabis indica
taggctgtttagatgaacacaagtgtaaattaggctcaatatggttagattgtcgggttccaatcccatcttaagcaactcgaagaagaaattgatagcctttttggtgttttgtgtttgtacatgagcagatatgatagtgtttcaaagtgaaatatcttccttttcgcccatttgaaatagcaagaggcacaaccgaagatcgttgaatcttccatacatgattattagcgatgtaacaatggcggtttctttaatgattcatgctctaactgcaaaaccatggacaaacttaccctgcaatcggctgaagcaggctggcaatagatttagcaatgttatatgattaggcctctttccatcccttgtcatttcgccaaatgaaaccataatctctttatgtaaactatgctgacgaaaacctgccatcattgcattccaagacaccaaagtcttttcaggcattgattcgaaaagcaacttcgcggtatcaagatccctactgttatagtacatataagtgaattaacaagagaaacgtcttgtgaaaacccaattttgacaacatagcaatgagtagctgcaagtttctaagacaacttcatagtctgcatagcatatacaggtagggagagccccaccgactttatcggggtagaaaattatcactaacatttttttattatttgaaaagtatcactagccttatatttggaagttggatcttaattaagataagaaaaataaaagtgtggataaagagaaaaaaaacaacttttcatgtttggtataaaatttttattgaattaattctttttcattcattttttcattccatactaaacatgatatatttttttagtttttttcttatattttcataacatttttttgttgacacaaaaatcaaaacttccaaacatagttttagtatgaaaaaaacatcaggtagtacccaatatcactgtaaaacgacatactatgaccgatacaattaaatatcaaatttatatttttatttaataactattatataaatatgtattaccttgtagtgtttagtactactaatgctgagtaaagtactaatgctatagagtattactattggacaacttaaagtacctaatatcataccaatgtagctcgttgcgagtaatttataattttttatattatttattaaatcaaattatataaatcccgatattaaaatacactaataacagaatacatgtcacgtcttgtagtagttaacaccgagaccctaacatttttgaatggtatatagtgtaacaactcaaagtctcaaagcccgaacttttggacggaaagtaatgagatgagagaacaccaattttgttcaaacaaaagtctagtctagtcttattattgtacatcttaatcatactctatcctatttaaatattttgttattatatatttatttttcactatcttattttgttgggccttatttgataacttttggcatgagtatcacgttggtgcacaccctttttacatttgaataatactcattacaattgggattccactaagaaattgtaaagaaaaaaaaaataaaattaaataaattcattaattaatttgcaatagttatttattaaaattgaattgaagttatataattagtctgtgatctccgtccattcaccgcccatgttgtttaattctttttatttttttaagtttattctaaaacaccgaccattaaatttatttatttatttatggtaattgcataataagttaactataatgtatttacattatattatatgtaactttcgttagtaaaaatatgcatacttaaaaaatttattttggcaagatgaagggtttttttttttagttgagttatttcaaaactttaataaatttaagaatagatttattattataaataattctaattttttattctaacacatggtatttttttatataatatttataattatttttacatgaaaacaaattcttcatatagatttgtacatattattattcaaattataactttttatttttagacaaataccaaatcatcatcaaattttagacatgccaaaatgatagtgaatttggcaacaatgtaattttaataaaatattcatttagattgatcaatctttttttctttttttagaataaaattattttatttgtaaaagaaaaatattcttattctataaatcaaaattcaccctttttctttgtgaagaaattttttagtatttactcacacacacttacattaaaaataaaaacaaataaatactcataaataacctcaataaagtaaaaacgttttaatttgagtcataaaataaaagtgtcaaatcaaacaaggcatatttaggattcgaatggacttgttcttgtgccgtttacttacatttgcattcatactcatgccaggtcagccgcgacgtgtaagaaacaagaagtcatcccttttgactttgctgacatggcaaatcgccattggttgtctagatatttaatagaaggtggtaggccacacttgattatcatacatcaattccaaagatgtaagtttatttagaatatttgttgtaaaagttgcaaacgtcttgtgtttctaccactataaactcaacaatctttttagcaacaaaaatatttttttttaacatgaggtatccatttcaatgatttcattgcaacaaaaatatctaatatataattttgaaagttaattaagtttaatttttttacgtaataatatttaaattatattttaaatttttttaagtatttaattattaagtgtcaaatcattatatatgtattattttttattagtatatttaaattgaatgttaaataaaaaataaaaaaaaattaaatgacgtggactaaccaaaaaactgctacacaatttatggtcaagtacatatgtaagttccagaaatataactaatgtattattgtcgtcagaacttaaacttagatattaatctgcaactaggaattaaacttaaatttttacactgcaaattactcaattttttattttaggtttttacagaaacatataagttatttctaaattttctttcaataaatttcaaaaatcaacttcacaccggttacaaatttaataccaaaattagataaaaataacagttttacaaacattaaatactta

SEQ ID NO: 188165 - DNA, 5259 bp, Cannabis indica
ttttttgctgtaggatgtagatcatagtgttttccaactccattggagaggcttaatggttgttttcccttaataaacaacagacaccatttgatagcatgaccatatctagattttagtctactacaaacattagaagttcaaagaaaattgtgattcagttaaatttgccttggaatgctcgaatgaactctcacaaaatagtagagaagttgtcatatacctactccaacagcgagcgcttgaagaattgaatacttttgttagagtgctcgcatcgatccctaaagactgaccaagagagagggcttctgagacaccaagcatactaatagccattgccaaattattgcaaatctttgccgcctgaatagcaagacaccccaataggtatcaaatatgttgcaacaatttcttataggggtatataaatcaggcatataaatatatatattaacaataatctgaacctatttattttatacaaaaaagttgaagtttgtatcatatgatgaaaaagagagagcacttcaaatctatgtcaccatgtgcggagtcatattaagcatgaactacaatgaaacactaaataaagttgtgaataatgtgaaacatgatgtattttcatgtatgacagcttaccgaaccatttcctgctccaccgcagtatactgtgttcttgcccattgaatggaacaggggttttgcagccaagtaagcctcctcagggccaccaacctgcataaatatcaataatattgtttatttatttatttttaattattattatatatcttatatattagaaacaagaacataactttggttccatcatgaatctcaggaagcttaggaggaagatttgcaaagattcaaaagtggctcaaccggttttgctcttggtaaatagtctctaataattcacctaattctaggaaattgcctcaatgtcactagtatcttcatgtccctagaagtgatattcaggtaaaatgaaaaggaaacttcaggaaatatggagatttttcctcaaaataagcaaagccgttgtatctattccaacaaaagagtcaaaaggtgttttcattgcatagcaaagctcatattttccttcttatatgacacaatgacaaaaaatgaatcatattataccatgaaagtaagtgtcccagcttctgcagcgagtacaccgccagatacaggagcatccaacattactggagtctcttgatgaccttcacaaatttacttaatcagagcagtcaatcataaaaataaaaataaaaaacccaaaagaatatatcatgcttgcatgcatagcaaaaagatcagcataaccttttctttttggcattttctcaggtaatatcagctactgggtttaccaaaggcaccttcaaaattactttgaaccattctatcatttactacaaggtatttagcttgtcataacaccatccatgtttctttaattctttttctagtccaagaaccaatgtcataacatagaagtccaattttaagtaggctacactaaattctgatgtatcaaaactttcaatgaaccgtacaagaaaatttagacgcaaccatattgcaatactttatctgttcttgatagttatttcaatctgaaattgagagaaaaaccatgcacaatattatgtccccgttccaagcatcttctattctttcccaactcatcaatagaacatggtaagcttgtttgttagtaaattaagactcctcataccatcaccatgcaattttattcctaaaatctgtcactaaaccgaaacaaacatgttattcctaatcattttcgaaggagaaattattaggccttaattgtttctgtcatgaaatagaattgagtaatgctcttcggcaactttccctacttctagtttccaatgtcttacactcttaggttgatcgtcttgtaaaaacaatctgtcactgtcagaattgtgccaaagttttcatgctggaccgtcaatttcataaaacaaatgtaccctaaaaatatcttgataaaaaatgtgtttatgtcagcaaaaatcttcatcattgttgtagtcttctacatctagtttcctatacagcttgggaaataaataactgaacatacaatttgggtagcgttgaattataacaaattagcaacataatcagcagatacccttccaattgagatgtgtaacaggcaaatgaaaacagtatgcttgtatttttagcacttatgataccttttttctcctttaacatgcattcagatatggtaaaagaaagcttccttgatgtttggggatcgattgtagatgaatctatcattagccacggtcgcaagacattcccactttgaagcagcccattaggtcctgtgtaaacatcagtgacctgcataaaacacacaatatgactagtatgaaaccataaggtcatcccatattagggactccactactcaacctaaagtatttcaagtaaccctctctttactgttaaagcaattaggagaaatggcatgtgaaattccatcagtatatggagcttgatgaaattagctaccaagttatgcacaaatcaacagtttctaacaagggtatgtaatttcgcatacaaattaaaaagcgggtatgaaaccatttatactcacatgagatgaagaaggaagcattgtaattacaacatcactgacttcaccaatttcaaaaggagtttcctttgtgacaattcccatgtcagagaaggccttcaaggcattagaatttctgaacaagaacaaaaatctcacctataaatacacaaatatactaacaatcattggcatataaaaaaacaacaaaagataatcaatcaatgaattcaaatacattacatgtcatgtacggctattttgtatccggcctttattagattattagccattctgaatcccatatttccaagacctataaatccaacattctgcaatgcacccattaaaaatatttactgtgcttcatagtgaatgctttgatatatgatacacacatatatatatatatatatttacccgtaaatccgtaatgtttcattagagataaaaaatacactaacccattatttcagtggggggcaaaatgaaaatttagaacaagaagaagaagaagaagctttgtttgaaagagtgtaaatacatcaacaagacagatagtgtattagattcaatttatttaatatacaataaaatacagaaacagcaaagaaataacataaaacgataaaaccttgaacacggttgataaaatcagattacaaataaaacccattaaaagccaaataataacaataataatagccatgaaaattgatcaaaaacccagttgagaattaggaagattatagtatagagtgataaataagaagaaaaacaaacctgaaatggaggagggggatgaagtagttgagatgaaaatctggggtgtggatgagagaattgaaagggaagagaagtaagagtagaatgaagagaaagcaatgatcttgctctacaccacctgcccatgattactgcttacttttaacttcttcttttcataatcattcactctacatgtcccaaaaccaacatatatgactgtgatgtgatcaaatacatacaattcaatacaactctaataattaaaaccttaatgttaagaaataaataaacacttacacaatctttgtctgttactcatcaatgtaatttgcattattgcttaacaaaacggggtttttcttttgttcatttatacatttaaagcatttctttttcaattcatttatacggtggtataaaattaaaaaagctaattaggatttttgtccgttgaactttgacatatactaaattatgctccctgaacttttaatgtcgttaaaaatgtccctgaactattgagattgttggatttaaggacttttttccaattttagtgaaaaagtctaacatgagtgaaagttcagagagcataatttagtatatgtcaaagttcaaagaacatgatttggtagatatcaaagtttaggagcataatttaatacataaacaatctttgaaatagtaaaactgaatgaaatttgacaaaaatccttaaatccaacaatttcaatagttcaaggggcatttttaacgatcttaaaagttcaaggggcataatttggtacatgtcgaaattcaaggggcaaaaaatcctaattagccaattaaaaatatacaatctttacttataaatgttctaatcacaacacacgaaataatctaaattgtaatccaattaaaaattacaattagcttgttcatttagaattttttgtctaatttttccgatataactttgtcttatataagtcacttttatttgtagtaagtcatattctgactttgtatatctttgactagacaattagcttgttgattgaaaattttttcatcgaagattgtcatagtgtaattcttatcactctttcaaaaaaaaaaaattacaatccagattgtaactaagttgtaatccaatcgcaactgactcaattcacatcgtaacccacacaacaatttaagttcaacaaaaaaaaaaataacttaccggtaattcctcatatcttttgcaactctttttttttttttttcctttttctcttaaaatggaagtagtagcaactgcaactcttatataataatttaattgagcaactatttgtggagcattgtttattggagaatttttaaaaatattcttctattttttatttataaaaatacgtttgtaaagttttaaaattacaaaaatacactttggtcagcaaaaaataaaaaaataactaaaaataacttgaaattaacatcatgataattataatataactataaataaactataaaataaccgaaaaatagtttattatttttcactgaggaatttatttttataaataaaatagttcaaagcataaaattaaaaaaaattggtgttgatatattttttatagttttttttttccaaactttttaaattattatgtaaattttcttatttgtaagtaatagtgtaaggtatggtgcacaacattaaaagaaaaggtatattatttttcttaacggatttttacattatttaaatataggctaattatgtaatccctcactaacttttggaaggattacacccctcaaataagacaaaataactataggttgatgttagtaagttatatgataggaaactggttgtt

SEQ ID NO: 188166 - DNA, 3594 bp, Cannabis indica
acaaattctagatgcttatctttattctaattacgatttgatgataatctcacttgaaactcattagctatgaaattttgttcttgcagccagtccaaactgttgacattgggacatgtgaccagtcagtccctaaggcatatcctgataatggtactgctagtctctctactgataagctttttcattgctttcttccttggctccactttgttcattgttgtcttttgtggttacagatgaagtgacaaatggctacaatggagtacattccttgagtggctctactgacacgagatactctagtgatgaaggtatatgaactatttgtcatgattgcacatcatttttcatttctaatattaatgcttccttgatgcaaacacaaagctgttcttgagtttatcgtttctctagttgtacctcatctttagattacaccttaggcttgaatagccaaaacatctattgtatacttatcggatgttagactgtaataaagttaagaaaaggagttagactgaaccatcactgtatttactattagttatttgattattgtttcaatatattaacacaatatcagagcacttagtggttgtttagttatcaatcaaggctaataagcctaatattttggtctacagcaaggaattctggaaacaggttttccatgacttcatatattactccacggcttactcctactggaactccaaaaattatttccacaactgggtctcctagaggatattctgcggttacatctccacatcaaacctctggtgccacttctcccacaaaactgccatatgattcacggtcttctctgtcttcttggtacccatctagccagcagtcttcagcagcaaactctcctcctcgtagtcgtggattgccaggtttgcattgttacgagttatcattgtctactattataatagtttggattataactccactgacttattattatttttgagtgctcttatatcctatttgcattgtacacaggtttatccttctattaatgcaaagtaaacctattttgttttctaatgataaatctagtcaatgttactgatattcttagaccatattttaattgtgcttatacattaacttgtgcagggcgcactccacgaattgatggcaaagagttcttccgtcaagcccggtaggttctgttaattgtgcaatgtatgatgggtggtttactagaatgttaaaaaatgtcttcacatgctgatgaacggttttgattattttgtaggagtcggctctcatacgagcagttcagtgcatttctagctaatatcaaggagctaaatgctcaaaagcaaactagggaggtatgttgttgaatccttgcaattatgttctgtgatgatgcaattggatatcttagactggttgcttaactagtgggtggtggttcttatatttttcaggacaccttaagaaaagcagaggaaatatttggcacagataaccaagatctttatttattatttcaaggattgcttaatcgcaatatccagtaatgcttcaagtatttgtcggttggaagggtttgaaataagtggtacgtttctctcccaaatttgtgtttctgtgcacatgtaagtaacgttaacttcatcctgtacaactatggaattgcaggtaacagagctccagcaaggtgagcacatggagggccttgagcacaaaagttagttatgaattgctgtttgaaacgtcgtggatcaactcattcccggttgctttaaatggatgatttatggtgtacttggtttgctgaagttaactagtgtcttcttccctttcaaaagctgtggtatggttttgtaagcttcgttaatatgtatcgttaagtgcaggtatgctttgtacataatggctttattttttcgcactacctgctgggttacccaaaaaggttcaattattggcattttccttttgaaagtttttcattcttgaatttgcatgtacaaaagaaccatattcaacatcagtcatgttctgttctttctcactctctttgtcacatacacacacaagatacaattcatctattcatttgttaaagtaattcaggctaagttttgattgtgatattgaatatcggcggctcgggtcttcagattagcatcttttcactttaaacttgtggtttgcaacattgacaaggtcacttaaaatcatgctctgaactgaatctgtaccaagtctcttttagttaaattagttgttgatgctgaaaaagaaagaaagaaagaaaaaagacagagatgtttgtacaaaaattgatagctctgcagaaatgtacaatacaatctaagtaagtgacacttgaaagggtttgatagtagaaattttttggtccttgatttaacagtgaaatcattttcctgtttgtttggatgtacgaaaaatctaatataataataacataaacgtttaaaaatgcaatgccttgattcgagttggagacagggaataaagagctttttattttatgctagattttgttgtacggtagtcataccatgtgccctattgcatatatgaatgttggccaatatgactttgaaaaaagaaaagtatgaagaaattattgattaaatcatgtaatttttgaaattcaaagacattgatcttcaatgatataaattgatttgactggttaattctatgacacttatttattttggttgccaattgccatggttattgtgataacttggaaaagaccaggattatgaattagtgggaaaagtgaaagaagaggaaaatgccctgtatctcaaagtgtaacaaatctataaaagtaggatcttggaatggtgagttgaaacaaaggagtgtactataagaaccagaataattttgtagtggtaattgatagaaaacaagaagattgctgttttgatcttatgcctcaatatctaccttatattcatttttagattacattgacaactccattattattattattatgtatgaatttcagttcctatctttacttattttggtaaattattgacaaggaacaactaaatattcatcattaagaatttcagctcctatttatacttaatttgttaaattattttacacaagaaaattagttgaataagaacttcatcagcttctctaatgtgatacttaaatcacttcttgtcttgtagttattgtaatgaagactcaaaaaggaatacataatacatatcatcaattagtggaatcagtttgcttaaaaattgagacaatcatttcttgtctattaaaaaaaataaaattctattcaactctacctcttcaatttttttctttttgggtctttttaattagtttaaatatacataattttaaacccaaaatgagaaaataaaaaaattattcacatgcaagtgggatggaagagaaggcaatattggccatcaagaagaatagaaagcttaggcacctgatactgatcagtaccagcctgcaaatctcttctcttatctttatttttcttttcactttttttttttgtggaaaataggcagagaaaaataaagattaaaaaaaaaatatata

SEQ ID NO: 188167 - DNA, 1084 bp, Cannabis indica
tttcaggttacaagttatttattatttatttttatttaatttctaaattaatcacaatgatttaatagtaatccaatgaacttaaaaaaatgttactagatggttataataaaaatgtaaccattgaaatatatatatatataatatatattgaatagaacaaatttctcattaaaaggcacaaagccaaagcaacccacaaagacttaaagaacatctggtaaatccggctaccacacttttgtcatatctaaggataaggtaattttatcaagattgtgagctaaatagttcccagaatgattaaaaaagaaaaatttagaaacattgacatgattacaaagagtatgaatgtctttaaaaataaggtcaaactcagccaaaaccaagtctctcttttgcaagatctggataacgcgttgacaatctgattcaacctctacgttgttaaaaccaaggcgcgaacagagtaggccatgaacaattgtcatagcttcttccactggcgaggaaagggatcccctagctggaacagttgtagaagccaaacaattgccccactaatccctcaccacagccccttaccccatgtgtcgatcagtacctcgaagtcccacatcaacatttagtttcaatttactactatcaggcggcacccaatgaggaacaatcgggcatggaataggtgggaagagacacgcaatagaatgacacttctttgcattggccgcctgaaaatttttagtgtactcaaaagcccactccagaacccctttagtgtcaatcaatctcttattatgaacccattgatttctacgaactaatttctccaaagtaggacttataaaaactccatctcaactttagtaaaaatcacctcaagtttatgaagcaaagtataaagattggtgggggcatagaggaaggattactcacaaactgaactttattagtaatatcacgaagacccgagcatccccaaagggcatgaaaagaagactcctcctctaaatgacacacaagacaccataaagcaatgggaaccttatgcatagcgaagttacattttgttgggaacctgaaa

SEQ ID NO: 188168 - DNA, 1787 bp, Cannabis indica
taactcacaatcataccaaattaaagtttaatattaaaacaaagaccagaagtcacaacaatcattaacctatgacaagacacgataaaagaaaattaagaaacctggtaaaatggttacaatattatagtatgtctaacaatcataacaaaataaagttaaaaacattttatcaaaagaccaaaagtttatccttcccatataaaaagacataacaatcattaaaaaagaccagtagcttgtccttccaaaacaaaaagacataatctttaaaagttacaaaattataatcattatacacaagatccgaaaaaaccaaactatgaacctcaaattcttcgccctttagttttatttaattcatcattcaataaaaaaaaagacttcagaaaacaagataaaccctagattcgataaaatattaagaatctaataggcatccaaaatcacctcgtttatcaattaaaatatttcaaagcaataatatcgatgaaaaagtttggcatagagagaaatcataaaacctagaataaaatagcgaacagtgatagtacttacaaattaatatgatatcgtgaaacagagaacgaactccttcaagaacccccttttgaacttgtaatcgaaaagcctgaacaatatattgcaaaacaaaaaacaagaattaaaatctaaagaaagcaaataaagaaacgaaacagaaatttagaatacgagcatacaagagaacaagatcgtgagagacttacgatttggagaaatataaggaagaaaaatagagaacaatctgagaaaccctagaaacttgagagtaaaggactaaaaggaaaaggatgcgaaataagctggaagcaaagaatagaaaaacctaacgggagactgggcttatataggggagggagagagaatgtgagtttacgaaattgccaagcagtttctaatgtaattactaaaatacccctttccaggctggcctagagctttatcctcagccacgagttctctacggttactcattcacgcttttcggtcccaataagttaggagcgtgtaaaccactctcgactaagagacagatgtcctaattttcagtaatattcaccgtgtcattcggaaaaagggtaatttcgatattttacataaatttccacgtggcaaaaatttgttggttgaatttaaaggacaaaaaaatcgaaaaaagagcaccagatccctgtacggaacgacgcagatatattgtacggtcgagattgctcagatacacgtattgaaattatttggtctgagctgttctttttttgtttttcctaatgtgtctttgtattttagtatttttttttttgggatttttttttgggaatagcttcaaattttattatatcttctatacacgtaacacctgctattaatggataaatgggcccagttggaccaagcccagtccatatccattaacttctttcatatttatagtaaatttaatttattttggagtgaaattaatacatgcaggatggagggtagttgatagtcgtaaataatgttaatttacattttataattatattattttaaaaactagaaaaaattaaaatatcacatgtagaagaagattattttataattaaacaatataaatttttgtattggcagccgattagcttgtcacgtgaatatgggacgcgactatttggatgagagaaaaaagaaaaagatgccatccgaatatattctcattatgactttttctttttgatggaagacaaaattaggttagctaagcctac

SEQ ID NO: 188169 - DNA, 1554 bp, Cannabis indica
aatgtaccaaacgaagtaaacgaaaataaacaaaaaaatcttgctaattttgagtaatttagtaaacgaagtgtcgttcatttcatctttaataattaattaaacaatgtgtcgtttatttcaatataaatgctaattaggtttatttatttaggaattttttgacacaatagatataaaggttacttttttagtaatgtatgttagtaactacgtgtcgttttggtgaaatctctacacacttacaaaagggttcgactaaatataaaataaataaattaaaagaaaaacaataaatgctagtgcagcagacaaatatttttggaagcatgaacattcaggattttataaagagtacatataaatatttgcaactgctcaaaggaagttggagtgctgctatggaagatgaagtgtggaaaagattgtgaaaaatcaaagttcttgccaaagtactacactttatgtggaaagcccttacaagttgcttgcccacaaggttgcaacttcagtccaagcatgtcctagttccggtgtcgtgtgtcttctgccaaacacacgaagaatcaatttaccatgttctggttgattgctggtttgctcaaagctgttgggttcggtctggtgtgacctctgcagctgctgttggcagtgattttaagctctagtttgagagtcttcttcataaagggcggttgggtctttttgaggaaagcttaatgattgcatggtctctttgagaagcccgaaatgagctgttatggaaaggtagagtgcgtactgctgctgctaaagttgccactagtgctcgttctgtcctgatcaatggagttatgctcaatctcatcgatctgagcgcttgttgtcacctgttgcaaaacacaacaaggaggagcagcggtctaaaccagaaatcaataaaatcaatgtaaacgtgaatggtgcaatttttcaaagtgatggtacatatggcattggggtggtggctcgaggctctgatggtcagttgatagaagcacttactgcgctgagatatggcaatgttcaaccggcctttgttgaagctttcaaaattaaagaggctttgagttcgatcaagatgaaaaagtggtctaatgtgattgttgaatctgattcacttgttgcagttcaggctatatcacaagttctttttctatgctttctgtttttggtcttttgatatctaattgtaaacagttgttagactgtctagttaatgtgtctatttcttttgttacgcggtgtgctaataaaatcactcattgtcttgctcgcggttcttattattgatcagattattcctttaatatcagcaatattcttagttctgtacattcctctataatagctaattggctgttatatgttaatgaagaagttcatcttctattcaaaaaaaaaaaaaaattgctaacttgttctactataggagagagtttagtcaaaacaaaactaacattaagtattagaatatatatgatattgtttattctgaaatatcattcttgtagaattttatcctataattttatt

SEQ ID NO: 188170 - DNA, 1976 bp, Cannabis indica
ctatttgatctctggtatgtaattttgtgttttaattactctttagacttgttggtttctttaatttcttattcttttttttttttttaatttaattcttatttatttactggtaagctacatttgagcataaaccaaaaaaaaagaagccaaaatggatccatgatcattaataataaaagaaccaaaaaaaaaaatggtattggtgacaacttttgcactttgattttcataaagataaaattttaatgcaggtacatcactttaaaataggttccatatcacaaacacttattttaatacttttattttgtaatcattggagatgctctaagttatggtaagatattttttaaaaaaaatacttataaaaagtgatttttatgtgtttgaaaaaaaatgattataatgataagaagaaattcattagtgatgaatcaaaattaacataggagttgttgaaaaaaaaaagattaatgtaggaggttttattaaaatcgagattacaactatattaattggtaatgcattaaaattagaatgatatatgcacacaaatatgaaatgaatttatagaagcttagcaatagcagaaaaaactttagagagaaagaaatagagttgagagaagagtagccaaagaaaagcttaactaaccggttagctatatcactttatttatactaatcataaatacaagaaattttaaaacaaaaaataatttttgtaactaactagctaactaccatgaactaacaaaataaaccattagttttatttgtttcatctcccctcaaacaaaatgacaaggttaccatatgaaatttgcctttgaggtagttaaaacaattagtagtgagtggttttgtaagtgcatcaacaccttggtcaatagaaggtacataatacattgaaagttgtttggcaagaattcgacctcgaacaaagtggagattaatttcaatgtttttgcacctagcatggaacataagattagcagctaaggccgtgacactttgattgtcaacccacaaaataagaggttagaaaagagagacttatagcttagaaaagagaaaagtaatccatttgatttcaattgctgtatttaccaatactcgaaactcactttatgttcttaatctataacaacaacttgttgctttttggctgaccaagacaccaaattattacccaaaaatataacaccctcatgttgatcttctatcatcaacacaacgtgctcaatttgcattactataatcatgaaaagtcaaattatcataaacctacaaatttagtccatcaaaaaaggtacatttgagataccttagtaatctcttacaagtttccaatgtttagttgatggagcatgaacaaactggctcaacttgttgatgatgaaagttacattaggtcatgtcaaattcaaatactactgagcacccgatgtatttttatagaaagcaatatcttcaaagggttcaccatttataagactcagtttagaggtggaccttgtaggattgggataagagttggctccctccatatgaagtttggttaaagatcagtaatgtatatacttcgacttaaatacaatcctgtttcatccctataaattatcacactagtaaaccgaacccaaattttcaaagagaatgcctaattcaaatcagagataagagaactgattaaggttgaattcaaccatgttatacaaatatcatccacataatcaaaaggtaaacaagataattacgatagtcgtaaatgaacaaagaggtatcagatttggatacttgaaaaccccattgaaacaaggttgtttgagtttctcattccaggcccttggtgcatgtttgagtccatacaaagtcttgtgtaatagacaaacatgattaggtttttcgttcatcaatgaacccttgaggttgcttcatatacactatttcttgaagagtaccattaagaaa

SEQ ID NO: 188171 - DNA, 845 bp, Cannabis indica
agcaaaacaaatattcttctgattctatacaggtgcaatctaagacaagttatggcagaagcagataggatgttaaggcccgaagggaagctgatagtacgagataatgttgaaaccataaacgaggttgaaagtatggccaagtctctaaaatgggatgtccgcttcattttttcaaatgacaaggaaggtttactctgcgttcagaaatcattctggcgtcccactcagacaaaggcgatttcatcagccattgtctgatagtttattttgagacccttccattttaagggtaagccatgtaaaatagctatatctgtaaaatatagctaacgagttacctaaattccattacaagggtaagggtgcttttgtttggctagttatttcggagaatctagtacaggagaagagaattatgaacgaaggggagctttcttcctttttcataccactctttgcatcttggttataagataaaatgatcccacttgttatactgagtcttagaatcacattttccaccacatgcttcattttacaattgagtaggtctattggcacatttatctttttcattttctcccccacaatcctttctaataaattaattgttttcaaatatattttttttacagcattatgtatattgacataaatattgttatataattttatttatttatttgaagatatattaattggcaaatttaggtcgattcaataaaatgcataaaaaaagaatttctttacaaaactaatttaaatgaccaacagaatcatatcaagttgtttataatgttcagcataaaaaaaattatgctgttgcaaaaaaaaaaaaaaaa

SEQ ID NO: 188172 - DNA, 1955 bp, Cannabis indica
agatagtcttctcggaggcgatctatccgactacttagaaattagaatggctttggtactcaattttttatttgcttgaaacacaaccatgaaccaataatttggagtcaactataaagacctagtttcttattagttggcaagaaagaagatttcaattttcagttaataatagtgcaaatgacaagattactatcttccttgatgcaacgtcagattggtaactgaattttctattttagagaagtcaaagttggggggtcattgtttgcattgcagttttatatactaatggaaacttttcttttccttttttttattacagctcatagttgcagcagggatgggtcctattcttgctataaagttcttccggtatacgtacagaccaagtaaaatcaatacgcttcagcaagctgaacgtttgggtggacctattctgtcactgggcaacatcattgagccccaagcaagatcagtagagaaagatgttgctcctttgtccataactcaacccaagaacagaaatccagtttacgaacccctattatcagattcaccaaatgccactcgaagatctttcggaaccgttccgccttttgatttttttcagtcacagtccagattgtcctcatccaactactcaagaaattgcaaggacaactgagctacacacgaacagataataggtagcactgtatttaacaacaatacattacatagatttattgaagttcctattaaaggaactcttcagaattaataattccttttcttggtcttgctaaaaaataaattattcataattatatgctatcatatgaagaagaatttacttgcaagagagtttttgggttaattgaggtgagttttctttttgaagtttattgaggttgattgtcacctataaaggtagctcttatagtcctctccggaagctcattaaatctttgtactattatatagctctaacgcctagcaaggtaggtttcacgtagggcgtgtttggtaagattatacaattttgatccgattggaaaagagctagtctatctttgtactaaaagtggtaatggcattaaatagatgagtttttcttgagtgacatggagtaatttttaggtgaatataaattagtcaaacatggttatagtaaaaagaaagaaaggggagcactgtggtcttcggctgtcttccatttttttctgtcatattctggagacccaagctgaagagagacaaaagagagaaggagcaacgcagacctaacgatgagtaaggaaactatttaaatttaaagttgttggttggtgtttgtactatacatgcttgaatttaatactggacccaaatgtttgccaataattttgcagtctcacttccacttatacctaaaatcaaactaaaatagattttgcttctctgagaagccatctttctatcaatcaatgaaaaaaaaaaaagtagaattgcattacagttgggaattgcttttatgaaccacccatttattttcctttttctcctgcccccttgagatggaatctgtactaggttagtttgtggggactacataattaatgcagaatgtggaataatacttgagtcggtcactcgcacacgatgctaacacgttatggttatgtatcataggtgggctatgcatacagtggtaaacatattttatattatggtcatctatcaatcaaggcgagcttcacataagtttcaccataaagtaccccataataatggtcatctatctaaccataacaccttttctttcaccacatctttttggttcaatgaattaatgccattttattggaagttgctagcccttatggcggaatggatggtataaaagttgttgcatctgcatacattgtagagttgaaataagatcaaacagatcatttttcatgacataccttacacttatacccatgaaaatt

SEQ ID NO: 188173 - DNA, 2096 bp, Cannabis indica
aaccaaaggcaacttcgtactctacaacctccgatgcggtgctagtgataactaacgaaggtcaaaactgtaactggaaacccaatcaatcatcccttcaagattctaactttgcacgcaaaacagggaacaatggcgatggagcaggaaatcattggtgggtctgagaatgagagtctggatctgcttccatcggctctactggccaccatcttcaccaagcttgatgtctcctccatctgctcctgcgccaccacttgcaagaccttcaattcctgcatttctcacatcctttctttcctacccacttttcaccttctcgtatgtctatctcgatctcaaatacatatctttatcctctcaatccgttcaaaatcattacggatttcatttctcgagtattgaaaaaaaataattgtccaatcactgtttttgtcttttgaatttaggatgttgcgccttcgcttgatttgctgagacctctaatgccgccgaacccgtgcgtgaggagcctgaaggttgattgcaatcgtcttgatgattcggcgatccagactttggtgagaccttctttgcaggagctttctctgattaattgcgctgattttagtgggaaattgctttctgagattggaaccatgtgcaaagacctaaggttagctactccctgctaccaaattcatcacacttgtatggttgttcgagtatgtgtaatgattgtccgtggaagtttttcattttagtattgagttcgtctaaagtatgaattttttggtttcatttcctatttcatataatgggtctccattactcccctccagatctctcttcttggggtccgtggctgaaaaacgaggacgggctatacatatttctgatttggaagagttactcggtggttgccctcaattagaagtaaggaaataacaataataataagccaaaacaatgcaataaagattagtaagatggattgagaaagtggttgtcagttattttggcgcttggttggtcttgcattaacggttataccatcttatggctttaagaaaccggcttatgggttgatattaatatcagttttaacacttcgagtccagggatttaggcaggtttaccatctaatactgccttttttgacccaattcttaaatgtatatattgctaaaaggtctctactgcctttgatatgaaaatgatcatgtttcaacttcattcatatttaaaattatactttgtttaagtctctttctcatcttagctattcttgtgtaatgtatcttttagctttctatattatgaatttataatctatttgttttattgctcttagtttatcacctcacatttgttgtgtttactattttggtagggacttgtcctcatgtttgatgtgtcattgtttcttcgtcataactttgctcgagtatgggctttggcttcagaaaaactcgtctctcttgagattggctacatttcatctgtaatgatgactgaactacttagcccaaatcaatcaccaaataatattcaaccttcgatcttgccaaacattcaaaaattgtgtctttcagtggactatattactgatacaatggttgctacaatttctaaaggtctcatctccttatcccatttggaccttcgagatgcaccaattattgagccaagccttacaattgaccttacaaacaatggccttcaacaaattaatcagcgcggaaaactgaaatatctctctttgatccggagccaggagttcatccctacctatttcaggagagtaaatgatcttggactcctcttaatggctgataagtgtgcggatatggaaagcatatgtctcggaggcttttgtcgggttactgacacaggtttcaaaacaatatttcatgcctgctccaagctatataagcttaaggtgtcccatgggactcagttaactgatttaatatttcatgatatttctgctacttcactttccttgttgcatgttagcttgagatggtgtagtcttttaactaaccaagcagttgccagtttggcatctaataagaatcttaaaattcttgacttgagatgctgcagaaaccttg

SEQ ID NO: 188174 - DNA, 2375 bp, Cannabis indica
  modified_base (2178)..(2178): a, c, t, g, unknown or other
ttcagttccattctcttctgcagataagtggagagtgaatgattcagcatcaatgttttttctctgcctaaaatctgtctcttgcgatattgcaattgcattcacagtattgagtctggggtcttcattatcttccctgacagagagtttcttgatctttgtgaggaagagaagaacttggggatgaattgtagacagttggtgcttcactggtttgactttgtcaggcttcaatggcaggatgagaattgtggttggaagaccagaaccagaagtgccatatatctgctggagttcagggagagtgggattctcatcaacccattcaggaacaatgtagccaacattgcagtgctcgcaaggttcttcattgaaacgaatctggtatccattactgaatatgtacggccttgcagtgatcaagaacacacttttgaatccaatacctgaaaaaagatagacaacaatgtaaataaacaggaaatttgtcaaacaaataacatgaaattatgatatttacaaaatgattacattataaactatgtaacaaaattataatttttgatccatcctgcaaccaacctaaattactatgctaataattttttttataaagactatttcgcatcaaaaagttttccttcactcttaattaatttttttactagcttcaaacttttttcacgatttataacactttgttagatttgttaaacataacccaccagaaaagaaataaacagaaaatgatagttaaacatgaaaaacattaaactcatcacaatgaaaacaatgtgaattctcatgctaaattacttttgtttttgtcttataaactgaattctcattactaattaataaactctattttttttcaataacattaaaaaagagacagatagagaaagacaattgaaaaaaaaaaaattgattctgactcataaggaagaaaacaaatagctataatattcaaaatccttaactgtcaaaagtaaataaataatgattatggaaattcattccaacttatctatacgacatcaactgaggaacgacattaatccctaacgaacgacaacaataaaagaaaacgacaagcattggatattacaaaaaatccagaaaacgacactatttgtataagcaacgatattaggaaaaacgacaactcttcaaggaaaatacaatcttccagagaaaacgacacgattgaaacgacagtaaatttggaaaaaactttaaaaataatttcacctattttttcctctttctttttctttttttaactaaactttttcctctcttttaagcattttcagatgaagaacatttatatttttggtataaacaataaaattaaatcaacaacgatacatcttacatacataataaattaagcacaaacattaatgaaaaaggcaaaaagcatactaataatttatcaaaacaaaaaagagagaatacatttcatattatatatagtgatataataacatatatgggtacctttttccccaatgtagccacgctttctgttccctttcttagttgaacgacccacactgcaaatcgattcaatgtttttacaagaaaaccctcgctcgttgttgcatatcagcagagttgccggagctccagtcgccgtaatgtccttagacgtgattatgaactctaacgaaggatccactccctcgacgtactcattatcttcagcgttctacaaaacaacatttcattttcccgagaaaatcaaacgatcaattgatcctgtacagaaagaaaattgtaaagtatatagacatgattaagttttcattacctgtataagctccataaggaaatggacgtcttggcgtaaagttcagcagagaggttcttaacgcttgatgaagatcctcagtgagtggattaaggttgcctccaatggagaatttggtcctcctgatctcctcgatgtgctgtttcgccttctccatcgccatgttcggtacgatcaaaactcaaaaatcttcacagagagagaaagagaaagactaaaacagagtagagacttaagactgagctcttgactgacttagcgtgacttattagttatttatatataagaaatgaaaaaaaaaaatatatattaaaaataataactccttgtatgagaagttttgatattttttttttttnttttttttatgggtagaaaagagctttaggtaaaagttatttgattaggaaaagacaaaaaccttaggaacgaaggaaactaataaataaagactaaatttttattgttttaattttagggtaaattacttatatactattgggtgtctttacaatgcactctattaaaataggtgtaccgatacaatctctaaatg

SEQ ID NO: 188175 - DNA, 684 bp, Cannabis indica
tgtattcagattgtttaaatctggtgcatgttgtggtgaaagggaaatccccaaagtggaggcttgcgttggagttttatggtgttattgactttgactttagtctttgccttggattgaagttctttgtaacgttgtaaagtttgtttaactctttgcgtagttttataatgttcttcaccaacaatatgaggttggagcctagttgacgtcgaatctaaaagatctaccgctggatagatgtctttggcggccaatctttttgatagtacgatagtcgcattgttcacccatgtcttggctaaatggagtctatagggatgactgcaatgaatatttaagataaaattatatgcacttattacaaaaaaaaaaaaaataataataaacaaagatatttttatatagaatttcaagtttaatccttaatcaaattttccgtaaaccaataaacccaaatcaaattcagaatcagattaggatgggattagaacaaattttaatcttcttgggcatgtttttcgaaaattcagacctagcagtcccaagtcaattgggttcatcaagttttgagatttatcgagcataatattcgcccctacatcatattatttaagagaagacactatatgtaatgttttgataatttgatttaaatataatcatccatcatataattatgat

SEQ ID NO: 188176 - DNA, 1608 bp, Cannabis indica
ctttgatgcagttgttgtggaggctgatggctcatccgggggtctgtgtttatgttagaaagctgggcttgaattggacgttctaagtatggattcgtcgatgatcagggtcaaggtgaccaatattctgcatggtaaggcttggtttggggtctttgtgtacgctcccccatcccgtggggatcgcaaagagttttgggagcatttggcgctcgaggtggcagcctttcaaactccttggattcttttgggcgacttaaattgtatctctggccagtttgataagtatgggggtcgctctgtctgtccccaggagactcgattgttaacggagttcatggagatcactaggggttgatctaggatgtgtgagcaacttctttacgtggtctaacaagaggagtaatctggatttaatcaaggaacgactcgatagagctattgtggatccgaattggattttgatgtatcctaaagcgggtgttaaggctctcactatcaaggattccgatcatgctcctctagttttggattttcttttggaacaggaccggtacaataagccttttaggtttttggatgcctggatccgtgacccggagtgctttgaggtggtcaaagatgcttggaagttggtggtgtctggggccaaaagtttacagttgctatctagatctcgaatacaaggaaacgcctctctatatggaataaacaacactttgggttctgcgaagagaagcttcgacttctggacaagtttctacttgaagttcagtctagaactccttccctgagaatgctcaacttgaggctgatattcttttggagatggatgagatttcggaacgtcaggagacgatttggagacaaaaatcccgtgagatatggcttcaagagggtgattgtaattctaagtttttccatgcctctaccgtcatccgtagaaagcgaaatttcattgattcgattttggaggatgggtctcggtggatctcgggccgaagtaatgttggtaactatttccttagtaagttcaaggaaacttttcatgcttctcaagtttccttaggagattgtatcaaagagcttgtcaatcctctaatctctgaggagtgtaatgaggagttggttaggatttcggatgctaaggagattaggaaggtggtttggtctctgggtcaattgaaatcgcctgggccagatggaatgccaggtcgtttttatcgagcacattggaacattgttgggatggatgtggtggatactgtcaaggaattcttcctgacgggtgagttccataaggatcttaataaaactttcaatgttctaattctgaaaaatttgagagcctccaagtttgatgacttccgccctatttccttatgtaattttgtgtataaggtcattgctagattttggccaatcgccttcggccaaatttggctgggattatatctccgttccaatcggcgtttggtcctaatcgttaaattgctgaaaatggcattcttgctcatgaagtaatggattctttcaaaaagaaaaaagggggttgtggctttgtgggtctcaagctcgacatgtctaaggcttatgatcgccttgaat

SEQ ID NO: 188177 - DNA, 2630 bp, Cannabis indica
tctttcttccttacgattttctcggagcaaaatttagagtgtaatagagcgatatagttcggtgcagaacatatcgtacgtatacaaatgttgttttatcctggggacgtcgtggttgctagactgccgtgcacacttcgggcagagccgcgaaacgtcttaaagaaagcgacattgttcgcgacttagccagaattttctaagggtatttcgttccaattttattgtttttaatttcggattaacaaaatgtattaggctctactaacttccaataacaatcgatattacatgattagaaagttgggtattattaattgtaactcattatgaggaatactaaaaggtacgagtggtgtatagtatgctcttcgagtctcatataatttaatgaaattatttttagggagtattcctaactaattacggggtgccatttagaatatattaggcaccactagtgtccaataataatagatattatatgattagaaggtatattattaattgtaactcgttatgaggaatactaaaaggtacgaatggtgtttggtatgctctttgatgtcactgtaaatataattaagtattaagtcacagactcacatataatttaagataataacttttagaaaatattgtcaattagtcgtaagaacactcacaacaacttctctaaaataaaaaaacttcaaaaaatttaaagaattgtactaagaacgcgttacaacaaatgctttaaactctttcttcaatttaaagttttttttaaaatttattatttatgttctatatttatagaatactattgctctaaatatattttacaaattattttggattttaataataagttttgtatagagatgtgtatatatattaatatatattatgtatttttaaaatgaataaaatataataatttttttttaaaaaaaaaataggaggtttgataatgtatttaaataaagtgatgtatggtacaatataaaattgtgctataaaataaaaaagtaaaattttagttttatattttaaaagattaaatagagaaactattagaaatactttaaagtgttatctttaagtagtgccaaatttcattagtgtttaatattaaagctctttatttattgatgggatgtggggtttgttgagctttgtttttgtttttttggtaaaattaattaatttatttgaggttgaatttataatgatgtagtagactagtctaggcttggtattaataaatgacattaatttcattaaatgatcacccgttactatcagagtttcggggtcagaatttttctaaaaagagagaaagacattaaaaacagtgtcccttgctttgtaaattgtgtagcatgtggccacaaaaacaaaatcactacactttatttattgtattcagattgagaaagaactgtaattaatattattaaaattataagaaaaatggtaagggattggcaagcattcatcataaaatatgaaatattattatttatgtaatttaatattaaattttatttaaataaataatgtagacagtactagaaaaatagtgtatattttccatctttaatttacaagaaaaataaaataaaatccaaagacaaaagtataaagaaaaaagaaagaataaaattataaacttatatctccgtattatttttgaaataaccatagatatgaataattatttcaaaataaccgaagacataagcctctactatctttatctcatatattcggttatttaacggcctaatctcatatcagatacacatgaagatttatgtctttgagatctcaaactctcatttattctttcttcttcatctttctctcaacgaaaaagcaccgccaccattgctcttaaagctttattttctccatgcatgaagcatcatttttttcttttctttttttaattttcaaatcttctagtttcctcacctaaaaacacatatacactacaaaaataatttattttaggatatgagagtagatgtaagagtttaggccgacaaaattttagaatttttggagaagggcagccggctaatggctataattttgagggtttcgatgttgccttttggcttgcattgaggtgtgcatcacgttaatatatgtattttactttacatggcattttgtgtgtgtgtgtatttttttatatttttaagcgtgtgtgatatgtggttggatacctgtggtggtggtcggaaaattcacagtggtgttagaaaattaatggcggtactcaaaaatttagtggtgatgatcgaaaatcaagtaaacatttctaacttttaattttaatccgaaaataatgttgtttatggatttattattgaaaacctattaatattttgtatataagtgcaagattaagtgggttcatagttagaaaataattgtttgatttaggatcgattttggggatcgacgacatcagtgttaaacaatgactacaatttaggataaaaatatcatgttttttaagaaaataaacacctatgttttcggtatattctggacctatgtatttgcctcaattgtcttcagtatcaagtatttatttaaccgaaaataaacacgcttaaaaactgaagataagc

SEQ ID NO: 188178 - DNA, 4652 bp, Cannabis indica
aaaacctaatgtttatctacttatctaacataatattcaaaattttactacaaataaaatcccactagaagacaaaagtaacttagggcaaaaagaccataatgcccttgcccacaataaaagtcataaaatcacttaggggtactttggtcattctaaaatcttgactattctcaacattcccaatgtctaactatattgccccgctatactaaaaatactaagatatgattctaatagccaaataccgtgttctaatgttaccgggcacaaaacatggaaaaatataaaattctatacatgacatataaaatgcattctgaattcaaataaatttccataaaatgataattcttaactaatatgcaagtttcataattaaactctatttatctgctaatttctaaattaaagttaaacggtctttacaaatggcatgtttggattttgtgtatgtttcttgctatttttgcctaaaaactgttattggatgttgttataggtgttctgaaaagttcggcttggtttggacacgttttgagcaggattcaaactttttggggaaaactggtgcaaaccggttaactggatctggggcaggcttcccgaatcgtttgatttgtcgatttatgtcattttcagtgccttagttggttaattccttgatacttaaggtatttttataatagttaccagtagcaaaacccttcgttgggggttttgagtttcccgaattagggttttagcgtgttgtttacccgtttatgtaatgtgactagggcatccatctagcacgaggttttctgttcaggtcaccaactcacttgaatttggaagcgagataataatagcatagaatgtgttatatatgtgattatgtgtatgtgttatatatgcatgctttttatgattcgtacactaccaacactagtacagtagcaatactgagtgcattggtaccgtgtatgatgtgtaaagagtacagtataggattaccaacactagtacgggcaggtgcgaggtgtatatggtataattagtggtactcaaggtacaggacaaatcctaccaacactcgtacagtagtggcctgtagtgcatgtggtatagtggtcgtaccttagtaaaaaatgttcttacttatctgataagcctgatggataggtttatgggcgtctgtatacaattcattaatatattatttgttatatgcttttcttactgagtctgttgactcacagttgctactttcatgtgtagataaaggaaaggtgaaggctgaataaaagtgagcttcgagcttagatagtgattgaacatgtcgatctggcgcgacctggagtgttcggtttcaagacatcttggacagtattttgtagtctctgtgcgacatgatatacaagtattttagaaacatttgtaaaagtttaacttgggatcccaactatgtaaatatatacatataagtttataaagtttaataattttaatcaaagttttaatttaacacgatttttgaagaaaacccttgattagcaaggtagtatgttaattggaaaatcattgtagcgcgcctaagtatcaaggcattacaatacctgcccctgagccacagtcatttgaggaaccattcaaaaataacttccaaacatcttgatcatgaggtttactcatgtcttcatcggtatctataccttcaattaaaaaatctaataactatcctttgatggttgctcgcaggtggtaagttatatcaaactgccctaatttgattgaccacttaatgagtcatcctgaggcatcaggttttgacaagactttccttaagggatgattaggcaacacatgaatacttgaaaatatgatcttaattttcttgagacatgaatgggacttaatgcgagtttttcaagaggtggatatcttatattagtaattgggcctttccctcttctcgcactagttctacatttaagacatgctctaagattataaatacaaatatagaacctctccacttactggttttaaaagtattagtagtgtggacaaatgttcctttgtcctttgaaatactctcttacattctttcgtgtactcaaatcgtttatttcctcagaatatattgaagaatggtaaacatttatcagttgacttcgagataatctgttcaatgctgccattttcccaattaagaactgaacttcctttcgcttcttaggagaatgcatatcgagtaaagcccttattttttctagattggctttgattccctttgcatttactatgaaaccaagaaactttccagaagaaaccataaaggagcatttattcaggtttaatttcatgttatacttccttaagattgaaaaacattatgcaaggtcaatcatgtgatccatacttttgatcgattttacaaacatattgtccacatatacctccatgttttaacctatttgatgctcaaacatgtcgtttacgagacgttgatatgtggctcttccattttttaaaccaaaaggtataaccttgtaacaacataatctcatgtttgttatgaagcttgtatgttcttgatcatcaacgttcatccttatttggttatatcaagagtaagcattcataaaggacatgagctcgtgcccagcagtggcatcaacgagctgatcaattctaggtaatgggaagcaatcctttgggcatgctttattcaggtcggagaagtcaatgcaagttctccaggtcccgttcagttttggcaccagtactggatttgatacccactatgggtagaatgcttctcatatgaaatcattggttaatagtttgtcaacctcttctttctgtgcattttgcctctcagagtcgagaaactatcttctttattactttggaggatagtgagggtcgatgttgaggtgatggcttatgacatttgggtcaatcccaaccatgtctgaatggctccaggcaaattgatcctagtctgcaattaggaagtgtattagttgctattttaattcttcctctaacccttttcttattttgacaacttttgtagggtcactagggtcgagtaatacctcttccaattcctacatcagcccaagctgagatttttctacacccattctcaggtccagaccctcctcttctttctcaatttctttgattattacatccattatttgacgagacttagtaatttccctcaattctatattgtagcactctcgtgttaacaactagtcgcccttgaaagttcctaccccattcaaagttgggaattttaatgacaagtattttattgagttaactgcccccaatcctgtcagtgcggggtaacccattatcaaattatagaccaagggaaggtcaaccacaaagaacttttgcattagagtcgccgacaagggtgagtctcccattgttaggggaagctcgactattcccaaacttgcaatgctatctcctgtgaatctgcataaattaaccatgcatgtttttaaagttattccttttaatccccttttctttaagatttctttatacagaatgttgactaagtttccattatccaataaaactcgcttcactctcttatttgcgagctaaatagttattactagtggatctgcgtgggaaaaccttacaggcatgcgtctttattagtgaaagttattagaggctccccagtcttagttctttttgccaattttggtgcaaaagctaaagtttggtttttaacttggtttatgtatcatttttgtgcagtgttacttgttcctgcaaagtgaggccccctagaattcaccaagatgtcctcgtcttttatgggtggttactggacattctggtttgattttggttatgaggttgagtttgctcaatcctctattcttcacatattgtcaaaagtaacctctggagattagactctcaatctcttctttcagttgtcgacactcctcagtgatgtgacttatgtccttgtgaaagtgacaatatttaatctgatcccacttattccttacattcctcataggtttaggtttgcgaaacacgactgataactttatggtatagagttatttttatgcttttaaactaaaagtattgtgagaagagtagtgaaaatgtgtttttttgcttaattttagttagttttagtgtcattttctatttagtaagctaaccttttttttttttgaacaagaaaggatctttattcaaactagcaaagttttacacagaaccacaaccagctacaaaaccagcaagaagctatacagcattaccaactttctattacattaattatgtgattgtctagagcccccttctctctaatgttgcaacttacaactctttgtttaactacctctttgatttccctgcttaaagacccagcagctttgcatttgaactcgaatatgcacccattgcggttcttccaaactgaatacagtgtagctaacacaacagcattcagaattatgtccctcaagttgttcgaaggcctggacaaccataagttgatgttgttcggccaacaaaagacaccacaccaggacataacttcctatattactctctgcgtgtagcagcaagtagtaaaatacatggctgtgagtttccatcacagtaca

SEQ ID NO: 188179 - DNA, 2545 bp, Cannabis indica
tttaataaaataattttaaaaaagatagtaagtaataacaagacgacacatgtagtggtgctgtataaaaatatcatggtagtatcgattggtcactatcgttgataaagtcaaattctagaatatcgcttatctcttactacgactcttgtttttgttctatctagaaatagaaatataaataaatgatgggtcacttaagtcatggaccaaaatcgaatttaacgcctaattttacattaaaaaaccttgcagttaattcaactatttgtgagtaggagttttccataggctatttctttcgaaaatggacccacttgactcaacatctttctccaattatgagtgtcactctcatactaattaatgattttaataaaagcattatgttttaaactttgtacttaagctaagaaacttggaatgtttatgaactgaaatgaaagcgtataattgttgtaattattattattattatttgagagaaaaaaaaaaaagaatagtagtttaactaaaagagaatattcattttctaaatcatttatagaaatataccttaatatttaaatggtaagagtataacgaattttaattaataacattgtatgcctataccgagattttttttttttttaaccaccgagtgactctctttttcttctattttttttgttcaaaccctcttaattgtttactaacactattttttttttttttgtaaagaacctcagttcgaaagaataataccaaaaggaagtgggattcacagggggcaatccctcccctttaaagttctgccagccatcttgggaaatacgagtggacttagccaaaacatcaacataagagagacattctcttttagcaaaaacaacattacagcaggaaaaagaagaaagtaaatgcagaattaaagagaaggaggcagtgagcttccaatctggagaatgcctcgtgcagatgccatccaccagagatttggaatccgtcacaaaagacacattgttccactgattctcagccgcccattgcagacccaacaacaaagcctgcgtctcagcttcaagagccaaattgcaagaaccactggaggtgcacttccaccagtccatggagtctttggagagacctaacatggcacacccaaatttcccatcctggaaagagccgtccactaagatgcagcagtcagtggtgagtcgagggaaaagagcaggggcatttagctctaaagtcctctgcacaaagtcagaatccgatatcatttcagaaaacttgttggagatgtctctcctgacagcatcaatactgggttggacagcctcattgtggacgatagtgttcctggtcttccaaatacagtccatcagaacaccgaagaggattaacaacttgattctcgaagatggatccgaagaggaatacaggttgctgacaagagcagcaatattgtctccagctaccaactcaattctcacagccaaagggctagtaaaccaaagagccgaagcaaaattacatcgggcaaacaagtggactggtgtttcaatagccgagtgacagatggggcactccctacaggatccctgcttatctccagtgggaagaacattcatacaagctctccataacatcatacttagtctaggatggactttcgagtcccatatccacttacacaaaggttcttgagcacgaaatctagccttttgatccaaccaataggcccctttgacactaaattttccagcagtggaatccttctagatgagagaatcataagctgagttcttgtcaatctgaatctcagcgatctctttacccatgttgtcaccaaacaagatgcacagatagccagaattccaacttctgtttctgcggtataacaagtcagccacacttctaagacttggagctttatgtcgtacggactccatcaattcacgaaattgatcatactcaagccagggaatccaaggttgccacactatttgacttgcttttttatttgctttttattttttgcatagtgaaataacatttacacgtccctctcattttcttaattttaatttaattttattttttcaaaaccttataaagtttttctgacttcattagtaattgtttgagttcaaaaattatactaattgtaatctacttttaaagataattattttgatatgcaaaaaatatattttttcgccttcaccaatgaagatgaccgaaataaaaataactttgttagtttctttttcttttcctatttaattaatcaaattttaaaactaacaagagtaaatattccaattaattttaataggttactaaaatatattttgttattcatatttaaaaaaaatcatatagtattctaaatagctgaaaaagtacttcagggcaatcatatataacattttaattttttttttttttaaaaaaaaaataagtaatcaaactttcacatcaaaaaatttaatatataccaattttaacgtaaaatgtttgaaattaaaaataactttatagtttattttataatttg

SEQ ID NO: 188180 - DNA, 1060 bp, Cannabis indica
cattcaaaacaaaactcaggtaatctctcatacctataatcaacccaaaattcatccttaattctgggaattttaatcatttggccacgcagtagaggtttagttacacacaatcgaacacgaacacgaagaaacggaccccatccttcatttgtagagtctttataaacttcaagaaacgtaccaattgtgttaccaagagcttcagcaagtgtagatgatttactgagaaaaggaagtctatatatttggactcaaaaagaagtaaaaaccatatcctcctttgagacattttggtgaacatctggcgcaatgaacacaatgaggtgattctgaaaatgccacggttctttttcaagcacccgtctcatatcaccctcacagccaaaggtgatatgaaaaatgtcagaagtatgatcacggatcacaacagtgtaccggtctttccaatggccaaacatttgatctataaaatggggcttaaagatagtccttgtggaaactacacgggctaggagcacatgttctgggcgatcaacaagggacggtgggttgagatcatgcagattgatgacagaactctccttctcagtgagcgagagtgttgaattcatggaatgagcaagaggatccatcagaactaacaggcagagagagggcaaaacagggcagtttcaagcatggaatgaaggcgggagcagttgaaagagggataatacaaatgagaaaagagcaggaacagataaaattcaaaaaactaacataacggacacagacccaaaaccgggcacccatcaatacgacaccttagtggtcaagctaaacctatatgattctaaattttttgtctattttagaatttataaaatatttttcttttaaattaaatttataaattattgaatgataattttttttttaataaaatgcataattttaatttttcgcttaacgcccccaaacagcttggatcggtcgtagtggtatcattttattattattattgttctttggacttatatatatgtatgtggaagaggttgtaatggttacatttttt

SEQ ID NO: 188181 - DNA, 1788 bp, Cannabis indica
ttgaacttattccaccaaaacgcttagtactatggggaccaagctattcattatggagggcaagggcaaaggaatatagacgaaacacaacaaatatacccttgagcgaacttactctaggataggacaacagaacaaaaaaaaatgccattgcccaattccactcacttttttgagttaatcgacgatgaagaagaaacccgagtatagtcctgaaattgaaaacttttttgcattatgtggctgtgcctgtgtgcacaagaaaaataacatgtgcattgcattttgaatttcacagtatgtctaacagtatttcctaaattgaattctcaaaaaaccattaaaagaatttgataaaaacccccattaaagaaaaggtatggcatctcaacaaaaatttctgtagcattgacagaagaaagagtggcttttttacattatgatgttctatattctctgcttaatctgagggttttgataatatgttggataatcctgagaaaatgtgtcctctctggtacggtaacctgttaaccgacatatctttgtggatgagaagttcagaaggtcgacttacatgatgtgtaatccccagaactgcctgtttctctttgaaagctgcccaagtgacgatgtaaagaccagcaatgatcagaatcccacctaatacgctgtgtccacatattataaacaccaagttagattcaattttattaaaaaaaaaatgcctgctttttgtaccttggaatctaagtaaacaaattttagttttctttctctcaaaataatatttcaaatagagtaaagataatatccaattaagctcataaatacaaatcatagtactagtatatttcatgtaatgatttataaaataaggcatcttagatggcagtgtcaattatcaactaacagaataatctagtggataaataatgagagtgagaggaccaaaaccttcccaaatagatagggctcccaaggaaaattcttgacaaaaaggcagaagcagcaggttgaagtggattgtatgtagcaaccaaagcaggccccaagatcttattgcaccatgtcagaagtccataattaagtgcagaagcaatcgtaccctgaaatggagtcacaaagcaattatttcactttgcattttttctgttcctgactaaatgaattcaagaacacaacaaactaataattctaaatattttcatttacagacatatcatctgtagatctgctagcaccaaaacaacatgtgcacatataacaaaacacaaacctcgaagagatttttgtaataattttgcaaaagagagaacatcgtaattcatagacctcactttcctctctcaatcattcattcaagttgaagggaaatattctaaaagagtcagtttaactgcaagttttgttttgttgactatgcttatgcttttcttctattctaaaacataattgatgtgtccctaaatggaaggaggaaagtaaattacaaatgagctcaagatccagataattctgtaaaaacaaaaggaataaaaaagaaacaaaaatgtcgataggaaacttacagcatatattacagctaggacctcagaccgtgttagaacccagtctgttgattcattggtcaaaaagaatgatgtcgacaccatcaacaaagcaccaaagaagtatgaatatgcagtgactgatatgtttgcaggatacttttttaaaagtggagcctggaagttttacagaacaggaagttaagacatcacaatttaaggtctccagattgtacac

SEQ ID NO: 188182 - DNA, 4308 bp, Cannabis indica
tttatttttcttcggaaataggaactttttgcccaactgtcatgtctaatgttaacagttctgcgtacaatggatccaagtgtcgatatgaactttgttcttgctgggccaatgacttgaccgaactcattgaacacatttggtgtgcgtataccctcacttcgggctttaaatacctacacgacatcaatgtcggtcctctaccagcaacataattctttatctcctcatcaccactcgcgttctcatcattatcgaacccctcagcatcatccatttcctcaccaccatcctcgggaaatggattatcattatcatctaaaggatttacatttgtgaaaaagaaaagcaatctgtatgtcatttcacacttcacaaatgataaaagcacaccgatagtttaaaaaaaggcacattagctaagtgggatgataagtaatgtaaggacttatgggaaatcaaatgtagatcttcctattctctttagggagttagttagcatttgagataaattagttgtgcaaatttttagttaacagagatttctgaccttttgactcgttgaggttaacagcttcttcatgaggttctaacataacatttttctgcagatttgaaacttgctcattggtcgtatctcttgtcaaagcttcatcgacccgggtgttatttgaagtttcttttgctttccccttccttgacatgggcgttggagtgtcaaaatattgagtgggcgtcacgccaactcccacacccctaacatgccctctattctctggggtgcctattgccatagtaagcaaatcattagacccttcgggtgtccacttcccctcggtttgcagctgtctgtaatgatcctgttaaacaaacaataaaatgctaatcacatacttagtattgtgaattaacaacaattaaagaagtaatacaatatagacttacaatcttagctttcactgatgccgcctcaacagatagctctcctttcttgttagttcggcctaacatccacaactcggccctatcaatctcagttatttggccatcacattctttcattagttgctcctccttagaaatataacctcccctcgacatgttatgattgtgagaatgcttagctcgtaacacttgcattttctttctcttctcggcccattctgggctcagtctaactttgacaaagttgtcccaatcgatttttcttatcaccgatatatatcctctcggtgggtgtctcagcttgtccggtttagtgtatctatgtttttctatccaacatttagtgaggtttgctttgaagttcttccaatatctgcgacccatctttaaaatctttttcctcgctttaggatctatctcaaaagtctcctgcaattacaagcaatcaattataataaactcataccatgaaacacattacaaacaacacatgttatgataatagactcatacctcaacgattttccatactttatttttctcggaaataggaacctttgcccaactttcatgcttaatgttaatagttctgcgtacaatggatccaagtgtagatacaaactttgttctcgcaggaccgataacttgtccaaactcattgaacactatcaaagtgcgtataccctcacttcgagcgttaaatatctcacgcatcaatgttggacctctaccagctacataattctctacctcctcatcaccgctcatattctcatcattatcgaacccctcagcatcatccatatcctcaggatcatcatctgtatgatttatgtttgtggacaatattgttcccgtgattcctgaagatagcttaacaacttcttcatgaggatctaacttaactttaccagtttctactggatttgaaaattggtcactggtcattgctatggtcaccgcttcatcttcttggaacgaagaagtcacaacagcatcttcctctccagattctataagaatcgagtgactgctgattcggcaagattcacacacccaatctttagagaccttgtttttcacttttcttcgcatgcaataactgtaaaatcgtaaagataattcaataattaaaattagaacaaggaaaggatgtgcggtactcatgctgagagagggcgagagagagtcttacacatgttcgcgagttgtgttgcatacagaacagtttacacgtaaaatttcatcaatgctggttttattcgaagtttctttggctttccccttctttgacatgggtgttggagtgtcgaaaaattggttgggcatcacaccaactcccatacccctaacagcaccgcttttctcatcattagacccttcgagtggccacttcccctctgtttgcagttgtctgtaatgatcctgtaaaacaaataataaatgttaatctcacaagtattgtgaaacaaaggaaataatacaggtcggtcaataaggctgcacatggattagctcggcatgctcttcgagtagatagagaacttgtatagttagatgagattccttttgttggggattcttggtttttaaagttgtatgacattatgatttctttttcaataaaattattcattgctgcaaaaaaaataggaagtaatacaatataggcttacaatgttagctttcacagatgccgcctcaccagacaactctcccttcttgttcgttcgacctaatgtccacaactcagctctatcaatctcggttatttggccatggcattctttcattagttgttccttctttgacatataacctcctctagacatgttatgattataaggaagctttgctcgtaccgcttgcattttctttcttttctcagcccattctgggcttagtcttactttgacaaacttatcccaatcgatttttcttatcaccgatatatatcctctcggtgggtgtctcagcttgcggggatgagtgtgtctatgtttttctatccatctttttgtgaggtttgctttgaaattcctccaatatctaccgcccatctgtaaaatctttttcctcactttcaaatctatctcgaaattctcctgcaattacaaaacaatacattatagtagaatcataacattaagtacattacaattaacacatgttatgataatagacacatacctcaacgatacgccaaaatttatttttctcggccataggaacctttgcccaactgttatgattaatattaacagttctgcgtacaatggctccaagtgtcgatgcaaacttgtttctagctggaccgataacttgtccaaactcattgaacattatcggtgtgcgtatacccttactctgagctttaattaccccatgcatcaacgcagggcctctaccggctacataatcctctatctcctcatcaccactcatattgtcatcatcatcgaacccctcagcatcatccatttcctcatcaccatcctcatgaaatgcatcatcatcatcgtcatcatctaaaattattatatctacgaaaacgaaaaatgtcattttacacttgataaatcaaaacaacatacaacaattttggaaatgccaacagctcgtgaacataaagatgatttttcgttgaattttagaacggaaataaacatcaatagattgtttcagactctatgtagtgaaccaaatgctttcttagtctttgcccacaagcacaggtacatagcaagcgatatacactatactccctcaagaacgattatcaacagaataagcgaaatgggagaataagctgccttcaagataagagctacaacatcgcaattcaagttttgaaataaaatgaaaagtgggatgataagtaatgtaaagacttagctattatgatgttaattttcgtaatgtatgtatccaaacattaggaaatcaaattcagatatttctattatttttcgagttagtatgcattcgagtcaaattagtggcgcaatattaagttaacaaagatttctgacattttgactctttaccattttctacgggcttttgctgtgaatttgaaattttctcattgctcattgctcttctcacagcttcatcttcttggaatgaagatgtcacagcagcatcagtctcccgagatttcatcataatcgagtaactgctggttaggcatgattcacatacccaatctttagggactttctttaactttcttcgcatgcagtaactgaaaacagaacgacacaaagatgcaaagatcatttatttttaaatgtgttactataatcacattcaatgataagagtgatatacttgaacaacatatatgagagagagagagag

SEQ ID NO: 188183 - DNA, 578 bp, Cannabis indica
actataagtaaaaaaaatttgtactgtaacactactttatttagtaaggtaacaattgttttgtaatcaatcacatgtaattaatatgataatatatatccacatatgattactcaatacaatcatgctacacactatctctctcatgcatgcacatgtttttaattactttatatattttctttttaatatcatttgtaagtgtgagcccattctttttgacgaaatcttgtaataaggtgacaccacacaacacaagttacacaatcatgttcttcctctgcttttttctttttcatttttcttttatggctgcatgtgaaagttgttaagcttattttagttcatatcatcagttgaccactttaaagccatctaaaagagttttgattttgagccttcatatgtggtactggtgttagtgttaggtaggtctcacccaattatataaatacatatatagagagaatatagactagtatagtacacaatcttaaagggtgttacaatagacttcttattttgtttggcatttcaaaaaaaaactttttatttttaaaaattttttatagttatta

SEQ ID NO: 188184 - DNA, 872 bp, Cannabis indica
aaaaaatatcaaaaaatatcattaatcataagaatctctttgcaaaaaagtagtgatgcaatctgagtagccaaattactaaatttgagaattcttattgtaaattgtcattgtttggagtttgagttttgtaaaaataaattattttttcaaatatatgaaatataaatatgaatttaaaacttgataaaagtcttgaagatagtcttggtttgtatgacttgaattttttttcacaagtaaaaatgagttttatttgtgtgtgattaatatagctcttagaaattattttagctatgagaaatttaaatttgattgctttttcttttctttttccttttaagaatttaatttattatattattcaaattttagtaagattaagattgtaatcacgaatgataggtcgaataagaaagtacaaatttagaactaatttttgtaatactagcttgttttatatttatctatatttgtttttttccctttatgtagcatattaactattttaggacaattttctctatttaaatataaatttatttattaaggctgcaaaaattttatattatcttagcacccatcattatttgttttatattttaatgaagactttttattattattattttgcgtttgctttcttcaataaaaactctaaaaattgtagatctttgatgcctaactacacatttgcaatggtgccaatatacttatttttcttttagccaaaaacaacaaatttacaacgttgccatgaaaacttggttttctcacaatatatatacatctaacaatcatttgcaataaaacttgacaaaaactttaataacgtagctttttatgttgaggtaatttttttttttttttta

SEQ ID NO: 188185 - DNA, 1672 bp, Cannabis indica
gaactgtgtggtattgtttttgtagtttttttttttttcaacaacagctttggattgtgctgattcctttgtggtaataccaatcgggtttcgtgtgtggtggaggttttttttaatattatttagaaaaaaaaacagaattgggaaaaattttcacgactcaactgggcactagaatatatactttctgtcttttctttattttacttgtggaagtaatggatcaatttgagtaccgttgattatagaatccctcttttttttttcttctctttctttgttgaatcaaggtttttctcttgttagactatcatcattattattagatgaagtctgttgattcacaaaccaaataaattgataaaactaacatatttgttgcttgcttagcggctgaagttgtgtcaaatcggttttgaacaatctactggctttgcctaaacagagtattgtgtgtttttcttttaggatgaaaatacattaagctaacggatatttagtgggtctgggtggagatgaagatttcagcacttctgacttctgctggaatcaatatagctgtgtgcttgatacttctgtcgttatactccatattgagaaaacaaccaagcaatataagtgtgtacttcgggcggaggactgccacaggacgctcaagacgcagtgatccttattgctttgagagatttattccttctcctagttgggtattaagagcctgggaaagtacggaacaagatcttttgaatattggtgggttggattctgtggttttcctcaggattgtggttttcaggtaagttagatgttaaacttgaaaaaatatatcgatttacactttttatcagtcttaattcgtataaatagaatttgtactcattggatttgcattggttttcagcagcttttaaggtgctaattttttttattttgtctacctacagcattcgaatgtttactatagctgcagtcacttgttgttttctggtgcttcctgtgaattattatggtcaaaagaggcagtaccaacaaattcccttggagtctttggaagtatttaccatcttaaatgttcaagaagcctcaaagtggtatgacttttgtgttaattagtcctaccattaaatagaagaacttttccacaaccaacaaatgtccagttgaatcttttagttctactctagcatttctttactcttatttattagatggaatcctttagcatatcttatttattatctggtatcctcatgttctactgtagcatttttttttctgctgctttccttacatttctctttcttgctaagtagtgaccttgagattagtttatctctagatcacaggcttccactaaatcatgattttctttttgttttttctctttaccttaaagtacttatttttcatttgtttactttctcccaggctttgggttcactgtgttacattatatatcataacgttctcagcttgtgtgcttctttactttgtaaggatgaaaaacctgtcttccatttatatttctgtttcaagtttttaataactttttgcaagttatatttgcacattctttcaattattcgctaactgcttccatttttcccccttgtaggagtataaaagcatttctaaaatgaggctcgcttatattagtgaatctccaccaaac

SEQ ID NO: 188186 - DNA, 1806 bp, Cannabis indica
tgatcttattttcaatctcttttgcctctgtgtgagagctaatagatagctgattcaactttttggagtcataattagtcaagtgtgctgggaaggaaacaacattgtccaccgaattcaattcattcttgctcaattcaatcttaacagtccaatattcctgtggtttaaactggtctatttccatttctctgtcacatatgagacccaaagctgcagattggactcgcccggcagactggcaacctggtaatttccgccataataatggtgaaatattaaatccaattagataatcaagagcccgccgtgcaaggtaggcatgaaccaagtttacatcaatttcccttggagacaacaatgctttttttatggatggctcagttatttcatgaaaaacaactcgtgatactgtaatatcttcacgtaaggcatcctgttgttgcaacatctcaaatatgtgccaagcaatagcctctccttctcggtcaggatctgatgcaagaataagattttctgctctgatgagaaaggcaaagaaagaagaatgagaatattcagaaacatttcattaaaattgatcagagaaataaaagtacattgaagaaaaaaaaatgttggtcaactgtcagtatatagtagtttttcttaaaattaccaaaagagaagttaattgtcccacattagttagaacacatcccaaagttttggatgatctctttctgtgagtattggttttattcccatttaccatttaaggagagtagaattacttagttttagcatgatcagcaacccattgacgaattcaacaaaaagacaatattttccacaactaaaatgagccgaatttctaaaaggtctccattataccacaaacataacatcttaactgtcacttaggttgattaatctcacaaaaagatgaaaatcatacccacttagcgcaacctttatgctcttaagatgagtccaggcagcagaaggtacttcccacaccatactaaattcatcatcaggtctaacagatcccgacctagcagccaaatctcggacatgaccataactgggcagaacttcaaacatatcgcctagatatccctgaatgacctttgcctttgtaacagactccaccactacgacagattttccagttggggggtacaactgcttcaggttcatttgtccctgaggttttattggccccacctgttgtgctttttgtttctgttgcaaactattagctgctttcacagtttttccctttctactggacttcccacttttcttatcagatgatggttttgttgaagaactcctgaccacttcctcaggtcttttcttattttccttcaactgaaaaactggtgttagttgaataatattataaagagaaagcactaatgttttttttttctctgtaatcagtatttgctcacctttgaagcctgatcgtggccagtcttgctcttacctgatttcattgctcgagaagtacctttggctccttctgcagtatcaactttaatcaatgtatccccagtttgttctgtattttttttggttctcgacttcttctttccactgactttagaggcctcaatactattgctgatgggtgagcttgaatcagacaatcccgggtttatattatcctttttgccaccaactagcacttcacttgaagcctctacgttaatatctttggaggtactagaaccgactacactgtttttgcgtttagcagccaatgccagtgcccgattcctgtgtttattattaaccccttgtaacccaaaagtactt

SEQ ID NO: 188187 - DNA, 1543 bp, Cannabis indica
aatttagtatcaaggatcaaatcggtcaaatccgaaattttccttgaggtgctactcccatcttccttctttccagccacagaactaaccagacctgtgttcgaactgccactgttcttgagtcgtttcggagtgatcttccttcgcttcgactttccttcatccagtccagatatattgagtttactctcgtaagtaaccggaacttcaaagagttgaacagtttctagagtatttgttttctgaattgttgttgagacttgtgtatcaatagagttcaaaatttccaaattggatggtaagttccccatcagatcttcccgccaatccccatttcgttatggttaatcaaatttattccccccgagagttgaggatttcctttaaacagatctggtttttgtcccacagttttatcaatcatcgatggtcccatttctacgatcacctccatatcttcagttccagactcctgtgtattatgtgccactgacttctccgagggaattaacatatccgattgcttgatactcccctgttcttgtgccttcctcaagtgtatagaattggtgatcctattatctaaataattatgtctaccaacagtagcattcgatccagtacccaattttcctttcccaaaaatatctgcaatatccttcttctcatccaccttgagccatgttccaaatccctgctttaagttgtttgggtcttccactacccgtcggatagggtctaagcaaaccttcaattcatgaccaatataaccacaattgaaacacatataaggtaatttatcatacctgaatgggagccataatttcctgccttcgaatggatataggaaccccggacaaatgggtttgttcagatcacacgatactttgaaagtgaagaacccctttgaagaaatcttggcaacatctgctttctgcacttcaatgatttcacccaccatacccgcaagtctttctaaattcctttgagtgattgatttagggggcaaggataaaattcttccactcaattgaattctagagagacaagaatcccaatttaatggaatttccttcatacgttccaagattagtgtgccattattcaaaaaccaagggttcttgataagaattctgtttaaatcttgggacgatttgaaggagaaaaccaggaaaatggcattctttgaagtgtgcttgatttcgacaccccacactttctaagataatccccatactcggctcagaatcgttttgatcaaagaacgattcattgtgcgattagaacagagacgtcctatcgcacacatcttccccacttcagcatctccatcttcattgatttctcaaccgtcttcatcaagaacagttaggttgttagtctgagatagtagatcttccatggttgtcacgggcttgttcagcaatccttccggcaggctcttctcgggagagagcatattcatcaagagtcgggttctatttctatattaattttttttaattggtttcactttatctttttaattgtgaataactatatg

SEQ ID NO: 188188 - DNA, 1204 bp, Cannabis indica
ggacctctccaagaagtttgagagaggctctccttgataccatattcgtcatttagatatggagtattaactgcttgggttttctcttttcttctcactttttagtgtctagtttgaatgatgactttcatgtggaagtcgtggaccttaaagtggtccaggggatgtctttagtaaacgcatctcctgcgtgttgggatcttgaagactgagccccaggagagatgtctccggaaggtatccaggctaagaggaaagctaagggcaaaggcaaaggtaaagccaaagctacctcttcgtcccctttggcacttaataactctgtctaggagatggaacgacccaattaaaattgaggaattatggcttgttgaaggcgtattccaatgaagacagcgtttataatattcccaaactcatgtggcataggatgtccatcatcgaggaatctccatctcgtagtgtggaaggttttgggacatggagttggtcacatatttcatgtggaccccaccttctgttgagaacatactttgcccagttttgcgtgacagcaagaattgcacctttctagcttctcccaggtacgaaactcatctttttgtaatttgtcctaaaagtttaaagttgtagtcccagcttgtacctgactttgattcatgtcttgtagaacctgtcctcaggtctttgttgtcggacgaactgaagcgacgaatatccctctactagacttttttgaagataaactgaaggtaaaggattcggataccactgagttgttgcgccaacatgtcttgattgcaagttttcaaagtatccatggcgtaagcggtaggggccaatgccaggctcccaatgatctcaaagaacaaattgccttggacttgtctgttctgatcaataaggcagcaaaggatgaggaacttcttccagctgcattggcgagccaccatctggattccctcaccgaagaggaagagatataggcgaggtttttggttgcgtatccagacaaaaaaacttcgggagtgagtacttttggaagaggtaaagcacccttccgtgaaattcgcacccctagcctattccagatgtctctaagagaccaagggggatttgacagttacttcctgaatttggattcgcataggtatctgatacgtgtttttttaccacaacaaaattactaattttatttttatat

SEQ ID NO: 188189 - DNA, 2043 bp, Cannabis indica
tatatatatttggactacaatgcccttcctggaattaatttcatattcataaatcatattaaaccaacaaaatgtcaacaaatttggaaatttagtcaacaaactcaagtgttacatttactaaaacctcaatagtatgcctaacctcatggacactttggtaatttaaataaaaggctaaaatagtaaaaacaaacatctcaccactaaagagatttttgtctttctattacgttatcgtagtaatagattttacagattacagacaaatttggtctggagcccaaactaagtacttcgcacactctctctcttcctcacactgtattttttttagagagagagagagagagcagagaaaagggaaaagaaataataataaagtatgatacatttggagagtaggagggaatgagtaaagcaaaaaccttcgttttcgtcttcttcttctcgtcattgttgttgccaaggtttcttcaagtcaaatagattaataataaaaataatatttgaaaaacccacttgccaaaacttggagaacttagttaatctcagagacccagaagaagaaaaaggaattttttaaagagaaaaaagttcgagaaagtgaaatgcttgtgcccatttgaaactataatccgatcaagcaatcgaagatccctggtatgtttgtttgtttttttaattcgacgatcgggttcacatttgtttccattttgagtgtgattttagggtttgtttaaagaaaacaaaagtctttatgggccactttagttgcttttgtgcatgtaaaatgtgtttctgtctctacttttgtgtttatctatctgggttttggtcggatatggtatgagcatatgaatgtggtttatgcgtgtttgtgcatttatctttttatgggtttggtttgatttcgcttttgggtttggattgtttttgagtcagatctggtagatatcttatacacacccgtttatcattagttactattttaggagaagtgcccaagtatttgtgcattttgtttcttgagaagggtttattagtagtacttagatccggtgctttagtattgatcaagattctgtactgaaactagtgagttttagttgattgacatctactttgttaaatgtataattgatttataccaaaaacattacatggttggaaatgccaattacttgagtgggttctcttatttattcttggatggtaacattttaatgtgttttttcttttccttcttccaactggtttgtaactgtgttttataatttattgtgtgcttctgaaaacggtttcttttatttcctatgaattttgacattgctagccagcattgagtggatctccgggcttctggaaagtacaactgggtgatgaaccgaaggaagaagatataggataagtgcagagagtcgaaaatgaaacctgacacccctcttgattatgctgtgttccagttgtctccaaagcgatcacggtgagaacaatatcccaagtcattaacttctgaccttgcctattaaggtgttaaaaatacaatcgcttttgtttcttacagatgtgaattgttggtctctggcaatggaaacactgagaaacttgcatcaggatcagtcaaaccgtttgtatctcatttaaagtttgcagaagagcaggttgcacttgcagttcagtcgattaaacttgaagttgagaactatagaaatgcagagacctggttcactaaaggaacacttgaaaggtttttataagtcaattaagttagcacttgttattacactgttatttgtgcctttatgtggaagtgatgacattatgagtttcatattttatttggtttgcaactttttccagatttgtgcgctttgttagtacaccagaggtcttggaactggttaatacatttgatgcagaaatgtctcagttggagtcagctcgaaggatatattctcaggtaattattgtcataattagaactacttacattatttacccccattcattgttgctatcttgctgacggtgtgtgtgtgt

SEQ ID NO: 188190 - DNA, 2650 bp, Cannabis indica
aatgtgttcagaaaaacttgttgtaccactctcagaggaactaaatgttctatggcaagaaggacaatgattatcttcagaagaatagatcccatgacaagaatcgcatacattcagaagttgcttgctccttttcttcccatgcttgatagcatatagcattgaagaacttaagcattctttccaaatccacctctccagatcttgatatctctgaaatgcaccacttttctcaattttgttcctcccaagctcaatcacaaaagaagtagagctctccgacaaatcagactcagcaagacacagagtactgctagggctatcaataccattactgcaatcaatgggaactgctgtttttccagtgtcttcacgttgcctccccatgttagcatgcagcatcttcttccttacagctttcttgaaaaagagttcaatccttaccaacattgcgtgcaattgggattccctaacccctcgtatgtccaacgaagccagcaaagcatcaaaaccctgcagagaggctgtaagaatgcagaatagcaaatgcaaaataaagcatataatagatacaagaaaaattttaaacatcagacctgttcttttttaatgacacttgagagcagagaatgaaggaaaaataacccttctgcaactctttaaaaaaataatggaaagatgttcaagctttcatgcttgaaattatcagataggaaatataatatcatttatatcctattatttcatgtggaaaaatccatagaagaagccatacaacaattaactaatcagaatcaatagaaagagcatcacaaacaaacacaaacataacagcaaaaacaattaaatgaaaaaactcatgcaaatcaagacatttaagatctaaagataaagaagatagtacctcttcagaatcaataagcctccaacgcccatcattcaactcaacaaagatcctgctgcagccaggatcattttgagaagcagaagtaatgaactgccagtacctattgcgtgtacgatcctgaccaagtggcaatgatctatacacgtacatctcttctgccttgtatccaatataagattttaattgcgatcgagacctgtcaacagcatatcctggctgctgagaaaggttattatcaggaccagcacagacctcttgcatttgcaagtttccaccagaaggaaaattgttgacacaaggattgttattcgatggatcctccatccgctcctccttgactgcaagatctcctgttgttccattgtttttgtcatcaacattgacaaatggactttgcttggcctctgctgaagaaattacaggattgagctcaaacttgttattgataaatgatgtgtaaggcattctcaacacataatcttctttcatgcgacgtttatctaattgcatctcagcccacatttgcttctttaaagcattcgctgcttctaatcgctcctgaaacaagcactcactttaaattacagccagaagaatctagggaattttcaagctttacctccaaaagtaaaagattatgaagaatgaaaatcgcatacctcaagtacaagacgaattgagtttccttcaattgccacacctaatagtgcaacaagtgcattaagacgctcctcaacactcagatcagagtattctccttccataagcccttgaacccatggctcaccaggattgctttcatcaatatctggatcttcgcaaccaaaattaggtacatcactcttgttgacattaataggttgggccaagaaagaaacagcatcttccctctttacatagctttcagaatgtacagaatctccacgagaattccggaggtctttttttttagtttcaattatttgaacaatttcctctccgttacgagaaatagatgcttcatttaatttgtttacttcttgagaaactacagaccccttttcaggatttatttcagtacctaagtcatcaatttcaggatcctctcctacatcgctttcagaatcttcatctctttcaccttcatcagcatcttctacatccaagaacccatttttaaagacacctattctctccctggctgaggaaagtactgtctcagcatcagctgggtccttcctataggcagcacgcacacaatatgttgaaggagcagtcctctcaaaaagctttgtatccctagataaagcagcagctatagaggcttctggtgtcttgctagttgtaaggtcccgaagtccagatttcttgaattacaaaattcataaatgagtttcatgcaactagaatgtgaagtcaaaagagagttttatattgagctttccctttgcataatgtgaagtcaaataataaacaacccataattacctgaatcctatctgcaacttctaatatggtaagacccttgtccccctcaagtgacagaacatgaaatgcagcaaatttgacagttccaggagtcaaccgatgcctagatccacgtggattagaaaatcccctctcctgcattttagcaaaagcattttcaacagctgctccactacgcaaattggaaactatatctgcaccatcattagcctgcaaaaattaatataccggggatcattagcaagaaaacccgaaaaaaaaaaaaaaaacgaacaa

SEQ ID NO: 188191 - DNA, 1424 bp, Cannabis indica
ttttgttatttgaaaataaaataaagaagaaaagaaaccaaaagcaaaattgaaagagagaaaagtagagaggaaaagaaggaaatatttacgacttttttcttcaatagggatggggaggtcccacatccaccttaccttaaatcatatatattagaaaatatctagctcatatgtgtagttttttttgttttttgggtacagtatgttgtagtcactaaaaaatttgattagatttttaatctacctatggaaataaataaatggacaatctgaaaaaactacatttgagcgtaaccaatttttatatatataaattaccaaatttaaacttaattttaagtaaatctttcttttagtaaaaaaaacaaggtgaaatttctatttctaatgagatgaaatactgtagtctcaaacataaaattagagcttttcaggaaaaactataaaacatgagataatttatttttttatgatgaatgagacataataactttcttttgtctgatcccacaaagcatatttaataattaataattccaattagattttattttaaattaaatttacattgctttcaaaaacaaaatgttttttatttggtaaggtaaattaattttaagtttgtagtaaaaacattaatctttttttataataatgtagtttaaaatgaaatttaataaaagagttttgtaattaattaaaacaacaaaaccaaaaagtaaatcaacatagtcatccgtggtgcccacagaattattgccccaccataatattttaattaagcacagaaagactatgcatactagtctagaataatatgaacacctgagttgagttgggtgtggcggaggaagtgttaagttaacccaacccaagtcaaaaacgactgccccgccgagaacgttgggatgtagtgtagagtagaccccacaaccccaggcccaagctgtcttatatatattatccggtttttttggtttacactcagactcaggatccgcttaggcgtactataaaaggtaattcagaccaactttttgttgatccagtaataatataattaagaatttcgggagtgtttttgtattttacctcatcaatcaaggctcatgtaacaattttataattttataggaaccatcctcgtcatccaccaccaaccaaccaataaatatactctactgacaaacagaagcagacgcctttaccattagattttgtatgaaactaaccaaacttctattctagatgtttttcaatcacatacgggacctgacaccacccctttaaagctatttctagtcataataacaataaaattaggtaatattactattactatctattacacgtggcacatgcttataatgaattagaaattaaatagccactggcccactacacatatgtaacatgttttt

SEQ ID NO: 188192 - DNA, 3126 bp, Cannabis indica
atacttgcaaagtacgaattatatgtgtgcagtttgttaaaaaaattatacttttaagaaaatcaatatcaattcataaattcttttaagaaaaaaataattttgtagactatatacatttatatacggagataataattaaaattacaaaaatcaaaaattacgaaccgaggggaataaaagttatattaaaatgagaattttcgcacatccaataaatgtgagatatcaactcacacataataattcactacaaaaaaaaaaaaaaaaaaaaacctcacacataataattaattcgtactttgaaaaaaaaaaaactcacataattcgtgacgaattatttttgaaataaaatctcacatgtattactatacctcccactccgtccctcttcaaatcttgaaaacaaaaatgttatacatgtataatttgttagagattttgcataaatataatttgttcaaagaaaattacttataaaaaataagcacttcaagcacttatttataatatctagaatcacatacttggaaactcaaaatttttacacttcatggttgtcactatctcttttttaggtataaatataattataaatgagtgatttagaggttgtaagaactgttaaaaagcatgaacaacgttcaaaaatgcacacacaaaaagctaagtaactggttactaagttactagttttttcaatttttatcaattactctccaatctaaatcattctcacttgattttataccacttatacacagattaaaataaatcctcaatagccatattttcactactagctagtgtaatctgaaactagtagtggatttacatcgaaatgattctaactttcgatgttctatatattagagagaatgctcaaactttaatgatgcaagagtgcatttagtggagagttatgtggatttctttctaaaactaaacagagattataatatgtactatatgtagttggacatattggcggagttcgaagtagatttatggggtttagaagaggccgcgggtcatgccaataatgggtgcggtggtggttcggtggataggagcacatttggaccatttggtgttctagttcttgccaacgacgcactttcagaactaactcccatctactttcaccctagtaccaagaccaacacttatttctgcgctgatgaaacaaggtttcagttctatttttattattatatatatatatgcataatgtatatctatagcttgtgataaaatatttatggtaactgatcatgcattaatttcatttaatattatatggtatgtataggtcatccaaggcaaatggtgtttttaaacaagtttacggaagcgaagttcctgttctcgacggtgaaaaattatctatgagagtcttggtaaatacaaataattaattaatattgatgatgatcatcactttgaattcaaaatgaagaagcataattaattaataacgtgatgcgtaattttgtttaaaattatatataggttgatcattcaattgtggagagctttggacaaggaggaaggagagttataacatcaaggatttatccgaccgaagccatctacggcgcagccaggctgtttttgttcaacaacgccaccggagtcacactcaaggccacccttaagatttggcaactcaactcggcttttcttcaccctttttcattgaaccaaactcataccaccaatcaaaatcaactatataggactatatatatatatatccatccattattggtgcccattattcgttaattttattttgtggcaaccaactcatcatcatgccatatataacagaacagtactataccaaccattgttattgcctcttttggttataggggtgttcagttcaggcaattatattctaccatattatttgatggaatttagaaattaaagcaagctccttctaccccaaaatagagattttttttcgataaaaaaaatattattattattagaagagataataataataataataaaagaatgtcctgatgcttatgctttcgtgattctggagtacacgtgagtaatgtacgatgaaaaaactaaattattttaatgatttttcagataaatttttttcttttacaatctaagaaaaatacaattaattataaaaaataccgatagtatttaggattatttcacaaatacacaaaaataataaaaaaaaaattataaaaatatggttttacagaattttaaatatttttatgattttttttattttatttacagaaaatacggtctttttatgttagtactcttgtaaatttgttattaattttttcttatttgcatattattttttgttgttgttttgatgttatttatatattattttcatattacttttatgtaactttcttgttgttttcgtgttatttttatggaaaactagtaaaaatagtaaaaaaaaaaaatctgtaaatataaaaatgtaatttttttaataaaaattagtgtcttatgtaattgtccctagtatttaatagttaactgtaccatatgttcagggttgcccaatgacgaaggccacttgggtcgttgccaagccccttgcgcctacgccttaccctattccaaaacatttttagaaaaataataagacctaaattattgtttagatttgtacgtattttttaaaaaagaaaatactcaattagtttttaaaagtatacctatataccaaaaaaaatataattttcgtaaaaaaatttaaggaaataataaattactttttggccaaagcctccactccagctgacaggttcagctttccattagcatttaaagtttataaactttagttacaaatttgtttattattacatttttttatcttttgtaaattttgtttgaagcaaaatgaactttgtacttagtaggggtgatcataaaatatttaatacaatctaatctatattggtgtagatatttgtattttataaattgatttagattaaaaattttaaaataattgaatattaattgtcatataaaagtattcaatctacatatatttatatatactaggtggaaggtgcgtacaatgcatgcactacttagtcgtatcatcaa

SEQ ID NO: 188193 - DNA, 2442 bp, Cannabis indica
ctttttgtgttaatttaacacaaaatttgatatttaccattagagatgctacttaaaacttcagcccatttcagtctaaaccatttgttccaattatctacataattgaattatttgtacatttaaaaacttaaattgaattatttgtactacagttaattaaaaattaattttaatcaaaaccataaagttttagatctacactacactgcacataaataaaacataatgattaacaataaactttcaaagatagtgatagactgatagtgatgaacactcgatataaatattttatattatattaaaataaatacaggtttttttttttttttaaaaaaaaaaggaagaagattcagacctcaatatagccaaggttgtctgggtccagctcttccataataagtgcagcatattcttcagcacgttcttgaatcttagacaacttgtttgcaccagcacttaacgtaataatctgtatgtttaggtccataacatgttttaaaaaaatttagtatcttttattttttccaattatgtatttttttttttgttatattacaacaattttttttttaaagtttccactattaaagaaaaacattagtaaaaagactaacctcctttacttcctctccattgattcggccatcagcgtttttgtccaccctgcattcattgcactcttagttgattaatgtaggtgactaaaaaaattaaactttaattatgctagtgcttacaagcccaaaccaacttatattttagggcattgctattaagaaccagtaacgcttagcacatttttgacatgtcgcgttgcgattggttagcgatactctctaaaagttattacattaaattatataggacttgatacttaattggactaataacgatattgacacgtactaggatgctagacaccactggtagcctttagcatttctctatattttatagttccattaataaaaaaaaaacttatattttgtagatttattttattcaacttattatatttctcaaaagaaaaactcgtttttcaatatacattattataatgttacatgtcgtatatattatcccactataaaaagttagacattattatatatatatttcccatcaccaatgaccaatattcaatatgggttttggcgctactatcattataatgttttctcgatcaaactccgacaactatatttttttttgtttttgccccaatttctttcataattttcaatatataatagtaatttagttattctaagtcacgtcacaggtgtcgtcatgaataattttattggctaggactaaaatgttttcggtgaaaatgatgcattattatccaaatagtaaaaaaaaaaaattaaatcttacatatcaaagaaagtttgaagcctagcatcgaagctttgatctgagatttgttcccaaaactcgcgtaactcagctttgttcactgaagaagatgttatacccctccgtcgagccaacgcatcgaacaactcgtttgcgaactcattcgactcgttcatacctgtacaatttttttttaaaaaaataattatatatattatcatcaactttcttgcccattttcttaccacccaaacacagcaaaagagagcagaaagtaaaaagcaaaagaattaaattaataaacgtacctatgcattggccaaagagagatttggaaagtacaccatcgacggccaatttatcaaaacgcgcttcgatctgagcccagccttcgttcccaacattgttcttggtcatgaatttaagccccttgagagcgcgtgcggcgccggacttattccgatcgatcttctgctgctgcaacctcttagaggaagtcattcgcctaagctcctgcgacacttggcggaacttaaacgaaagctgagaccccaatgaagaggagttgggcttcttctcgagctgagtcgccaagaaagaagtctcagagtcacctcccctgatgttctggaccatgaccgagtcatctcggacatcgagcgtgatctccacgtactcgtcttggtccttgaatctagtgctcttcttgctactgttcttcctcatcttactccctcccccgccaactaactgaccactcacactcagtggaccgctgtagccgactccagcagcactcccgccgctggtgcttccagtctccgaatacgaatcattatgaggactttgattctcttgaatctccatctttaattaatctaactatctggaccaaataaacaatactaatatatattataaatatatatatttatataatttatgaaaatttaactgcacttaaccaaattcatgtgcaaataatatttaattttaactaaatcggtaactatctccatgcaaaccagctaataagtccaaaaaaactacactacagcaaataatatattatat

SEQ ID NO: 188194 - DNA, 2498 bp, Cannabis indica
aaagaaatgcatttgttgggttttctcatatattcaccagtttgcttgagaaagacgtcgatgcagtggcttggaatcgctttttcacaacattattattgttgttgttaggactggaaaagctaaacacatcaccatggccctttgcttcatccctttcttcctttgggtccttaaagcccacgcaacctctttcgaccccaaccaacaattcccacaaaagaacatatttattctcgctggccagagtaatatggccggtcgcggaggcctcattattaacgacgaccgcacccgcactcagatctgggatggcgtcgttccctccgcttctcgtccaaatccctccgtgcttcgcctcaacgccaaactgagctgggtccaagctcacgagcctctccacgccgatatcgacgtagcgagcgttgacggggttgggcctggcatggcatttgccaacgcggttctggctgatgaccccagcaacgggcccattgggctcgtgccctgcgcgataggagggaccaatatcagccaatgggaaaagggaactcctctttaccggcacatggtgaagagagctcgggcttcagtagctgccgatggtggaaccatcagagccctcctttggtatcaaggtgagagtgatactattcttaaacaagatgcagaggtttatggtcggagattggagaggttgtttcaagacattcggctggatttaatgtctcctatgctacctattatccaggtaaataaattataagattttgtaatttgatctcttattttctcgtcaatttttaaattttgttttgactaaattttattcttagatataactaatatccatatgtatatattgtatagtccttgtcagtactcatctagctatatagctataattatatatcaatccccatgctatatggtttcagttgatgttggagtatgtgcgtggtattaaatatatatatttatactgtactatatattaacatttatatatgatctagccacattctacatgttgccaacttgaatggtagtgtgaactgcgtgatgatataatttttcctcgtaccatctaagtcatttttaacaatattaaaataacatttggaattgtaataacttattatttgtttattgagtatataaccgaaaataattagaacactattgatttgatgccaaactcaaacaaatatagatctgccaacaaaaaatatctcttatatagcttgtttatggtcattttacacgagttataatatatattcacttgttttatttgttttatttatagtttttgtgatgagcttaatattgtgatccatatgtatataaatttgtgtgtaggttgctttagcatcaggtgtaggaccttatgtagatacagtaagagaagctcaattcgggactgaacttttaaatgtaagaactgttgacccaataggattgaccgtaggacccgataagttacatctaacgacggagtctcaggtccaacttggggagatgatggccgatgcttttcttaaatttctacctaagcaactcgctattgattcaactggaacccaaaccacttcttcttcttcttcaacaatatttttcttttcaatgatgccacttataaccattgtcataagtaccgtttcattactagtataaattagctgcctcattttttttttcactacgtacccttttggccgtgggttcaacaattttatgtcgttatatatcttattatttgtagctatatgatttacatgtgcacatattattactccataaatttcttttttttttccttttaagtagaccataaactattaatatatatatatatttatatatatatatagctttcaaaaacagacacctaataaagaaataaaagcaaaaggatcatccatgtacatcgaacgtgctgttttgctgtaagttcttcatacatgtttataaatgtaaatgatcaaagcaaaaaaagaaaaatgttaaataatataagttgtaagatagagggtctaaatcaaaagtgtaaatatttatgtatagttggggtagagtacgtagactgaaaatcacaaagcaactaaagaacactttaccaatatcgatctaatttctcctacaacaaaattgatggaagaactgctgatattataatgcattctgatatagacacttgtccaaactttggatgactgtgatatatgcagtaccgtttcacctaccggttcaatttagcaaggctctagctagaaagttatatatacgaatcataaaatatatttatataagtaaatttgtcattatatattagtgaatgtatactgatacggtatttttgcatatactaaaaagttttttttaatagcagtcaaaaaaacgactataaagatctactataacagaatgacatcttgttacaacaaacataaatttgtaaaagcaaaacagaaacaaaaataaatagtgcaaaattt

SEQ ID NO: 188195 - DNA, 5035 bp, Cannabis indica
ataggtgcctttggcggagatgtgtggttaatgctgaaatggttcggattatgacctttatgaagttgtataggccatctcctagaatcatggctatggcgatgaacacctacaaaacattgaaagtattagttcacattggttttcttattataaatttgtgtgtggatgcatggaaatgtttacattaattctagcgattagttaataatgttctataaaaattattagtttatttttatataatatttaattgcaccacaccaataataacgaaacttattaaaaatgacttgcaatgttaaccatgtcaaaatttgtgtatacacatgatatcattactctatttttatatattctaaaaaagtattatgagatatcaaagtgtcttgatgaaaccagtataaggtagtgtcttgtgagtaattttctattattttattgaagtacaagtgcaactcaacattaaattatactaataacgatattacactatataagaatgctaatcttttagtattactcaatttaaaattttgataaaaaactatctacaattgtaattatatgaattgcaaatttaaatataaacgttgaatcataagaaaaattcaagtagttgacaaattgatattcggaaatctaggcctaattttaccttttcacaaattacagaatacaaattaatttatctgtgactatattagttctttttatctagaaaatgctaaattcttaattaagaggtatgaattaacttgttttattccaaattattaattacttatctatgttaaaagagtattgttattgggtattagtgatgcctaacaccttctataaataacatctcgtgattggttaacgatattacctaaaatttattttcttaagttatatgaaacctgatacttaattacatcaataacagtatgacactaaaaaaagtgcttgacaccaattatatcttttagcaattctgatgttaaaatgataattaaatcaataatatgtatatagggagtatagagagagagaccttgtaaccttgaagaccatgcatactagtagaggagagatctgcactataccaatcaccttttctgttgttaatgagaggccacatcagaccccatgacagaattcctcctattaacactgatacatttacaatgtatgggcatatcattcctgctcctatatatgcagctgaaaaatcaaagtaaaacctgtacgtacatatatatactcatcaaattaaatcaaataatattatattattaaacgtaccgtacgtcctcataattatttaatttaatttagtatatatatatttatatatatatatatatatagtacctgttctgatatgctttgagtcctaatgaagggaattgtgcaaatccacaatcttctgtagcagtataaaaccattgaaagaaaccccaaaagaaacttagggagaaaaatttcccaagtacttttatttgtttcctgttataaatagttaaccaaattaattactaaataaaagaaaaaacattatatataaaagaaaaagattagtgtttgtccaaaatgtatactttgctaatttggctccattgggagtgtggaagctgttgataagaagagcagttgcagttccactaggatatgttagtttaaagtctatgatcataatctgaaacaatacaaatatacataatgatgaaagaaatgtatacatataggtagggagtattaatattttgttgaaattaatgatgggtatatatagtaccttgcggagaggaacaacagagaaaagaccaagaaagctaacaacaaaaagaaaggcaataatccatggtaatgatggatttttgaagtcattagtagtgtctcctgattgtattgctattgtttcactcattccgaatagataactcccaaatcctcctgatattattgtcatatacattaattaatattctaacattaaacaaaatacgtactaaggcagcatttttggttagagctaaatttttattctattcttttgttaaagtattataatataattctagtggaatgacttttccattaatttagaaggaaagatcattccactacaagatttaaaaaatttaataattttttatcaatttttttttatgcattttaaattttattttattccttttccaaattttattatcattttatatttttatttcttccaaccaaacgccatctaaattgctaaaggatactactagtttccaacactatatttaatatcgaatcatacatattaatttgttatagaaaatatacaaaattagctattttgttacatatgaaaatatgacaatgttaattaacttttattattcaatccctatcataaactttataactattggaaaaatattttaaggcactaattagttgtcccgttagtaaatagattcatacatagttaaacattatcggtgctcttatcattttctaattagtagttggcggcgaaactctcttatatatttatttttttaatataaaacttaactctatgatctttgtttttgacgacaattacccttttaatttacttttgtttgcaaatttaaatgtcagttaaatttaggttaaatgttaattgaaatcgctactgtgaatatctttgtacacgtgatactaaaatttcgaatataatgaaaatatatgcacgtatacttagatgtatacattaaaaatctagttgacatttaatggtaaaatttaatcattgaccaatttgtttaattataatgattagttaccgctgaaggcgatgcctgaagaagcaacaacacatgtttgaatgacggtgttttcttggcgagtgaagggatgcttcaacgtgcccaacgtctccaacaatttagtccatatcttgacgaagaagaagccgagcaggccggccgagacgttgagggacggcacaatccccgtggtgaggttgaatttcatgactatgaagctgaaaagaacactcaaaccaaagctcaccaaaatagcccttattgtcacttgttttctccactcaggaacattttgcttctcaaacatcttttccactgacaagatcgattcagactcatgagtcacagtttcctcttcctcaacatgatgatcatggttgttctctctaccgttgatattattgagtacctcatgatcttgtggctgtgggtggtcctcatcatcatgacccatttctttacacaacaattaatgaataactagaagtgtttttgaggctattgtatttgtaattgtgctatggggatggggagattattactaggcactatccatatatagctgtattaaatagaatattataagatattgatgaaggagacagagacaagacatagaagtttatgttgttttagaccaatcacatgtacgtatgtcatttcccacgtatcactatcggaacaacgtcaaattccaattatttatggaacccgtcgtcacttgtcttctacagacaattaatttgtaattttggaaaaatgtgttgtgtacacaccttaggaggagacctttgttttatctatttaatagacttttttttgttttaattttttttttaattatctacgttgtaattatttattagtgtcacttacaaatttttagaaacttataaataatttattttatcaaaaataaatctcaagctattatttaccgtgcttataaaaaaagttacaagtgtaacaaaatatttaaactttattttcagtattataaactatttaagatctttaaaaatttataaatttttgtaaataactacaatttgtacgagcatataaagtgaaaaaataattctcctaaagaatgccaaaaaaatatataatattacgaaacacacctttagaagaaatcctacatatttttttgttagtttattgtactaaatcagataagcagcgaaatgctttcgtattacttgttatcactgtaccatatcctaaaaaatttctaaatgtttgtacattaaattaaaacatagaaatataaatttaaaatatacctcttgaaggaataatgtgagatattaaaataaaatgtagacttgtttttattgagttctcaatacatgagcaaaaatagatgagagaaaaaataagagtaaatatcatttttagaccatgtgttttacaaaaattattgattagacccgttaaatgataaaataaatcctgtattttcttacatcatttattcttttgtttaaatttgttccgtcctactcctcgtaaatatgcattggctttcataaagtatttcctttgcatggttaatcattatatgcatggcacatcatataaaattctagcgatcatcatttcacattttgagcctaaaatattgaattttgcgctcataattcatgttgcatttccctaacatttataggaaaactcagattataccacttaaatccactctaatcattcctaccaatcttaacatataattgcctctaaccataattcgattcttagttaaaatgaaatgcaaagtcaagaagtagtgattcgtgaagctataacaacaggaacaataattaaaatcacacaatgtaacactaaaaaaaagagaaagacttgtcatcaattgaaccaaacttctttagtttttactttcttttttttctttcttttaatcctataatattttgggactagaaaactatatccattgctatttggtacaaaggaaaaactcagaataacatgtttaaaactcagcataaggatgaacaaaaaactagcattgtatgcaggtgcattagatatccaacaaagttcaaagcttctaagctagaaccctttaactactaaccccagattgcacatatttacatcaaggggaaggggccactaattttctccgaaaagttattttacttccaaggaaagaaagagaaggctcgctactcgcagatggatactatacaagcatggaattaaattccacggggaaaggc

SEQ ID NO: 188196 - DNA, 1471 bp, Cannabis indica
tacatgtgaatcaaagatacaaagtaatctcacttaacaaataaattgtatagaaagtgaaatgaacatacgagctttttaagagtttggggatttaaatacaaaaaatttgagattgggaaccttattgcaaaagttgggttaggtaggagatttttgctgcaaataagagtggggtgtggttcaattcaaatgacatttactattaccaccattggtaaaagatcacaaactcgttattttagctaggtcaaattaagaaatgcataaaagaagctaactatgcctggtataatcgttttgccaatgtaagagctttggcatcaaacttcaatgctaatcttccttaatttgttttcagctcaaggcatgtttcagaagttgactatctaataagttccagactctggtaacagtacctcttgataggcaatgatatgcttgtttagcagcctcacgacgagcttcgggaactttgttgtccctaaatacaacttcaagagcttcttgtaactcaacttgtccagacacctgcaatagcaataccattgaaattaaaatatatcatatacattgttatttcctttttcttgttgttagtgacagtgttaggctgccagcataaaaaggtgttcttgttggaaattgtcagttgattgaaaatgaatatttgaatacagataggcatatgcaaattccaggaaacatttacatatgaaagtacagaacattaatggttgatcatcaaacctggagaactgacagagggtttaattgttgcatttccgaaatcatgcttgagaaatgtccaacatgtcggcctgaaattaatggtacagcgcacaattatatgacttgacattttaagagctcacaacataagtaatgaaggtgcaaaagtcagggtatttgtttaccagttagaacagcacagccggctgcagcagcttctgatatattgtgaccagtaaaaccaggcaggaaggaacccccgattacagctataggagttatccgatataagtgcctcaattcacctagaaattgagtagattgagaagcaggagaaaatcccccaaaaccaacacttaaagtaggccttataaagaaaatttctgaattctagaagatagacaaaaaaataatcttaaactgcattggcagaggaaagattttattgataagttaaggtaaatgaatactgaatgttttgcttaaagaaaataataaaatgctaacctaatgtgtctacaacatatatatttgtcccaggtgtaattttatggccttgagacctcaaagcaacagattgcccctctttctgcaacttctgtactatttgagaccaaaaagtgttataaagtaacataaaacataaagtaaggtacattgtgtgacaatgagctttctacgttaagtaagacatgcatgccaaaccatgaatatcagaacaatattgaagaatattgca

SEQ ID NO: 188197 - DNA, 1827 bp, Cannabis indica
agggtttccttatcacacggcgagcaatatatacttaagattaaggtatagcacaccacatagtaatttaaaccaatatgtttattaaattaaaatatataagatccaatattaaattatacgaataaaagtatgacactttatatggttttggacaccattaccgctccttagcgttattctatccttaataagttgggagagtaaacacaagaatagtgtcttcaatttggtgcacttgatgtttcccttactgatatcgatttagttgttctgttttttaggctttctaattcactaacttttacctcttcaacaatgttgagttgtctatcttttgggaagcaatgtctggtaatgtagctagttgtctgtctttttgggagctatgtcatatgtcagttaatatggttagctgtctctctttttctgtgaagtagccccagtgtggttacttactactactatctctagaactaaatgaaattttcttcagaacagaaaataaatggttaattctggaaaccaacgagatagagaattgtcagttaggaacaccataatttgaccaaacaaagtaataactttttggtagtgaacaattatgcacctgtttaaggaagttcttttgagtgatattccaaaaaaaaaggaactattcagaagtaaataccaaatcttttcatcaagtgatacaatgagttaaagaaaataaacaagggccaatcaaacatgcaaaacaaggttcatatttcatagctataaaagcgaaaagaagaaaaaaaggacacagcaaattggttcgaatttcgtatctgcaagcaagctaataactagcaatacactggcaatctttacattcaaagaaacaagatttaatctatggtgttctaattgaaaccagttagtcatttaaaatgaattttcgaacaataacgagttcgttacataggaagtcagctcagagaatatctcataagtatatagaaaatctaaattagaggcagaagaaaagcatattacaccattgaagttactctaagctgcatgttgttcagattcaaaattagcaaatatgaaaatggcatgatgaaataagcaaatatcaaaatctggtcagccaattgattaacagtattaaacagctaacaccaaggagagatttgagcaaagtgaattctagtttctgacctctggcttagatttctaacagaaatacaagtgttctataattgtcttaaaatgatacaaacttccgttcttctaaacccttctcaaaattgctttctcttatttctgaaaagcttgtctctttttagataaagataaaagagagcaatgaaacaacccatggagaaggaagctgaaacccacggaaatggtggatccttgaaacaaacaagtgatgcctccaattcctgggatgcaatatagacaagagagtggatgccatataaatcatgatctgaagaccttaggtaatacaaagccatctcgaaatccaaacgagacaatgcagacactgccttatccagcttgtacttcatcaagttccatcgttgcacgaactcaccttgttgattatgtttcaaaagttttctctccccaccatgagctgctatggattcaagcacatcaattgcacttgttattgtattatttaatgatgtcaaaagaacatttctccgagcagcatctttctgcacaaaagacaacgacgaaatctcagagaatggaccaaacggagtttgtccaatactccatgtgtaatccaccaatgtagtattgtgcctggggctccataacaaatgtgttggtgaaactccc

SEQ ID NO: 188198 - DNA, 1618 bp, Cannabis indica
agcatttgtttttcttcatattaacagaatctcataaataagtacagtttggctctctgcacatttttaatagggagctttccatagtaggaaagacattatatggctttggataagaactttactgtgtatatacttaaacctcttgatcccggtgtggcatttcagaagctgaacatgggagggggtgaaggcgaaggcgaaggttatgatggcttagacggcgctgaagattttgatggcttagatggtggtgctgacgatgatgatgatggtatgctttacatacttgtttccagtaatattatgcagttgaaaagcattgaaatttgattgggaatctataacacttgaactaatgtcttgcagaggacgatgatagtgacacagacgatgacagtgatgatgaagaggcatcacccgctactgatgaacttaatgaaaaggtttcgccggttgttgagactgcacctaaagcttgaatattgtcatgcattaaagttgggatacctaaactgtcaaccttagaaattttctctcttttttggggtgtatgatcaatggtgattggcatagtggtttttgaacagagaaaactacataggtaattcaatgaatgtctccagtctcttctgatgtgaatgttttctttactctctaagatactaatactttatatcactgatatcaaagaattggtgtgattctgattctgtaaatcttgcaaaaatggatcatgttattaatctttaatggtctttctcatgaaattttgatcattcatcttgtgatgacatgtttgtctagaaatttaaattaatttatgtgaatatattaatctgacaacatatatattttgaaaaaaaggatagaaacaacgaaaaatcagatagtggactgcgacttaggtttgtagaacaaaacattttgtggacctctcttttctagatctgtgtcgtcgagagtggaatacactgatttagtagatctagaagagaggtttttcttttttgtatgtattaaattgatatgggcgtctctttgtgtcgccttttagtttgtttactacgatttttcttctgccacaagtgagggtattaataacataacgggggaaggtcggtctaagacaaacaatctctttctcttttacaaaaaaaaaaataaaataaaggaaaggatagaagtgtataagaaacggttgtgcgagtccatatgtttttacagggaagtaaaaactaattatttcactgcatatgttgtgtaagagttttatggtagattttagttcacatgcaaaactatatatttaaagagtttgagattatccaaaaataaacttaaaagtttaatcatgggaaatttacatacattactaaatttaatttattacttttctactgtcacacgcttattgttacatttatactgttttttttttctactgtgtcaattatttttcccaaaactattttatcataataataataaataaaataaaataatgaatagtagtgtccccccacatcaaaatttaattttttttgttttatttagagagattgattggacgtgagatgtgacaaactaaaaggcgacacaaagagacgcccatatc

SEQ ID NO: 188199 - DNA, 1716 bp, Cannabis indica
ttatttaagtttacaatcatcacaactagttaacttcaaagttgatatctttttgataatttgttggaaccctcaatgtgcttcctagttttgtcattctctttcataaagtatttttatacgttgttacactgtgatcgacacgatttatctcttttcgcttttggcttatgcagatatgccatgctaaacttgcaattttaactatataaaatacttacgaatgtaggtaaacagttcgggagttatgccaattattttttccacgtcgtctttagctcttcccggtacaatagctcggttcactggtttatcagcattaaagaatgctgcattgactttaaatcctgggggtaagatttataagctctcatactatagttggcagttgagtaattggtgaaaaattagtgtcaagtgtgtttgtaaggctactttgccaatttggaattcggaactaaattttaacaatcaaatttgcttattttttctctttgtgaagaatagtatttgctgtgattcatgatttacttgcatgtaattaacaatacaaaattcttttgttaagttaaagtatcgaacggtcttaaaatattctgaaaactcttttgtaggttcgctctatcttcccaccaacatcctattgatagctttcttcaactactactacactttcctacagttggaccctgatgatgttagcgagcagttgaagcgtcaaggtgcatcgattccacttgtacgaccgggaaagagtacagccgcctttcttaaaacggtaaaatttctgccttcctagctcttgtgtcgaaacaacgcattgaattgtcgttaatcatgttacctttgtgtgcctctcaattgtgttaaaccaagtaatcttcttctttttatgcaatcatgggattttgactagaatctttaaactttggttttatggttcttttgttataggtcctaagccgaatatcagtgctcggttcaggttttctggcggtcttggctgcaggtcctgcagtagtggaacaagtcactcacctgactgcatttcgaggatttgcaggcacttcggttctcattcttgttggttgcgcaacagataccgcaagaaaagttcaagccgagatcatatcacagaagtacaagaacatagagttttatgactctaacaagtttggtccatagaagacaagaactaatttggctattgtgtagttgtacatctctgtatgaaatattttattaatggaattgtgattctcaaagatgagggttttcacacacacacatatatatatgatgtcatgtatgtttgagctagtcctctaattcttaattttggcttttgatttgtacatagtaacataagatgcatttcttttagttgcttgtagctgggttttatgtttttgaatttgaggttagtttagtttttaacttaaaaaacttagtataaaaaacaaatatagtcaattgacaaactgagttttgttcttttgaagaaatgaaatgtgataattcatctaagttctaagttaatatttgagtttttattatttttcaaaattgatggatgtaatgtgtttgtttcatagcataaaaaaggtgttataaagcaccatgagtcacaaataatattatttttgtgtattatcatagctgagtaaccttttcctaagtttattggtgtttaatgaagttgatcatttttttttt

SEQ ID NO: 188200 - DNA, 5422 bp, Cannabis indica
cagcacaagttcttggaatagcttttacctagtcctatgaacgcttctgcataacacaccattccaaagaaatagtttgggaaggccctcttcgtagcatttcgtgaaatttatttcccaataatactaaccccttaaaatctttcaccacaaccaggaacagcagacctcacactaactgataaggaacaaaatctataatacacccaagtcttaaaaatcatccaaacatgctacaaaaccaccgtttatatatggcaaccagaccccactatcttataccaagacacaaaccaaaactcctccatgtatcccaacagctccatcaattccccctatctcttaaacattacaattacagcaaaagtgaaattccaaccagaaaaacttgtatccccacaatctcaatccacccaaaactctgagatctggccattattaaggctaatatttaaaacagcaatgaaaacctgattgcagatgcctcatcacctattcatacatccaacatcacataccacgtctgcttcagactagctaaactaactactcccaaatttaagacaatgataagaatattagaaatatttcaaaaagcacggcatagtcaataaaccaattagtctgacatattatacaaatgttcaagataagaaagacacatcacccctattctgaattttcttgaatcctgaccattatacacgatggagattatgccatgtaattaattcctcttttgaaaaatacctggaggtgacatcggttatcatttggtcctgtaggcaagcgtgggtaaagagtaatcagcaatgcagcaatagagccattgcttgttgaaaaagtccgcatccctcccccaagaaacaagaaaccaatggctaaacttacctgaaaccaccatggtaatgaagtaagaaaagacaaatctttaaagagtgaaaaaaagaaaacagagaaagagaaatgaagtggcttatggtagcaaccgccaactttcaaacaaatacaagcaacttccttgtgcaaaagaaaaagaacaaatccaaggagagaggggaagggagtggtttatcagaaccacagtcaacatccaaaaagcgattacagtgtaatatagccaagaaacttaaaactatatttcacccataagatatcttttacaatgcaggccagtggctaaggcttctattcattctgcatcattttcaaaaactgaggattgcttatgatacagaatttgtgacactgtaacacaatgcaagactaattttactagactctacagacacccttagagtaataactaactataagtaagaagcacccttacagaaacaatgcaaggcttaaagcacccttagagtaatacctaactacaagtaagaagcagaaatttacaattaagcagaaatgactcaaataatatgaagcaattaatggtagaagcaaacctcaacccaagaaagttaggttgagttgtcaggtccatgatttgcttccatgaggtttagcattcaattcttcacaggtacctacccagaatttgttacagtttcctacctcccaaagattgtaggaatcaggagaaagatgaataaaatagaaaaggtaaaccataaaaaaacaaaatacctatgtaatgtctaagatcaaacaacttagataacttaaagttagtttgtgcctcaatacaacttttatcacagtggttaagcattgtcagtcaagaattaaaacaagcatagaatgtgacaccagaacaatggggattcataaaacttaagaaaaacttacagccatctgaacaccataattagcttgcccatctgcagaatttctgctacggagaaatctcaatagcttaaaggtctgtagatgaccagaaccagccataacctaacatcatacatgataaggagtttaggcatgttaatgaatgatagggaaagagacagttaaaaggaactacatgtccacataccacagaaagcgaaagaacaataagatgaaggcaaatctctaatgtgcctcgatccacatagtgggataatccccttgggaaggttccacttatagcggaaactggtttgatctgcaaaccaaataataacaaataaaatacttacctctaatacttgggttatcacaagttagggaaaaccaaattgaatgtcaaacctcattcagaaaatagatagcatagttatacaataactcctgtgcattcccatcctttgtgcccgcaaacctcaatcctgtcacaaaaatatgaagttagaaaaggcattgagctccaaataattatcttacaacatcttcaagtaagaaactgtaagagctcaatatcaaagagccctaggagctcaataaataaattgctacatgttaatagcagaaagtaacagtctttttaattgaattatgtactttatgagtttcataagttcctatgtattctaattccatatggaaagcatcaagcaacttcaaaacaaattgttacaagataatcaaataccctgacaatataaaccaatgtttcatgtaattagatgaattacatcctaccaagagaaatacaagcccctgccactatattgacataagcctgcacaaatacttcagcgtccatttcatcaatatcactagtatcatcaccaagccattgaacaccatttttcacaatatcaggaatctgagactgaatccagtcttgagagggatgaaccctacaacagaccagcttagaaaagttaaatgaaataactatttaatgtaagtcaacactcaacagttgaactagttgaaagaattggcattacctgctccacattatcaaattccgagcaatgacacgaagcataatgaagtcaggcctaacatattgcaagtcaaaatgtgtacgaggaatagagagcttagacacaattgtctctgattcagtctgtcatagacatagataaaagaggaaaaagtctcaacgattaatctaatgcattttcctttatgaatggtgagagacaaatatgaacaagattttaccttcagaaacattaaagcaagagcaataatcgctccaggggcggtgacatcaacattaactgcatttccatccatcatctacagccaaatattagcacatgcggtaaaataattattgtttagaaaagagtcctataagagaggagaatactaagaagtttctaacaattttagtaaagaagtgattactacaaaattaaagtacgcaaatgtcacctgtgctgtagcacgactgtgctcatctgttgaaatcccagcagaaagggatttttcctgatgataaataataaggaaaaaaaaaagaaatattttttaaatcaccaaagcattcgagtgtgtaaagctcttaagaattatactaacatgactgaaccttctgaattcattcagagcatttacaacatataaatgaattaaaactaaaattggagtaagcaaatacaaggactgaaattatgaagaaataagaacctaaaattcagaaacctacattatgaacttctttgcccccaatataatggaacaaccgatcaaccatagcatccataaagccaagtgcatcatagcctcgtccttcatataaagttacaaagttaccaccaagattttactatacaaacattaaattaaatgcacatatacatataagttgttaaagcttttacctactgcaacaagacccagtgaaaatcctgcagaaacagaataaccctccctttcaagtacattatcacctccacttctacgtcctatttcaccctgtagaattaattgtataaatgtgggaacatcttacaaaaacaaaaggagaggcaatgcaatggtattaatgaaaattaacctagtttttattgagagataatagtatagatgattttttttgaaataagaaacataatgcagatgcataaaaagaaggataaggtatcctattaagaaacagcaatacaagctaaaagaaagaggaacagaaaataaattgaacattgaacaaaacacaatagtactggtgattctttcaactgagttttctagcctctttgagtgtgggtggggtgggggggatgtatttgtccataatttgcaatctataaaggtactatgcagtactcagggtatggaaagaataagtcaacttaggttttttctatcaagaattcactcagtgacaacatcccattcccatccacaacagtatgctccaaaaagttcgtattcatttttcgtaaagttgaattttttttttgtttttctaaatttttctgtgggatttatcttgcccactttggcttgtattaagttttcagttttaatacaagctgaagttttgtgtcaaataaataaataaagttgaaattgttgttgtttttttatttatttatttaaggaaaaaaaattgggtgatgcttatgagcacagcataaacagtatcatgcatatttaatcactagagaaacacaaacgaaatctaccaagagaaactgcatggattgaggatgtgcagacccttcgtgaagaagaccaactgacattagagctgctgactgattaacacacaaaaaagagtgttaaattctctaggtggagaaaaccaaataatttaacaaatcagaactgtagcaaaaaataaaaagcacttcatcatgtaagaccaactatgtagctgaggtaagagaataaatatcatctagtttataaatatcaattggtggctgaaaaatttctagcgaaatgagaataactttatagatacctgtagaagggtcggcaactccagctcaggaaaggaggaaggatgtttagcaggtatatgaacataaagagactgtagaagtataaataatgtagtttcatttcagacattcagttaataatgttatgcaataaacacatagacatttagaaatattagaaacagggttatacttgcaaaaaattgaaatcctgtttattacaaatttccatcatacaacatgaccattgacactccacatataattacatttataaatttgtcaaaaaaagatcttaatttttatttttttgtaaaaaataaaaataaaaataaataaataaaaaataaaaaaaagaagaagaagaagaattttagttaaacagtaactgcccaaaatcaagaaattgcatatttactttagaattaatggatccatagtccctctgtaagaagctgcaaggccaagcatcaatcccacagttgtgctttcatgttcctaaaatcaaagtaagcaaagtaatttccaggattaaacatacaatggcaaataaacatatatgaccacaaatatgaacataaaatattacatgggcggcaacccaaaaaactacagtatgtatatatatagtaaaacttgtaatg

SEQ ID NO: 188201 - DNA, 2529 bp, Cannabis indica
aaaaaaaattggcaagcaacttatgaatgaacagtgtacacaatgcgacaccaaagtgagtgggatgtaccacaaaatgtgaaagacgtaatagtcttgtcttccatgaaatggtaaaatctagaagaccaaaaaaaaggatagaagctggctaggaaaaaagaaataacataacaactgcagcaaatgtgaggagttgagacacaataagagaacatggaggaggagaatgcatcaaaatgaaaagaaccaaaagaactaaaaaaataaaagtaaaacaaggaaggaaaattaaacatgtattggagcataagatactgaaaaataacttacatacaaatttcagtattttttttataactattaaaaattgatgttaataatctatttacatacacttactaattagagactacattgaatttagatataaatgtagtccaataaacatcctgtataaatataaaaataaaatgaataattaaaaaaaaaaagtatatcatataaattactcaaagaaccaaattcagtgtaaaatttgcaaaactaacaaatttacaaaatgaaaaagacactctaactatgtataagtgaacacaaacttttactctacatgagatatcggtgtttcttctccgactactgttagattcagtttttacaacttagttgaggagtggacatgaacccctcggctcctgacgataatatccaaatggaaacaactcacgacgtaagccttataggcccgactactggcgataacatccaactggaaccaactcacgacgaaatcaatacagaggatattggaatggacattaacaaccaggacaacgatgccagggacattgaagcaaacgatccaggcgagatggatgaaatgcgactgcagttttttgattccacgtctctggaactggaagcagatttcgaacttaacgctgaagttgttagcaaaggagttttagccaccacctttggtcgaagaaccattgcaagagcacgtattaaagatatactctccaagatatggtcactttccgaaaaatggcgtatgaagactctgaaaccaggtctctgggggtttttctttgatctggaagctgacaaaaaggaagttctcaagaaacgtccgtggatagtcaatggacttctccttaatttgagggagtggcccgaagatggtagatgggaagaggttagtatgttcaatgcaaggctttgggttgaagctcacggcctgcccactccttatctcacatgggaaaacaatagagttattgccaagaaagtgggagattatgttgactttgatagagctattagagcaactatagcttgtcgtgggttccttaagttccaggttgatgttcttctcaaccagaaacttgtagctggtttttatttcaatatttctcgagaccgaaaagagtgggttcagttcaaataccacaagcttccggcgatatgtttcaactgtggtcatttggtgcactcatactcaaaatgcactagacctacggaatacgcttatcccccggttggtaaggccgttcctctatatggggcttggattaaagtgggagttcccatcaaaaattgctttgatccaagaatacctcgcctgaaattacctgaacacgccactgtctctggtgcctccgacgagagggttcctctggcaaaaaatgacaagggaaaaacagtcattgctcctgttgataacaacacttcgaaagcttctgatcaagggcctgctagctattcgaacgttggtagaggacatcccattcagggcattgttggaggtaggctttcaaaagccagtcgcccctctccatttgatttctccaatagtggaaatacttgtttgccacgccctcatcctgcccaaaggaaataattccatccaatgaatcatattcaaaatcatgaaagagacaaaggggtgattgcaagtcttatggctgacatagggcccacaagagatcagttagtggaaaggcctcatgaagaaatttataaatcaagggtgccacatcaacatctagaaccaacatatgtcacgtggcctactgataaacccttgaggaagtggtaaatgaattggttgatccagcccatggcaatgaaggcccagcccaaacaattgttacccatgatactactattttctctaacttgggccattctttctctgggtccaagaagagaaaagcttgtttatccattatccctgttatctcccctgaagttgatatcgttaatttgggaaacaaagcagcctcgtcctcaacaaccttccttcatactcttgatattaacactttcaccccggggagtagcggcaccaagaatggctccaatgcaaaaagaaagaacaagaaaggacacgaggttcaatttttgggatcaaagctcaaccgtgctctaccccaaataacttcaagtaataaatgatgaagatctaaagaagaacttggaactagaactgaacctggtggaagttcgtatagatgctatccc

SEQ ID NO: 188202 - DNA, 3032 bp, Cannabis indica
ttttttgatatgtgtgtgcttattatggcatgaacataagtgtctttgattcttcttggttatatgctattttttttagctttgtgttgtccttttcataagaatgactcatcattgtgtaacaatgttagaaatcagctgattacacttggtgttattattaaaatgtttctttgtcttggtttagttgataatggagataatgcagaggtcgatatatgtttgtttagatactaatttggtattcacttctctttcattgtacagtatgtaccgagtgtaggggattcggttcttggagttgtggtggactctagagcagatgtaagtttgaaatattcaacattttaaggttgcccgtttttcttttatttccagcagtttgtgttctcctgttttatgtagtttctttaaactgaaatcaaggagcttcatgtgtgaacctctatattaatgttaatcacgtgtctatctttgtttattatgataaccctttataagtagatgctattctcatatgaactaacagtgcagtagatctatagactttggacttttggttttggagatatttttttaaaacttatggaacatagtctatgtgaactgataattatcacatttaccattcttgtaaaaaaaccaatcctttcattctttttgctttcagaattttcttgtggatattaaaggaccttcattaggctttttgccggtgcttgcattcgaaggaggaaccaggagaaacataccaaagtttgaggtgcacatgttggcttgttcaaatgttacttcaatatgattttaatggtttagttaggctaaaacattacatggcaggcaggtactttgatttatgttcgggtcgtgaaggcaaatcctggcatgaatcccgagttgtcatgcactgatggtaggtctcgtgatgctacatcaatgatgtccattggtatgttgttatggattattttttgacttgcccaatgtttgttgtgatatagctggtgggaaagcagcagaattcggaccccttaaagatgggtacacattcgagtgctcaacaggcctttcaagaatgtgagatgtggttccccttttgcacgtgccacgttattttctccctttaatgattctatctttttgtaaccaggctgctcagctccccaccatgtccagttcttgaggcctttggaaagaaggtttcctttgaggtagcggttggattaaatggacgcgtttgggtaaattctagaactaccttgtttgtgatccggtttaagcatttctgtttccattactttatagtttccatattgtgccttttttatttcaggtcaatgctgaatctccatcaacaattatcgttgtagctaatgcaattatgaaatcggagtctctcagtgtggtacagcaaagaattatggtggaaaagcttcttcagaccttacatctatcaagttagtctgaacctgttcttctggaactgtagttattaaatgctgaagctgaagcaaaggtttcttctttttgtttttgcgatttttgtagcatgagaactgaagttctacctttattagcaatgagggcctcaatctttgtacggatatggaggatatgaatgatgatttaggctttgatggagggattcacactaaacatgatcttaagaaggaatcatagtgttcaacctttagaattttgtcaaactagtttactagagttttagacttgtggagtctcaagtattttgatatatggaaatttatttatttatttacttttttgaaaaggaaattcattaataaaattaagtacaaaggaaatggtaagtctagctgaatagctcgactagcacaaggaagagagaccccaatctatatagcgctaactttgttcaccaaagcataattggctaataaatgagtaacttaattacatttacgatatacaaacttaatctcagcaatagtcggatgttgagttaagagcctaacttcatgtaacaatccatcaacatctcgacacccctcctctttgtccaaaataagttgtattggacgaagacaatcagactcaatttggaacctcgacaggcgacgttgtagtcctatacagatcccgtctcttatagcatacaattcagcaattaaaggagaagtagtcattggcagaattgtggcagcagcatactgaagaactccattaccgtgaatcacgataccagttgtcgctgatttatccttcatttgatgacctgcatcaacgttaatggcgaccaggcccacaagtggcggtgtctacctacctcgattcccctagtctttttcccgcattattccattagcttgttgaaattcacttagaaattttgcacactaatctaagagatcccctgcccgtgggccataccccccatgaaccacagtatttcgagcattccacagatgccacccaataactaaaaaaagatcaaaagagtctttagaccataccttagcaagtcgctgaaaaatcaagatggtgtgtaaagtaaaaattcgtgtattagaacagaaagcaaaagaagttacacatttggtactttatataaaaatctattatcttcagggagttcactttaaaattgaaattaagtgtaattcaaagtaattaagcttgacaagataattactctagataattgaggggtctcctttacactcttcaatagtaagtgtagtattaataattaaataaaaatttgttattattgctaactaaaaatattaatttggtattttcaaaaaataataaataataacttttttttagggaataataataataataataatttggtaactaaaaaatatttcatattttgaacactttggaccatctctagtgtaaatttataccaaatttaatataaaaaatagactcgatattatattatattcgttccaaattttgtcacatgtgctctattacacaaagtatatattaatccccaaaatcaacatagttattaattttattgaaactatataaaa

SEQ ID NO: 188203 - DNA, 2464 bp, Cannabis indica
attttgttttataagaaaaacaaaaatatcagagaaatagatgatataattaataatgaaaaaagaaacctttatcaaattgaatgtgttaaaaatacaaatataataaaaattacattatttcttctccactttttatactgttgtaacagttgttttttagctgttgtagtggtacggctgattaggtcaaagagattttagaaaggggcatatttgcaccacaaaagttgactaaggcatcccatttttattaaaaattatatgaaactacataaaaatttaaatgttaaagtttaaaaaattataaaaacaaaaataaaataaaatgcttaaaattaatacaaaaaataaattaataaaatacgtatgaacaataatttttttaaaaaaactagttttttttaatgaatgggtacttcaacatttatgggtgcaatatgatgatttttgtagaataagacgtacagcagatcaagaggtaggtaaacatatccatacattcaaatgagttgcttacttggcacacatcaacaatgatagagtcattgcgagccagatgattctgccaatattcatcagcaacttctacatctggtctaccatctccatctttaacttctaaataaggtttgcatttcacgcgattgagatcttcatgcagtccatccaacaaaaatgccagtagctcctatacaataataataattacttaaaatataaaacccagaaacctgaaaagcaactcagaaaacaagaaactttactgacttgggaatcatgctgattaaagccactaaattgaggagcgaaccgagccaattttgatttgaatactcttggtgccactggagttgctccaggagcccataacttccttaacaaatctccaaatgctaaagcaatttcaccctggaatataagtatcaattcaaagttcatctcttagcaattacagtagttctaatgtacatattctcattcaaaaataaagaaataaatgaactttagaataattataataagaaacaagacatacattcatgcccaatggattttcatgattaatttctctaccataatctccaagaaaatagtcaacaagctttggtgtgtgagctaagcactgaagtgaactgttcataaaacaagtatttccaagattttgtagccctgtcaatcccaaagacccagcttcgccagagcttccccagaacgaagcagttcgaaagaagctcgaatttccattaccagttgtaccattcatagaggaatttgccatactagaattttgtactgatatctcatcttttttaccatccctacacttgattgagtctgataacccataaacttgcaagtccaatagaatctgcataaaaaatgcagttagacccaaactataccttaataatgagccacaagggtaagcataatgaaaaccaataaaaaagagtttagttgaaaggaaatatgattctcaattttttaaatagattcataatatgtatcatgtttatgtggaaaagaagaaattaacttgcactatattccaaccgcacaattattcctatactaatatcattatctgaaaatgaacattttaattatgaaaaagacatgatcacatatttgaaataaaacatttcattattttaacataaactcctatatgctgaaacccacttcaaccgtgaaattacctggtaacaaagaaccccaaacactaataataaaaagaaatgaacatgtcccaaacaaaaaataaagcagttattaaaaatcaatttatataatttttaaaataagtaagaaaatagacctctttgttttattcgcttttagtaaaaactaggcctggtatggaagcatttttatatttgatattctacacaaaaagaaatttaaggagatttcagttcaataatcaaataaatagacattacaaaaataagagtaatgtagtgaactgcccgtggaacaccagaatcagttaggctagaataggttgtgctaaaataacataatgaaaaacaaaactggccattaaattcaattttcacacggctgacatcatgaaaaaacagggagataactccccttggcttttatgtacaagagattgggatcatgaacagaaataacagagagagaagtgcacttattcatgtaaaacctacaaatcaagataactcttcaaggcttatgtacaggagattgtccaccgctaagaacacgcaatgaaaagtaccatacaatccagaagaatgcaagtcctaaatctatgcaattacttgaaataacaatatacataaagcagtaaagaaccacagatttttcaaatcaataggtgaactgaacatgtggataaaacagaaagtaggtacataaacaagattgcaagagagagagagagagagagagagagagagagagagagagagagagagagagagagagagag

SEQ ID NO: 188204 - DNA, 1273 bp, Cannabis indica
gaagtctgtggttcaggctattccttcatatgccatggcctgcttcaagatgccattctcctttctttcgaagatcgagtctatgatggcctagtttttggtggggaggaaccgaacattgtcgaaaaatccattggaaaaagtggtcctctctcagtctctcaaaattccatggaggcctcggttttcgttcaatgaaggcctttaaccaagcaatgttggccaaacaagcttggcgcttacttcaggcacctacttcccttgttgtaaccatactcaaagcccgttactttccctgcaccacttttcttgaggctagcaaaggtcgtcggccttcgcttgtttggatcattatctcgtggggtaaggaacttctaatgtcggggcttaggaaatcgataggtgacggtaccactacttcgatttttaatgatgcctggatcccgagttatggtaaaataaattatctcaaacacttatctgacgggatctcaaaagtatcagatcttattacctcttctcaccagtgggatgctttgcgcattgaaaccattttctccactaacattagtcaagccattaagtctataccccttatacccatcacctatcctgataccttctattggccttacacatcacatggtcattacacagtcaattctggctaccacaaagctcacagtttaacctacaaagattatcttacaccttcaaacaccatgataagtcaaagctggtaaaaatctttgtggacacaaccaattccatcaaaaatcaagcacttcatttggagagcctattatgacattctgccaacaagtctgaatttgcacaggaagaagaccctttccacatctacctgctaccgttgttcaaatcaaaacgagtccctagagcatgctcttttcagatgtgcaactgtccagaaggtatggaaattaacgcattttttcaatttaatatcaaacaatataacactaacatgcagggatattcttcatttggctggtactgaactcacggcaagtgagttccaattttttctttgtttgctttggaagatttggcattgcaggaacgattttctccatcataagcgagttttgacaccagccattttaatacaaacaacaacagatttcttagaccaatatcagcaaaacaacaggcaacaaatctcttcgggatctcttcgttcttctgcaacttcggacagtgggacttcatcttcaacatttcaatgaaagctctcagttgatgctgcccagaa

SEQ ID NO: 188205 - DNA, 3851 bp, Cannabis indica
tttttttttcttttgaaataattgcagatttcataaataaaaaaagatgcattcattgaacttatcgcttgttgtacatgcaatacttcatagttgtaatcactgatctatatagagacttacctgagtcaaattgctgacttggatgttgaacctttcagttatttcagcaatttccttcttaggtaccactattcctagaacaaatagatgagaaaattcaatacaaatgttccttgttgctcacaatagtagtagctaaatactgcatttcccttaataatatagcacaaaccagaaagaagatacagttcacaaaaccggacataaaatttatacattgctatggaccgaaaaagcaagcctatgatcttatatgtatcctttatttgcccaaactcaagaactgttaagtaacattttgatgaaaactacaacattaccatttaacaaccactcagacttgttactcgtatccatttttcgcataatggtaattcgctcctctttagtggagcctcgcaaggtaatttgagtataaccagattcctctccccgcttcacaaaagaaccaacatcttttgcccgcccaagcagctaaaatagagcacagatttcccatctttacaaactctataccgaaaactctcaaacaataaagttatcgggtactaacttaccttaggatcaccagcaagtccaagtgctatagcacatacaagggagctcttcccagatccatttggtccaattacaaggttcaaccgaggtccaggtttgcatgtcaaatgactaaaagtcataaaattatggagttgtatctcaataatgttccctggcatataatcatcatcccctctgaaacagagaataagagcctccattttaatagaatcaacagaatataatctcatatatgttaccatcaaaatcactctttttaaatttttagtactacaaaatgtctaccattgattatcaaaaccgtaaccataagacccaaaagtaacaaaaacaacccccgtactggatttagctaaaggatcacaaaaaaaaaaatccctcttcgagtttcgaaagcttaaaatagcataaaaaagagtcatttgagcttgttctaaaccttaaaaccgctgattaaacccaattgttacgaaatcgaagataatggcgaatactgatcaataacagagaatttggacagacctgacgattttgggtcgcttagagggaggttccttcatcgccgaagactattttgcctggattacaactgtacgagcatcaagattccagcaatggtgattgattttgggagagtggagattgaagtgaaagctagggttttgaaaaaattagatcaaaagggaaagtcggagtgagacagttcccaaatcccaatggagcttgaattggcgccaaaatgagtgttgtgtcgtatgaggtaattataacctgtattgcagcacacggacactttcgcttgtaaccaaccaaaatttgccacgtggaaatataatcttcatgaagaaactgtaacataatattcgagtagaatataaactataaataataaagacaatgaaataccaataacataaaaatgaaataaatatcatccacaaaaagcttaaactctttctatcctcaatctccatatcaaaaacactttaccaagaacaattttgtgtcccacatgtcaaagtccatatcaaaatatctaaaaagctatataacaatctccaacttcattggatcaaaataaagctacaatctttaataccttaccaccttcacttaacatttttctttttgcatggccattattaacacaagtttatgttcttcaccaaaccattctccacacattccaacactctcactctccactattcaaccttccaaatttggcctcaatttggtatcaaatgaggcggtagttatagctgctgcagctgaggcagtaaccctggctcgagctgcagctcaagcagctaaagaagctgtggatgaggtaggtggtggtggtgatatgatttggagttggaatgcgaatgttaatagtaataaattggttacgtggagaaagagaagtaaaagtttgagaaaagaaaaaagtgatgaaaatttgaagaactcaactgggtttttgagttcaagagaagaggcagagtattgtttcatcctaaaggtatttttttaattaatttttatactttataatgcatgtatactttagaatattgttatttagtattttaaagtattcaactgaatactttataattagttaacaatttcttaaaaaaaaaaaaacaatttcttaaaaaaaaaaaaagtatgagatctaatattaaaatacaccaataataatatgttacttcttataatattagggaacgtccgtccattagtatttcactttaagatattataaagtttgattttttaagtttaacccctaatgttaaatacaaaacccaatatgaaaaaagcattataaacccaaattatgtttatgagtaagataaagatttagcttagtgtaaagtttttattgtaatcatattaaagagcaaaactagatttagctcatgtttgcccatatgttacaaaacccaatgtgaaaaaaacattatatataccctaaagatttgagctttattggtaaatttgcattgattgttaaaggagggagcaaaactagaagtagctaggcaaagattgaagaatgataaagatcatgagccaacctcacaagagttggccaaggctatgaagatggagataaagagcatagataagatattatgtaaagaaagagaatcacaagagaaaatcacaaggagttacaagagactagtttcttcaattgcttctggttaccaaggcaaaggattaacctttcaagaccttattcaggttcttaattattccatattactatattttgattctaactattgggtttgatttatctcaataatgaaatcattctcatttagtaggaaggtagcattggacttcttagaggggcccacaagtttgatccacataaagggtacaagttatcaacttatgtatattggtggattagacaagctatcattaaagccatacaaaagaaatctagaatggtcaagttgccggtgagtcattgtctcattgtgaatttactattcaacctttttttgtattttggcttatgttactctttagttaccatacaattttaaatttgttacactaaggaaatgtagatgttagttctagctctatcactattagtaagggtgacagttcaagtcacaactcgcgaatttaacacgaacacgactcgagattttacgggttcgatacaatgcaaaaattagacgggtcgtgtttgtgtcttataaatttttcgggtcacatgtcgtgttcatgtcaacaatccaaatatatttaatgacatgatgacactaaaaacaacaatttaacttataacccgctaacaggacacaaacgcgatacaagattttgtggatttgacacaacataaaatttattcgagttgtatttgtgtccgtgtttaataaatttttcgtattgcaggtggtgtttgggtcaataattttacaataaatttgaaaccccaacactacccgaacacaacacaccgacacaaattgctacccttatctattagtttataaaggtccaccctatgtataggcaagtcaattttgtatctagggccttccctaaaaaaataatattaaaatttattgatattacattctactagttagcgatctgtttaagtgatacctttagcaattctcttacgaaaatgtatttttttttttttt

SEQ ID NO: 188206 - DNA, 1706 bp, Cannabis indica
cactcaaccttgaagcaacatcaagaaagatttcttctttgcaagggattgttaggccacccattggatgatcaaacccgaattcttcctcagcttggcttagcaattcttgaaacaaaggttgattcaacaatgagattggaacaacatgtctcttcttgtgttcttctccaacatacaccgcgagatagcctttgggaacgtcgacgggtgttgaaactccatggttttgagagaaactcgagcggcgtaggaggtgcttagcattcaacattccatgtaatcttatagccatgtttgaaacagagaggtttttgtagaagagaggagtgtttgtaataaggcttgagtagagtacttgtatgtgggagtttatgatttagtgacatatatagaagaaaatatgagtaggggaaggtgtgatatgtggagagaaatgtagattttttttgagtggtgtttggttagtttcaagagccatatatgaaatatgtcacatgatcactctttccttctattggtagtgctattcatttattgatgatgtaaccttacatgtgattttggttttggattatctcaagcttcttttcttgaatgaaaaagtagagaaagggggtaagatttatatggctattattacttgtttgagaagagaaaaaatgttgggacaacattaatttcatttaggctttgttgttatatgtgcttgttaagaaaaagacttatttctagacactttaaaaagggaataagagaagggtccatatgggatatgaatcttctaaatagtggtggtcaatttctatggaacttaagtgttttggtcttcccttctaacttctaagctcttttttccattattttttattaagggcatctcttttttataccagttatattatttttattaggatgtataataaattgaaagtaagaaatttgaaaaaatataatgaattatcttctataatatgtcctaccatgtttagatatgagataatagagaagaagataaagattggaaactaagggttactaaattatgtgaccctttgggggtagggactgaaattatatgtagttatagaatgtgtgatcttaaatgagataaggtcatatgtaggacttacatatttacaaacaaagaatatatatatatatatttatctgaatgaaacaaaagtaggtaacaatatagagttcatgataaagataatgatcacgagtatataactttacaactaaagaagctatacctaactgtaatggatatggtaatgaacaatattattgccaatagatatttatttatataataaacacatattaccgacatgatttatctacatgggtatcccttaatattttctagcaaagttaagattttttttgaaaaaaataaagatcaagttttggatttttattttaatcatgcatgaaaaagaaagcttttttgaagcaaaaaaatcgagcccatctccacaaaaatcacatcaaatgttggtaaaggatattttgatattcatgcagaacttggtgaaagtctatatagtttactgtaacttaacaacaaatcaaagcttaataataagtaggccattattcattaaaatgaaattaattcatcaagtcttttttaagtaaacaatgtatattcacagctctcaaaattagtggctagattattttctaaaccattttct

SEQ ID NO: 188207 - DNA, 4368 bp, Cannabis indica
tattattattattataattatgacataatgttttatctttcttgtctctcataacccacactgaaccaaatcctggagagagagaaagcatccaaaaatatcatggtggctggctgcttcatcttaactcagcattgagcttacccaaaatccaaaatcaattcataaacatttctttcaaaaaaaaactacccaaaatatatataagataaaaaactaaaattgtttctattttcgcagatattattgctagggttgtgtttgtttcgatcgaaatttcgaggtacgtgaatgaatcggtgctttagagaaataatcggtgactttccgcatacaatcctctgacccagtttcaactttcccggaaaaattccaggggttataatattttcgcgccgaaactgagactgctacgacgttaacgacgaagaagacgacttttagagattgcagccggattttcagatctgagtttctcctattttctgattagcattattgggttttcttagtttgttgtgattggttatgttagagacggagcaagctcggttcttattcattgatttcgcaccacgtttcatcttgtagatcgagaatctacggctctttttggaaactcagtttttgttttctccctttatttttgttcgccattgttgatcggtcaatcagaatctcgagaatggattacgatgatttgcgtaccataatggatagctccggcgtggatgtttggacccttatcgacacagcaattgctgtagcttccattgattacggcagcgatctgaagaaacgccgagacggtatcgttgagcgtctctacacggcgactgcgacttcttcagctcctactactaatattactgctgggttccgaaacatggaagccgctgatcggagaagcctttctcctcctcggcagtacgacagggaatccaaaccctctgccgtaaaggagagggtttcgccggcgacacctgagtccatcggaagggtggaagaggatgataacgacgatgagggattagatccctatggaggtttgtttgacgatgagcaaaagaagattattgaaatcaaggaacttcttgagcatcctggccaggtttcaccttttaatttaatttgatctctatgcttatactgtagcttatttgggtctgaattggttagtttgtcttgtacagtcggaagatagcttggttggactgcttcaaggtctcgcggacatggatataactttccaagctctcagggtaattcttgtgtggtggccattgctgttttgtttgtttcttttacttttctcatgtaatgttctttaattgctgtaatataggaaactgatattgggagacatgttaatcgtttgaggaagcattcatcaagtgaagttcggagattggtgaagcaacttgtcaggttttgatgacaactttcccctttgtttgagctagcaatgaaaaggaataattattatttttttcttaaaaaaaaatggtgttgggttcttatttggttttaaggctgtttgtttatcaggaaatggaaggatattgtggatgaatgggtaaaattaaataaccctggagaacatgcctctgcaatcatgggtacattagtacaagtcctttttccattttagttttatccttttggtttgaaatttgaacttaactagttaagtgtgtgttctcatttggtatatgattggctttagatggggactcaccgccacagagaattccccaaaatggtcatcaccaggttggagagattccttttgctagttgatttttttcccttgccatttaattttgttctttgggtacaaagttgtggaaaatctgatttctagtcatgctttctaatattcttttgttccttttgattttgttcttaggttcctgattttgcttactctcctaacccacacagtgagtagaatcatattctaaaacttctaccttcatttccgtctgattaatccatttgggttttccctattaattctttttgttttattcttgtcaacacagatggaagttctggatcagagaggaacaattcagaacctgaacgcaagcccaaagcagtccctcccaggagagaagctccatcgaaaccaatcacttcatctgccctacactcagactcagctcttcaaaatgtatggattccaaattagagtcttctaactctatgtttggattctgaaaattggaggaagaaaatataaaatttctgaaaaacataagaaacacaactcaactctgccaaatacttgaaatcttagcctagtttgattagaggtgtaagtctttactcaggtgctgaacattgtaaagttcattgtgtaaaacataagaagtgccaaaaggaaatcattcattattatggtcactaaaattaacttttttttttgacaatttgcagagacagaggagggaacaaagagaaaaagaacaaagagagatgaattttgatgctgcaaagctggcttcagcaaggaaacgactccaagcaaattacaaagaagctgaaaatggtgtgatttactctgcttatttctttacatatgtttgtgtgtctctttttgattaatttgtattgatttctttttttactttgtgttttatttgttgaagctaagaagcaaagaactatccaagtgatggacatccatgagctgccgaaatcaaagcaaaagaatggcttctttcccaagaacaaaggtggaagcagtagttctcttggcaggcactggtgatgcatgataactaaggctctcttttgggtcagctgagaaagaaaaaatgagaaaaggaaaagactgaaaactggttatctttttctattacattttttatgaggcaaacaaagaaagaaaaagctcttcgttaatagtttctattcaacttaataagaaaaatataaaaatttgcccattttctcgggtgagaatgaagccaaatatgtacatactagtgaaagagaaaagaagggcttttaatatataatgacgtttttatgtgaattttaggagttaagctgagatgagattaaaagaaatattgttttatgggtttggataaagacaatgcctccacagtcggacacagacacagttttctcttaacgcaattcaagggtaggggttgggtagggattagaatgggcccatgggttggttgtaatgggtcccactgggctttgtttgaaggtcgtagtcggttggatagataatgggttattgctggaatttacgacctccactctacgtatatttaattgttttcttacattattgtaactttagtgggccttgggtggagttaagtcaacaattcttattattattttctcctttgccgaacattaagggtctgagttttgttttttcttttccctggaacaataggggaaccattttcagacgacaggataaggttttgaaaccattttctttcgggatttcttagggttttgttttaagtcaattaaaacaaaatatgggaaattgaaatttttttaaattatatgtgttacatattttaacttctaagataaattttaagttcctggctacatttgcaagtcgacaacattcatgatttttttaatcttgttctttctgaacattcagcaggagtcaaatcttcttcaattgtactgtacaaaactaattgtattgctgcaatccaattgaacaccaatttgccctttttgtaataatttgattctgattcaaaatccaaaatctatttgagttgcatccttctcaaattgacatgcatatgtaggggtgtgtataaatggctaaacaggatatttaattttaattggattagattagatgtgttatatttgaatattaaattagattcgattgcatgtggatgaggtatccaaaaattaaatacatccaattgaaataatgaatattttcattcagctttaatgagtaattagattttatgctgttataagtaaaaaaaaaaggaattaccccatatactgtttttttatttactttttttttagaaaaattacggtttgagtttctaaagtggttgcagtgctagttacaatagaggtatctatacgattttttattgcatttaggttgcagcgctagttgcaataagtgtttctatgaagaatttcgtaaaaatgcaaaaaagaaatattttgaagtgtaaaacatgataaagccccaaaaaataaatgtatatatataaattaacattagaatcttctttatttatttagattggttggatccaattcaatccaatagatactgtatctaaaatatttaatatatttgatgcgatcaaataaatactaggtctaaaatat

SEQ ID NO: 188208 - DNA, 3051 bp, Cannabis indica
acatttttctcctatacaatgtggctctctggctgctctgataatgtaaacattatataagatgttatcggctatgatttgaacactattagaccaatgggtcacttccttctgttaagtactttgatgatgttaagaaggtgtatgtataatctttgttctcttataactttgtatataacattggcagagtaaaagatcacatttactaagccgttgcatttgaattatctatcgtactgctgttatgtaacttgattttgttaatgctgatatgatactgtctgtattttaataggactttgccaaatataagcagagaagaatttgaaatgatatttgatgagctagatgatagtcgagattttaaggtatggcaacggatatgattgattccacaccactagtttgacttgtctacacattttcttcttcttttcctctaactaatttaatgtcctcccaatattttcccttgttatttggatgtgtaattaaattcattatgtcacttggtttctcgtataaccaatttgatgaacatgcatgttacctatttgtttttgcttgaggtacatttgtgatgataaaatcagcttatcttttcaaaatgctttaatagatccaactctgactaatggcatgctgtgcttctttgttaagtgtctggtctaacacggttcatccttactaatagattaatttggatacatggaaaatttgtttaaaggtaagttttctgataggaatttccaaacattctggtataaacagtagcaaaatagagccaaacagtagcaattatggataataatagctagagaacaagtttgctgggtattcgagagacccaactctttcccaagacctaatgctcactttcaccaaataattctctaccgaaaacccttctaaataatactctcctatgtatactatctcaatacccccattacaatgacccatataccctttttatttatcctaaggcctaacattttctttcttatcctagtgccactttccgtgtgaaaaataggggtacattggtccctgaataattctgggttgaagagccgagcagtatatgtatttcacattgtttataggagttggatctccggatggaattggaatgagtcaacttgtatttttgccttaaattattgtcattagtgctctttaaagggatgtcctctatattgtacatgtttggcaatttgcgtggataaattgcatctgaaaatttagcatcacccatatatgaaaaaatctcattttttttattgggcttcttatttgattgatactatcactgaatgcagatcaacttggatgaatttactgatctttgcaatgccattgccctgaagtttcagaaagaggatactgtaagcgaaaattttattttctatatatggaagtttcttataatctgcagaatcttgaataatgaagaactttaaaactgctgactgacaatgtgttcttgttgcagccatcctgctttgagtactgctcatatttctatcattcagacttatctgaaaagttgaagaaatttattcgtagccccatgtttggatacatagtatcctcaattctcattattaatcttgctgctgtcatcattgaaacaacggtaaggtcctcacttctgataaaatttaaagttacagctctctacatcattaagagatatctgatttcattaagttgatctttgttctataatatgttgcaatcaccctctaatatctttcgaagttatactatttttgcggatgtgggagttattttgtgaactttttcgaagctgatatttcaagaaaatttaatcttaatcttactaatatttaccttttagacatttttttcccttcgtggctatgagttcatttttgtagacttctttttgcatagttactcggtcttggaagtatgattatatatatacatatctatttatataaagtgaaagagggaacttgaatattatattcctttagaagtggagtcctggagatagttccagatgctttgcatcatttgttttgggtgagatgttgtttcgggtcttccatctttccttgtttttttcctattgataatttaaagaagaaaatgcatatttggatttttatattttaagattataaacacacctttttatattaacctactgcttttgtaataaataaaacaatctccttaattactttgttttcttaccatgggagggctcagccaccttgttagacaaggatttgaattgtatagagatgattaacagctggctccatgtgtaattgttttaattgttttgttttgttatggaattggtcacaaatatgttagttttgaaatctgtctgggttttgcagcttgatataacagatagttcagctcagacgttctggcaaggactggagtttgtttttggtaagggctttctgcacttattcttacagaacttcagtaatcgatactctagaaatgggactcggagctttttgtcgtttaaatgatgctcctttcttattacagcttgtgcctacattttattttagccttgctttggttaaagtttattttcagtccaagctgaaagtacattttattactacaaacattcttatctcctttgtttgttttgtcagattacttgaatgatatttgtgctatcttgctgtttgtattaaagctttgatttcttttacaggatggatatatgtcttggaaatgattttgaaagtctatgcatttggatttgagaactattggagagatggtcagaatcgctttgattttataatcacggtgattataggtgagtaaatactattaagtgaactcactcccaataatgaaaacaaagaaagttgagagaagagataatgtatagattaaaagaggaaatgatgtgaagtacaccactttttttttgtcaacttgattaatatataatttttacatttgcagttgttggagaaacggttacatttgcatcccctcaagggatgacttttctttcaaatggtgaatggtatg

SEQ ID NO: 188209 - DNA, 3108 bp, Cannabis indica
atccaactcgatccatttacactcctactcatattataaggatttttacaccatatactgaattttcaattttttttacttttactgttgggcggaatttttttcaaaaatactgtgtaagttttatactatgtattgtattaagttttcacggttatttttagttgttttactgttgttttaattgttctgttgttttacagttgttttataaaaaaaaatagtattttgtgaaaaaaaaaattccaccccacagtaaaattgtgaacttttgcccaaaattcagtacttttgtaaaaaaccctattatattttatcaaaaagtatccacttttgtgagtgagttgcccaatatatcttcaccctttacttaagtctagcacataatttacattaacataagggatatcatggggacatcatctataaaagtgggtatattttaaagaatatggaaataaaggtaaaaattaaaacaaataaagtaaagtgggtattcaatgtaatttcctcaatatatactccatattgctttgtaaaacctaatcaataaaaagctttttcttccatttactttcaaaaccgagaggtttccctgtttaatatggtatcaggtattatcttctcccaccaccaaaaactctagctgcctccttcaaactccagccctaaaataagatcatcttctcccatagctcctagaaccaaaaactcaaccattattgtcgcctccgtcaatgagtctctttctcttctactgccatctccgaccgtcacccatggtcaagcttcttcttctatcactgctaccacctctgacgccattgcgctgttcagtctttgccgcttaagaactctatctcgaacacgatcgatgcaaatcactccacgtttgatccttccactattggtgtgctcggctccgatttcgtagtcgatgtccctagttcaggaccgattggacaacactctacagtaccgttcgtctcttgctctgcgctggtattggtatccatagcatcaccgacccaaaccataatgctttcgcctttctcttcttcaactctggccttagctcagatggttccctcattgacttccattctttctggcactacctcagatttgaccccatcattcacctttccacctctccgttcattactggtaacaatccctttcttggacatcaatgccattttaatgataactctacttttcttgcaaattaaggcctatctcgtgtcttttttgatcgaccttctcaagatgatcgttatcacttgggaactggagatcaaccaaacaccatttcttcgtttctcttgactggttaagataactttcagtcttggaagcgagcgattttgattaatatcactaccaaaattaaaactccattcgttgatgacactttaccccaaccatcgctaaatgatcactctttatccgcttaaaatcgatgcaacaacattgttatgtcatggatccttcaatccgtgtgatgtgaaatttgtgctagcatcatgtttaaaactattgcccgtgaaatgtggataaaccttcatgattgattcaattagagtaacgactctcgtattctccaacttaaaacctctgttaacaatgttaaataaggtgataactcagtcactacttatttcacccagtaacaagccctctaggatgaactcaacgagtatcaactaaatacactccttggacttgtggctgcattgtggtgctatgtaaaaagttcaagttactacactagaggccatattcttcagttcttgattgttctcaatgaatcttacctgggcattcaggcttagatcattctctttgatccttttccaccactgtccaaggttttatttatgttcgttcaacaaaagtgccaacgttatcttcgcaacacgagtatttttattgttgcccctactaaaccaaaccccaatcagccttctcgaaacaagaagtctcggccaacttgttttaactgtcacaaatcaaagtactatttcatccataattttccactaggatatagtgacaaaaagaagaatacatctactcatgctcaggcaaattaagtttctgctagtctaaaggatcccatcgccggctcttcttagctacaactcaaccaaacaactaatttccctccttaattagtaaatccaaggtgctccttctaccagtgtttgtgacccacttttcgtcaagccggtttgtgtttggctgtgatgtattacgttcattgcttattgtttgttaaagataaaaaacattgcttatttttttggcatatttacatatatatatatatatatatatttatatatattgaagaagtagtaattaagtgtactaaagtaataaagtgatgtcaattcatttataagtaacaatcttttaataaaatacattaatgattgttctttcacctaaattttgaatttggatcataaaccaatgagttcctacaaaggaagaactatatatcaactataaagattcggtagttggccgccaaatagtgccaaaatatttattctacatagtcaagatgatgacattgacatactttaagtcaaagtaatttagaccaaagtactatacatttatttattgtatataatattgggtcatataatatttatataaataatatatagatcctgatgatgtatatatccatataatttacgtaatgggagtacggacaccactattaaactttgacatgagttagtactatatattagggttcatgacccatccaaaaatcgtaaattatttcaattaacatgatattattattgcttagaattaacaaatccatttatggtaatgtgtaagcaaaagcattttctctatacataatggattctaatttatctttgagggtggtaggtatattatatatatatacatatacatatatgagtgtatatattttgtgaatgtagtagttgtacttgtatgtatgtgaaatataatataagtcaaaaagtagttgagctatataatatataagtaggatttgataaagtcttcatatatataccgctaatgatgctaatatatataaatatttacata

SEQ ID NO: 188210 - DNA, 3836 bp, Cannabis indica
agagagttagaacttagaaccacggtacttactgaagaggatatagatcattgacaaataatagaaactaaaccgagttaaaagcttcgacaggaaactgacctagccacaagctccttaactgactcggttttgagcccaaacccaagagggaagagtggatcatagtgcggatccccataattcattggcagttgatctactgtcttgaaccatgtcctcggaagcttcccagtgaatccataatccccgaaaagaacatcagcaacaccttgtccttcagatcctggtaaccatgctgccaccagggcatccattgaagcaaggtacggttcaatcacaataggtctacctgaaatcacaactaccacacacttaacaccctgacagacgttgttgataacattgggccccggatcagccattgtgagagttgtgctgtcccctgcagtttcggcatatgggtgctcgccaacaacaacaatggcgtatgcaaagtcattcgacttgacaaactcagcatcagggttctcactatagattacctctgtgctcggatcaactgttgattttatagcgtcagcaatagtagttcctgcacatgaaaatgatgcttatcactattgttgtgaccatactagtttccaggaataattttttttcttacatattaaagattcatggacataagtcattgaacataggatcaagcacatggaacagtaacaaaaataatgaatcgaaacattatttggcagtaatagctttagatgtgtactgaagcccatgcacacctgtctgctaaggctaccttcacgaaaaaaatcaaggacttgcaattaaactgaccccaacccattgacattacatagacaataaaaagaactaataacccaaactacacctgctaagaacacaaaactaagacacctaataactgacctcatgcagaaaattttcatcaggttaccacatatgaaatcatttgattattatgttaagatagtaaatacttgtagtaccaaacttaactgtctaatgtttttaaaagaaatatcggcactgaaatgtgattcatttgggagggtctaagttgatgcagtatttcaagtaaataacagtattttgtactgaattacaagaatgaaaaaggaaaaataccccttgtatttttgtttccactgaatccttgccatgaaattgtccaaccaccacattgataacccaaattatcagcatgagcaccagcaacaaggattttgtgaaccttcttggagaggggtaatatttgattagtttcattttttccattcttcagcagcaccattgattttcttactgcctctctagccaagtctctgtgtgcctaattaagtgccaaatcatccatgtataaaagttaatacagaaataaagggttagtggaagctgcattttgacttcgagcattacatgaaagactaggagacaaacaggtactttggagttttatacaaattcattcccttggaattttgataatccctacctggcttccaagctcgtttactaagctataatcagccaacggattttcgaaaagacccatggcaaacttaacaagcaaaatccgctgcacagcatcatcaattctctccatggagatgataccactattaaccaggttcgtaagatcactaatgaactcactgtagttgtaaggaaccataacctgtatttacagaaccaaatttagagttttatagacacattattcatccactgcgcactttactttgcataggaagaaaaactagataattcatttccttcatttcaaatctgagtaaatatgttaaccactaaccatatcaatgccagcttgaacagcagcttggacagagtatgtagtagttagcatgtggtaggcgtggtaatcctgtcaattccttcccaatctgatataacaaaaccctgagttttcaaccaaagcaccaagtgcaggttaggcatgagatactgtgagtcaatgactgggcctagatagaaatacagtcaagagaaacagacaaatcaaattgatagttcataatgattaaaaaccaaaaacaggtcagaaacatggaagcaatttaatccttgtatctcaactccagattcttcactaacaataagaactcatgttaaagcttggtatggtttgaagtaaaatccttgtcagaattttccttcttttcctttacataccattttattttgtgacacatagtaaagaatataacaatatacctaatccaatgtaactacaaaataattaaggagcaaataaaaaactatcaatctcagtttaattatatgaagatattttctcccataaattattagtatacatagtcaaggatagaaggctctttatccttgcatctctcaaaaatatgagaaatgagaattctctgtaaccccattgctcttttaaagacaaaagtgaatacaagtaagcctacaatgtttgtttggcaaaacattctttgttgtataatttcaaaataaaacattcaaattgaaaacagatgtgttagcatggatcgtaaattgtactcaaccttgaatttaagggtatctttgagaaaaccagtaactagctcacggtttgcgtgcattttttctccattccaactggagtaggaaatcataaccgttgagacacccttgataactgaatcagaataggcgggcatgtgaatgctgagcaagctatgcatatcagtcaaagtgttgttctcgttgatgccttttgttgtcccaccatcacctacaaagtgcttcgcacaagcagcaaccttagtcctgcagatatacaagataacacaagcatataggttgccagcatcaataagtgtttgcgtttccacaaaagaaaaggggaaaaaaaacaaagacaacaataacagcactactaataataacatcataatgcaaaaattaatgaaaataaatcaaattattattgtttttctctttggagacaagaagtcgtactttccaccaacatatggaactcctttccgggaattggaaggaatatctccctgtaaacctggaatgatctctgtcatttcttgcacaattttgtgatcctcactgtagctttcataacacctaccccatcttggatctctgcatacctgcagcaaaggtttcagttcacacaagttatgataaaaacccttatacagcaaaagttgatcttatgttaccgcaatgcatggtgcaaagacataaggaatgccagtagctctgacttctagagcagtagcagcaccaatccttcgaaccagatcagaatccctgtttgcaatagctacagaatatataaaaggcaacaaaaaccaccatatcccaagttctagatagtaaaaatacaaccaacttaaagtttagcaactctcaaaaatggagcttattatgacaaaacaaacaaagagtacgaacttaaatccacgccaattactacttgccttgtagctccaaggccgacattgtgcggaaagattgtagcattatatacattattgtgtccatgcacagcatcaataccatagatcattggaatacccaaacgactagaaagagctcccttctgaaattcgtttatcatattaacccagtcttcagcactagcctcaggaagtggcgtactaccaccaccactcaatacactacctgcaaaaacaaatgtcactcattgattttacaaactgtaagttgaaaattttgctctaaaatgattggtaaggtaaagatttagatttaccaaaaataacaaataaagaagcttgtaaattaggaaactaaca

SEQ ID NO: 188211 - DNA, 2221 bp, Cannabis indica
agagagagagagtataaagcattgtttcccttcttgagcagctatctatcatcagagtagagccactcaatgcatgccacaaaagctacattttcttttctcctttccctaatctaatcaggatatactatgttgtaatatttaaactaacctggtaccagcataatgacgagagcgtcttgcaatgagagtcagtttaaagtcacgtcccgatgcagagagggaagcctatatttaaatagcattggagcattattcaaaaatcaaatactgaaagtttaagaaagggtaatggtaatatatgagacaatagaatacaaatataagaaatttgaaacgtgtccaaatattaagtcacatcctattgaacaaatataagctaaagtataattagagttacactcattgtgacattaaacgcaggtatatgaagcaaatataatatggataattaagatataaaataaggcaagaacatgaattccagcaatttggatggatctttcctcaaacggttgaaatagttctttatctgtatgatattactgtatatcaatggtgtatacgtaaccaaatacccaaatgtgtatgtgattgggcaggtgtgtgttacattaattttcactaatgaactattcaacaatttatttttcaaggtaaagctcacctgtttgaaaaagccgtagactaacgcaactgtccagacagtgttctggagatgattccgtattccacgagttaagaactcattccaaacaaacatggtttcatagagtacatgtcctgatgtactagtgcacatgttcttttgaagactacgcataacatggtatgagtagctgaagaagaagtccttcgtaaggtccactgtgcataggagcttcttgtatctatgccatcagtaaaaagagcacagaattcacagttaaattcaagagcaaaagcttcagcatccttgaattttaatagataacaacagtatgttcagccggcacctttactaacttctccactaaaatgttatgaaaaatataataaaatttctctgataaattcagaaaatgtcatcccagttaaatgtactttcagcgtgtaatattgaatttcacaatgaagtgaaaaaaaaaatcaaaaggcataaccagctaaaactacattattttcatatgcattctaaaattcaaacagcaagggcagatgcctaattgtagaaaggtctagaagataagagagaaatgggcaagtgaaaccaaattaaaaggagaaatggtgaatctttctaagcaaatattcgtagttccactgataaggaccatggataaaataaaatacagttgcatgatgaatgaagtagagacctgttctcatttttagaatctgtgatactggcacgaaatgcagaatttgaaagaggaatcatttcactcttcgacacagcatatactgagtgaccacatattgcaccaatctgtcttctttctgtgatcagaagcatgtaataaggccccaaaaacttgacgaaccctgaaagaaaaagttcaaataaaaaattgataagttgtttctaatgattaagtaaatcacagaagtaagaaaaccacataccaacaatcccgtaacaagtagtaataaatttaagtccacctatggacttgtttccttcatgtatccgcctcaacaggtcagaacattctaattctgtatatgtggttgaatcttcacgaatgtttagttcggaaggatcttgccggtcaatctttaacactttccaatatgttctactcttgtcccttcctatcatgtaaaagttctgtagcagaagaacattaaaaggaaaaatgtgtaaatcagtggaacaaaccagctaaaaagacaaaccaaacaattaaaatcgcttagcaggtcatacacccacagcttcaataaacccttttgacatatgtggatgtggcagtgtgccagcaaaatactacagaattgaaaattgatctaaaaaaaactgtaagaaagaagacaagcaatcagcaaacaaagagatgaacttaagccatctaaacactatttagctaatagcaactctaaatgctgatttgacacatgtaagattcatacttatgcatagatatggacctaaaccataatgagttacaaatagctacaaatgaaataaatcagaacggactacttatgcaagaaaccaaaattttcaagtgaaaaaaaa

SEQ ID NO: 188212 - DNA, 2959 bp, Cannabis indica
ggggaatcaccagcaacattacccaaggcccaaacagcctacaaatgcaaaagggagaaccatgtcagtcattactactacaatattaccatataattccatcttctgaacaattacagtacaaatcaccttctaaaacacttaagagaacatattacaatattttcttttccacttatgttggaaatactttagtcaaaatcaaggtttagcaaagtgagctaggacatgccatttgacatttgtaagcaaaagcaatgtaatagataattgccaacattatgagcagtcacagaaagagaaaataagaagcagctaccctacatgcttaaattcaatacctgctcacgaacgtcatcacttggagaaccaagaagtttgacaaatatagggacagctccatgatcaattacaacctttgtgttctcagaggtccctgaagcaatatttgtgagagcccaagctgcttcaaactgtaggaaatacaaattgtaaaatgggatgcattgagcaagtaaataatatttggtacaagaaattgcaaacctgcagctgtggaaagtcctccctcattagaaattcaacaaaacgaggaacaacaccagattgtataacttcctcaatcggaggacttcgctctgtagtcataaaaaagtatacatataacatattaataaagcacaacggtaaaataaaatcagtgtgcggcatagatatagttcctcaccaatagaaagaagcttcctaaactgagtagtagactcaagctgcaaattcccatcatccgagtctgaccaaacacccgctaccatcgaaggtagatgttctagctgcatttaagaaatgaaataaagttaagcacgataaaaattccaaccattcctcttcacaaaactgatattagaagtactgaagtcaatccaataaaaatgcagtaaaataacgataatagtgtttccataagtcacaagtagtcaaacaaggactccgaccaataaaaattcaagctgcaacataaaaaacaaacttcaaattgatcgaaatgagttggcatcagtccagagtgtacaaaatcaaagttataaattcaattaaacccatcttcaaaaccctaaaaataaatatcaaaacgaagtgaatcagctccaaatgagaaaaggggaatcccaaaccttcacaaaaccctcttagaacgaattcaacatgagcaaagcaatcaaagtcctcatcacaaacaaaaataccaacttaatcatagcaaagccgtagattataaaagtaataaactaaaccctacttaatcggcaaactctgcataaaaaccaatacaaccatagtccatagtcatcagactaccgaaccgaactgcaatgttaatacaaaatacttaatacataaaaatgattagtaaaaagacctttttctcaacagctgaggttggaatggaagtctgcaattgctgagggggaagtccctcacgacgcttcttctgaaggctctcttctctgcgattcttcctgatctccaccatattatcctcacggcgccttcgaccctcctcagcgtcgacggcgaccttatatcggttccggcggacctcagtcctcgcgctcggcctcaacgacatgatgaagtagtggaattcgaaaccctagagagagaagtaagggttttggggagaaaacaaagagagagaaaggagggtttgatctttcgaaggtttagagagagaagtgaagagaagaactgagagattatatagcgcagtgtgggagtggggatagcttagtcggtaactgggcttggatcggtttgaaattacgaaattgccactggttttgaatttgaaggtgagggaaaaagcgtatttgattggtgtgtgtgtgtgagaaaaaaactaaaaacactacaatttcgaaaaaggcctcgaaacgacgacgtattaagtgtttttaaaaaattaaaaccagtgcttcacagctttcttttctttattggtaacatttatatctttaatacgacgtcgtattatgtggatccaatcccaaacggctagatcgatggctaaagttggaaagtacagcggtgttgcggtgttcagctagcggtgacacctttattaaaatttaaaaaatataatataataattcaaatcaataactcattaaaataaatacagattctttatcgaaaaataaaataaataaataaataaatacagattggaaaaaaaaaaaaatttattattatttttgtttttaactgaaaaatttattcaattatatacacatttcttttaaaccaaatgttttattttatttgttttacaaagaaggtagtagtggttttgtttgcatccaaaaatgcataaatacacattaatttacaattatttttgttttgtaagaacattgctaaaggagcttcaacattgcaagaaatagaaaaatcgaagtccctttattttctttggttcgtgtttgtgtgaagaagataagctaatttctgtttaattttttatttttgattgggcatagctttttaagtcgccacccataaaggataattaaaatagaatcaaagtttatatttgttgtaaattcaaaacaacaacaccaagattcacaacacaaattgtagcaaaatcaatgaacttaataatatcaaattatcatatacatattgtaaactcaaataactaaagttgaattaagaggataagaagacaccaaatttatcgtggttttggtcctcgagatcaaatgtgatttctgaccatactccagctaaaaaatatcaccaagctttcattaatggaggagaagaaagaatacaaacaccaatgatagagcttagaaaactctgaactcggatcttagtggacaatctcagcccttctctcccaatcccgagtacacccttaagttcttaatcccaaaggacttgatctctctctctc

SEQ ID NO: 188213 - DNA, 825 bp, Cannabis indica
aaatgttaatacttaagcatcatagagatcagacctaaaaaaaattaagttattatgtaactttaattccaaaaagaatatatatataaacatataaatttacttatagttagctacaaataaagtcaaacaataaacgtttattacactatttttagttattgatattgatcaaatgaaaataaaaaataaataatcaacaaaatattatatatacacatataaatttaaaaaatgattataatcatatagttaaaggtgcctaatttattctatgacaaaagcagagaacacatctggaaaagttatttacaattgaattttgggaaattatttagctgaagacaactcaagtacatctaaagcaaggtagagacttatacattcttctacaataaaataaagaaataaatagatattaaaaaaaaagctcaaagtaaataaattaaattagattacaatgaaggtggcttgaattaccaactataatattgaattcaaaccttagttttctcctccaagcattatttgctcctatcaaaacttagaaaatccaaaataaagaaatcaaattaaattatacacaaaaacaatctattatagaaaaatcaaatgcaaaaaaatgaataataaataaaattgacttgggaacaattaaaagatgaactcgaaatccaaattattaaataattaaactaaagagaaaactactaaattatcacttaaagaaatagtgaggagaagtcaaatgcttaatcaaactattagagataagaaaattaccgaaaaaatgtgtacaattgaaactgttgacgaatttttttg

SEQ ID NO: 188214 - DNA, 1082 bp, Cannabis indica
agagagagagagattgcaagttgtctccactaagggcttccaaagaactagaaatgtccatgatgatggcattattttggtacaaccagggctattggaccatgacacgtcttcgatcacctttacaatcgaattccactaagaagatattggatgggcgatctgtgatggaaacaaggaagcgacatagtttattttaatcctttgtcatggtatcacaaaaatattttttgctgaaagatttgacaatatgaaattttgtcaccgagaaaatgtttggagaaagaatattgggatcagttggagcagtggaatcttgatgagagtggatagtactctctgtatatgtgagattcaaagcaatagaaagggaactagctaaatcatccataattggtatgctaaggaaggaaatcagagtaggagtatctaaaagaagagaattagaattaagagaagtaattccaagaagtagctttccataaacaacacagttggcttttatagtcatctcaaaaggcataaaattaattaagtatgaggtttgttgctaccttgttctaataccataaatgtaccagaaccacaaccctatacgcatgcaaacttgataccttagatttggagctacaagaagcgcgctaaagcttaatggctgggatttgagcttgttcacacacaaaattcaaggaatcaaccaagggaaatcaatcaaatttaatgtataatctctacaaatatagagtataatagaggtaatcatggtaaaacatattgagaagctaacagacgtgacattagggaagaaatttggagttaaagttatcataccactgagatcttcaaaattgcttgatttgaagtctggtaattgagccataactccccttccagagatggctaagtgtcatgggctcaccttaggtagcggaacacccgtgtggcaccttagcttctctaagccaaggtcagccttccaaccatccgagtaacaattggctcatttttcgcgcgaccgtgtgcctcgtgcacacttccgtctctcgaacgattcccgctgagtcatgctctcaagcatccat

SEQ ID NO: 188215 - DNA, 689 bp, Cannabis indica
atatatttataataaataaacgtaatctggtaaaaaaaaattacatttacagagagtaacgggtgtaatcaaaattactttctttaaaaacgtgtgcaacattatattttaaagttttgttgggtgtgtgtgtctacttttcaatatcacatgtatattaatattaggaggaattattacaaatgtaatggtggttgtgatctgactaataaaccggccaaaaagaagaaaattaagaagatttattagtaaattggtcccctaactacaaggcaaatacatgttaaaattaacccattaattaatgacgttgttcatatcatatatatatatataaataaaacgatcaaatcacccatgtgcaccctcctcctccctcctccttcttctcctttttccccaccaccccctttataccccagaaagtaaccctttccaacaggaagatattttcaactaattcataattaattaattcccttacctaattatataaaatgtatgttgaaattgaaaatcacctttattaattttattttacctctctctatgacggttgagagattcgatctttaaaatcttatagattcacgttaatatggaaaaaattgtcgtaaattaaattaccatatatgatagtctatacaaatctataaatttggtggccgcaaatcatcacaattgggtat

SEQ ID NO: 188216 - DNA, 5159 bp, Cannabis indica
cccagtaagaaaggggtaaatttgattggaatgctaaagctcgagcaacaatcaaaatgtggtgatgttttctttccacaacaccattctattgaggtttgccaacacaagagtgatgattaaggactcccttgcttgcataaaaattggtaagtgtgagttcctttgcattatcagttctaacagcttttatgtctgttttgtaatgaaattttacatatgtgaaaaaattttgaattatgtgtggggcatcagatttggcccttattagatatgctcatgtgtatcttgaatgatcatcaacaatggtaaaaaaatatttgcatccttcaatggaaggtaagagataaggtcccctatcgaggtgaattagatcaaatattacagaagcaaaattgttatgagaaatgaatggtaactttttttgcttggataaatgacaagtatggcaattatggacagtggcaagattcttattagaatgtaactgtttatttattttatttgtaatgagtacagaggggcgaccaaggcgtgtgtgccattggttttgagattgtacattacaagaaagaaaagtacagttagatgtagtttaaagaaatcttgctgaatgtaatagagttatccatgtttcctagctgtcccaatcttcgatgtcattgaagggccatgtatatagcagatattagaggtaaaagataatgtgttaagggtatcatgcaatagagcactaacagaaagaaagttgaatttaaatgaaggaacaaataggacattatgtagtgtgatgtgaggattaatgaccacactaccaatgttttctattttgacagatgtgccattaggcaaggtaacatgcttgttgtggacaattttagtaaagtaagaaaaacattgtatatgacaacaaacatggtgagtagcaccactgtctaatatccaagaactaggtgagagaggattgattttaccagtcagattgttaattgcagggttctttgatgttgaagcatcagtggagggctgcagttgttgactcaacatggaaatgagttgctcgaattgagctggtgtcaattgtgaatcacttgtagggagtgagacttggagagtctgaggtcgagaagttgaaccaggatctggttttcgactttgatttgtggaatcagtagacctaggcttgccatatccaggaggaaatccatgtagaaagtaacatttgtccttgtaatgtcctgcttttggcaacgagtatagtgtggacgaggtcttttatttttggatgcttgattggatgctggttcagtggatgcaacaagagtagttgctgcagcagcaacaattggtggaacatggcaatttcccaatgtcctttgcctttcttggtgaattaccatggaaaataccttgtttagagatagataaggatcaatgagtaggtaagagtcattcagtcctttgaggaactacaagatttgatcatgattaatttgtcttgattttgtgcagcagcagcacaagtgcaggagattcttggccttagttgatggatctcatcccacatagtcgtgagtttagtgaaataagcactaactgagtcatcaccttgatgaagacaagtaagtgattcatttagttcaaagattcgaggaccattaccttggttgaagcgattgttgaggacagtccacatctctacagcagtgtccaagtacataatgttgcttttaatttcaggggagacagagtggagaatccatgacatcaccatctaattgcaatgaatccaggagctgaataatgaatctattggtggaggttgagggagagaggcatcaagaaatggagtcttgtttctggcgccaatggagagtttgaaatcgcgtgtccatggctagaagttgcgatctgttagaacaagtgtggccaagactaaccctgggtgattagcattgctgagatagtagggtgaaagaacatcttcgtaggcagggcgatcgattggagtagctcaagaattatggatagtatcgatcggagttgatcgaggattatgaaggggatcgatcggagatcgatcggagttgatcgaggattttgaattgaatcgatcagatgtgatcgagaatttggaactggatcatcagttcgaatttgagtttcttcagatggtagtgatgatggtggagctagattggcatctaccactggcagaggagggacagtggtggtagcagtagctcgtgttcttgccattgatgagttcttgaagctgtaatggagttcttagaacttcacgttgtttcatctgataccatattaggagaattgaattaaaaactgaatttattccattgattggtgagaaaagtgtacaaaggcaatgatacgatatacatatagagtggtaaagacggttaagactagctaccaacaataataattaacttcctataactaataactaacataacctctaatctaataccatctaacaccaaactaagagtacaaggtgcaataccactcttgcaactttcaaaccatggatgtcaccatgtcctctgggactactagtgtactccaggccattaaagcctataaatacctttttctcaaatatgagaaggggttgaaaaattattgtaacacgtcatctcaagaaataaaagtatttctcttttgttactctgaacatttctttaaatttttgatctatataataaacactattaatactaataagaatgctataatttaaatcacgtgattaattttatcacaaacaatataaacgctttgagttgtgtttaattctcagtgttaaagttaatttagggatggtagaacgaaaaatggtgggtcctgtatacgtgttctgtccagtgagaagacagtatagatccatgtttcaacaatttaacttacgaaataaataaataaaacgaaaagggaaaaacattttcacctctctctctctctctcatgtcagtgaagagcaaaacctgcgaagaataacgagaaagatcgaaacccagacgagacggaagaaaaaatgcattcgtttgggtacagagccaatgctttgctcaccttcgctcttaccattcttgcgctaatgtgcgttatagcatccttctccgacaatctcaaccaccctacgcccactgcccaagtccaggttcctcttttcctcatttccttcatcataataatgatagatcttggtgtcaggagtctataattcaatttcgaattttgaacgattcccttttggatttcatgattgaaatttcttaattttgggttggtttctttcaggttttgaatattaattggtttcagaagcaatccagtgggaacgacgaggtaaatgttgtttttttttttctcttattccttcgcgttttaatggaaacttgatttggattttatctatctctaattttgtccgtaaattgctcgatttgtatgtcgacgagtttgacgatgactttttatttgtgggatttaggcgttttacttttgttgcttgtgtttctttttggagaatcacaataaagtttgagtcttcgtttattatttagcaaaaccttgtgtgttcttttaccaatttctatgtatattagcttaatgttcttaaattagggtttgatggttaagtttattcataatactaaaattttgtatacctcgttatgtgccttctcttttgcggtgctttgacgtacttgttctgaattatgctttcggatcaaattatataatccaataatatattgaagaaatacatcattattggtcacattcctataaacacttgtttttctttggttaggggatacgttgtatgagaaaatataaaaacattggaagctattgaggacaatgtagaatttgcttacttgtagacattctttaccgtaccttttttagcaattgacttgaaaaattgttaacttgatcgccccatttcatgtattagctaattttgtaagtagcttaagagaaaacagttgaaagttgggagttactggtggtcaaatttgtagtcttggatacttgtttgagaagtattgggtagggatttgtctaatctagtagcttataaactgtactctttttcctgagttgtgtatttaaattttctttgcaacttataaaatatctgttttatgagaaataataagcttatttcatgttccatttctataccagttttgttagttgtccataagagtcatgatctatgtttgtagtataaaatttattaaaatttcttgatcatatgcaggttagcatgactttgaatatatctgccgacttacagtcattgtttacatggaacacaaagcaggtttgtgagaaatcttttggatttagatatttatgtcttctcctttatcaatctgtgagaatgtgctttttggttaagggtttgttgagatatactgagataaacactaagatcccggtcttaaagtataattctattctgaactgatgtaatttgtgacaggttttcgtcttcttagctgctgagtatgaaaccccaaagaactctttgaatcaggtatggttttaagcttctgggtccatgaatatttaaatccctttgatgtgtttggcttttggagattgtttgcttctatgctgtgcacattcttagtagcagtggtaaatctacttaataacatgatattttcgtgaaaagtttcttcattcttgaattcactcttacagatctctctttgggatggtatcatacctgcaaaggataacgcaagattttggattcacacatcaaacaagtaccgtttcgtcgatcaggtgtgtgtcttacctcccccaaacgatgcctattagctttttgtatattctttacagcatcaaagtttgaaagttttttaatatcattgtgtagggaagcaacctccggggtagagatttcaacttaacattgcactggcatgttatgcccaagaccgggaagatgttcgcggacaagatagttatgtccggatatcgcttgccggcggaatttagatgaaattgactttgtgtatcttgttcctgtaactcttagtgtttttttttcagaagacgaggatatagatgatcatttttaaactagagaagagaactagaagcaagaa

SEQ ID NO: 188217 - DNA, 2277 bp, Cannabis indica
atatattagggagcctcacttatagcggaggaaaatcgtagtaacatattgttactgtagaaacacaataacattaaataaataagacctagtatttctcaaataaaacagcttaaaaacataaatttaggccaaatctgaattatcttgtcgcagtatgcatccccactctctaatgaggtcttggaaggaaaggccttcaaaacctttggtcttataggcccaagtagcaacccagaatttgacttttttccacacctcatgtgtgttatttgctgaattttcaaaatttctcccattcctttctagcaataaggcctagaagatagctaagattgtcgtcgtccacaacctaaaagtccttgtgcctccttttaacttgcattgcatcacttgttggcaggtctggggcatgcaccactggatgccaaattctctaatcagtctaccccatagtgattggctaaacacacactctaagaatttatgggagatggtttccccgctgttcttgcaacagatgcaccagcccggtgatagtgattggtaaggcctgcttctttacaacgagccggggacgtttagcttacctagagcaaggagccagccaaagactttttgaagcaaaaacaaattcttggaaagttgatttgcaagaaaatgtcccactaagttatgagatccaaactcgagaatcttcaagcaatccaaacattggcttttgctcaagtaccggaagaagaacgaataggcttaacctttgtgtcttgcaggtttcttcagtagattctatccaaagttggaagctgacactcatgtagcctcggccaccatttccttgacacttgtagtacttgtagtagacactattgccaaatttagaaacaagttcataagagctttcattcctaccatatgtcctcccaaatctgatcctctcactattaccaatttttacgagaaccatttttaggaagtcatcatataaagcaacaatactttaccatgggcctatagatgacaatctttcaccttccttagtgtcccaaagattctcgagcaccccatatttgattttgataactttatgccacaaaaacttatgtttcattgaaaaccttgataaccatttcataaggaatgttatgtttctcagctccaagttacctattccaaggtccccttgaagccttggcttacatacggtatcccaagccaccaggtgatctaaccccaccatgtcgcctccctcccagaagaagtctcacatcaacttctcaagggtgtttacaaccaatttgggtgctttaaaaagtgatagacagtcagtaggcaatgaaagaggactgattgtattaatatcaatcatcctcctcgagacaagtaagtgctcttccatccatcaagtcgagaaacaaatttggccactaatggctcccaaaacccttgtttcataggatttccacccgacaggaggccaagatacttcagggggcattggcccactccacaacctaagttgagagccaaagattctacttattcccctgtcatattcaacccaagtagctggcttttgttcgtcttcactttcatcctccaacgagcactgaagacttgtacaatattcaataacactcagactgagcttttcacgaagaagaccatgtcatctgcgaactagagatagctcacttcaactttttccttttcaacatggagtccttcaaaggaatttgtttcactaagacgtgtctactaccctccctagcacatccaccacaaaggatataaagagtctccatgtctaagacccctgcacccaaggaacttaactaaacgtctcccatttataaaaacaaagtgagatacaaacaacccttgatcaatttttattaagattttttaaaaaggacaaggtcaaatgtcatagacaaaccattatccataactttattaaaaccttagtaaggcagaggaaaaccaagattacatgtgcaatgtatacttaataacaatgtttaaaattacgcaaataagccttgaggcgtttttgttttgtgaggcgaggcgtaagcctcaaaaattaaattgaaagaatacttttagaagacctaaagatgaatgaaatgtcacaaggcagcagcaaagaaagttttttttttctctattttctttttcattgctccgtggaagagagaagaagagcagccatgctactgataaggagatgtgtttaagaagagagaattatgttttttaaattttatttgggct

SEQ ID NO: 188218 - DNA, 4138 bp, Cannabis indica
tttttttttttttttgaggtaggagtaagtttactcactacaaattcgtaagcgcaatctagcgaagcgattgttcaagctagtgtattcaagtatgcttgttttttttttttttctttttggttggtgggaggttctttgggattgacttttagtgcaaaatataagattcagtttttttttttcgtacttgttttctgtaggagtctgttgtttgtttttcgttgccatggctgctgttgctgcttcttcaggccccagatatgctccggaagatccaagtcttcccaagccttggaaaggacttattgatggtaaaactggatatctttatttttggaacccggagaccaatgtcacccaatatgacaggccaataggatccgcttcttctcagaagtcagcttcaacggctttaggttcttccgtgggatccgctccttctcagaagtcagcttcaacgcctttaagttcttccgtgcacgttcaacaatcttctcagggaccacgtttgcgggctagttctaatgaggacaaggataactatgataggggtaacaatgattcgtcaagatttgatgtaaggagtcagcaggtatagcttattctctttgtgtttcttcaatatttgctccatatgcagttatgggagtcttttgatttcacgctttagtgacctgtttctgtcacactcagttttgtcgcagctgcggtttcctcggttttatttttatttttgtttgtgcatgttatgttatttgcatgtcaaagctgcttcttctgacttaagctacatcacctatatggttttaatcagggtctgttttttctttggaggctttgtttcaaaagttttctagtttgctttttgaactacaataaatcaatcaattgtgtttctttatcaatcaattgtaacaagttgtattagccatgaggtgattgctacgtgataggctttcaacttttgagttgtacaactgcgacttattcaaaaggatttgagaacttgtgttaagcttggtttttttcctttctctattttaaattccttagtttcttttttatttttaaaaaatgttgtattttgcttgtattagacacgcggtggaagtacttcatctcaatttgctgctagaggtggaactgtatcttctgccaccactccaaatgggacactaagtactggacctggaggaccttctagaggacagggaacatcagatgggggaagtggtttgtctcctgaggcttatcgtcaccggcatgaaatatctgtttctgtgagttttaacaaaaccctttttagttatctatgtcatgctttttctctcagttgaattatttgcttccatttcaattcttgtgactggtgtatataagtggattgtttcatttacatgtgaattagttggattatctatgtttttttggtgcttcctcgaaccattaacaatccatgcaggagctgagagggattgcactgtttatatgctttctttttctatgctatattttataatcctttatgtaagtgtattgtgctgggccgtttatattatacatatacaagtaactctcattttttattatcttttatttttttttcagggtgataatgtgccagcaccatttacatcatttgaagctgctggttttccatctgagatgcttagagaggtatccgatttttgtttttcatttgttaattttgtctttattcttcaagggtggctaggaaatcctgtaagtttgctagggtatgtaaccaaaatgttacttgtgaaagttctgtcaatgctagaggtccaatgtagagtttcatacttgttaattcattttagatctgtacctctctttttttttgtcgcaggtgcgatgtttgctcctgggaggagctaatgtcgtacgctgtgctgccccctttttgggagggccctacgtttaatttggagcgcccttgtttggtggaccaattctattgaagggctttccgaatcacctaagtttgtggcggagacttccattggtgtgatgatttagtctgccccacagtcccaatgaaagaagaggcttcctcctactcctgcttgcatctgcaagcaatggtgacctgccaatgggggatgatgcttcttctgacattatttactgagtcaaaaagagagagtgagagacaaaaaaaaaaaaaagaataagtagatcagacatcttgcaaccagtataactgcttattggagctggtggacttttgatttttccaggtacacaacgcagggttttctgccccaaccccaattcaggctcaatcatggcctgttgctcttcaaagcagagatattgtggctattgctaaaactggatcagggaaaaccttgggttacttgtatccagggtttatgcatcttaagcgctgtcacaatgatgctcgattaggtcctactgtactgatattatcacccactagggagttggctacacagatacaagatgaagctgtgaagttttcaaagacatcaaggatagcatgtgtggtatgcaatttctgttgtagttttagcatgtatcatctaaaaattatatgaccagtgtcttcagtgcttttattagataactttctctttctttctaaaaaatgtatttctgctgtagttttaataaattctttgagcaatgcatcatttctctgttgctaagtgttcattttgcttttctgactgacgaggtcaaacataaattagatgtgtttttggtagggatgaataagttatgttttttgtcagttttgtttacatcattatgattatcctctgttttcgttttgttttcccattatatttcacttcaagttatttatttagctcttatgacatgtgctgtcttggtgttccattacttgcattttcacatgcttatattttgctctgctagtgtttgtatggaggagcccctaaaggtccccaactgagagatatagacagaggagcagacatagttgtagccacgcctggccgcttgaatgatattcttgagatgagaaggatcagtctccatcaagtttcttaccttgtgcttgatgaggctgatcgtatgcttgacatgggttttgaacctcaaatacggaaaattgtgaaggaggtgcctactcgccgccagactctaatgtacaccgcaacatggccgaaagaggttcggaagattgcagcagatctacttgttaatcctgtacaagttaacattggcaatgttgatgagcttgttgcaaacaagtcaatcacacaggtgttgactcttgaacatgctgtacttacttcccttttatacacacatatataatgtaatttttggctggatcctttcaatgaattcttctatttttttgaaattgcagcatattgaattactggcaccgcttgataaacacagaagattggagcagatactgcgctctcaagacccaggatcaaaggtcattattttttgctcaaccaaaaagatgtgcgatcaactttctcgtaaccttacacgccagtttggagctgctgccattcacggggacaaatctcagagcgagagggattttgtcttgaatcaatttagaagtggtaggactccagtgcttgtagccactgatgttgcagctagaggattagacattaaggacatcaggtttggctttctcgggttataacccgtatttatgttagaaaatgcttcatgcatgtttctctttgtcctctctcattgacacatggaaataaaacagtgctgttatttttttcacatcacaccttcctttagccatacctttttatccagaaaggggaagatggtgtcactcactacattgtttgtttcttttttctctccagggtggttataactatgacttccaacgggagtggaggattatgttcataggattggaaggactggaagggcaggtgctagtggactggcctatacattctttggtgaccaagatgccaagtatgcttcagatctcatcaaagtgttggaaaggggccaaccagagagtccctccagaaattcgtgacttggcctcacgtggtggtgggatgaacaggtttagacggtgggggtttctgggtggtcggggatgggtgggcggtggggg

SEQ ID NO: 188219 - DNA, 1955 bp, Cannabis indica
aaaaataacttcattcaacaaaaattttcataccaaacatgaaaaattaattattttttttttaattttccacattttccttactttttttctttcctcaccaaaatttaacttccaaacatagcctaagagttaactaaattctctgtttaaggttaaaatctcatgagtctgactaagctaaacactgaatgaagttggaataattggtcagtcactttttaactcaataaataagtaaatcacgagataagtgactcttcacctgctcagatgatgaggcctcctctggcttcttgtcctctcgaatgcggataagtcgtgggaatcgaagtgaaatgccctttataacaattgaaaaaaaaaattgttatgtaagaaacgtattgagcttagatgaaacatgtatagcaaagatggaaaataatacaactctgaactttttttttgtaaggaattctgaacttaaataaggacttgttgaaccttatcagaatctacgatgccaatagcagcacgatggacagggctaatagtcaagtctgcagctttaacctcccagacctaaaagcaagcaacaataaaaatatgaaaactagtagctaataatagttctgttgttcaggttcctattacttatatttaatactggaatattctttacattaaaacagaggttgaggggcaaatattcatgatcacctaaggtaagctcattaggcccaattaatttatcaaaaaatggatctttgaaaataaaaccactttctaaacaaaaggagtacaatttgctcattttgtttgtagcatactccagctgcagtacaaagcatatgtaattatcttagaaaaggtcgtgattgagagatttcttaacactgctcacactccaatcaaattcagaaaatcataaaccacattgagctgcagaatctgcagtcagttatgttttttacagcataggaaaggaaaaaggaggatagggatttaaatgcacaaattgaatttacacaagaagaagcacacgactagatgcttaaactaaagtaggtcgctatttacctcaaaaggttcaaaccaaacatctggattaatgctctccgcatatcgataatatgactgcaattatagggaatgctagaatcagcaagttaaacaagaaaaccacatgcatactcatctatattgacatcattgggataatagataaaattaaacaaataaaaatgcagacctttggtctttctataactttagaacggagactagcagagcgctcttcaagcattgcttcagaaaatccagtgcctaaccattatcaagtaaatttcaggcgaaattaccaatgtgaggtcaagacatttggaagtttcagacaataatttcactcaccaattttacaaatgctctggaactcttcattactagtgtcataacaagcaatgagaaaggcaccatagacaccttaatagacgcaatatgaaagtcagtgatttgtacagttgtactgaaaactacgacaatgaaaaaaaactttaaaggctcataaactgtatgaagacccttaaagcattagaaacttgaaagcaagggcacatcacagggtacaaaacaaaagatatctaaacttattagatgcaagattaagaattatggatgcatcaactagagatagttgcaaggatatagtcacctgtacgttttccacgtccatggaaagcggctatgggtaccaaatccagtgaatccccaatactgcaacatccaataagtaaacagaatcatatttcataatgcttaagcagcagcaactaaggaaaaacactaatttaggacactaacctatctaaataatctttcttcaatttgagccagttaagagaccgcctggatggctcatatgtagcatctttattcattgttttgataattagaccctcgcaactgcaaaccat

SEQ ID NO: 188220 - DNA, 4134 bp, Cannabis indica
agttggtgaattgtattattcttccatctagttgtggccttagagtgaaaatacttcgtgtttcgatctccatatttgtgccacaattgcttcgatctctggcactaaaaagtttcccgctgatctagtattaccgctagacttttctttgcttcatcaaattgttgaaaaagagacctcatcacgtctgtcctagaatttctttacagcagcccgagtagcaacaatccttgcttcaaaatttcttattattaatcctccctaatccattaacctctgcccacaagtagcaaccttcatagtaattgactggccttgaagcaaatttcaagtattctgcacaatcaatccgcacatttcctccttaagccatacatttttaaatcggaacgtcttaattctcctgccagtagtcctaggcaccggatgaagaaaaataagacaatggtctaaatgcccaaaatcaagattgaaaagcttagctaaatggaaccgagacatccaaattgagttagcaaaggccctatccaacgtgaattacacctattggcttgttcctttaccccatcccaagtgaattgatgaccatgaagctctaactcatacaaagcatagtctaaaatagccaattgaaacacctctagcaaccatgacggataaggcactcctcctctcttatccatctgatccataacattattaaagtcctctattagacaccaaggcaacgaagatttatctttatgagtctctaacataggaaaaatagggtcttcataagtagcttcaaatgttggcttctggtagtaagaatgaatataatcccattgtcggtggttgcaaaaccaaatagctggcaaagcatgtccacaaggtattcttataagctataatacactgcaagtggaagttcgtttatccaaatcaaccgtatatgcacctccaatgttcatcctaaatttaaacattgatgcattcacacgtgtaactgaacagtgtcgtgaaactttttgatgttgtttgaaaatcttcacaatattattgtggacagtttctttccacttcgacatagattctcttctcttgcaaaatcgacacattaaccaaaaccttatactctccaaaagagtaataattggcttgtcccttacatccataatagcgtggttaaaactttcacatatgttgttgagtaacatgtcacatttaaaccctctttaaaatgtgcttttgtctattatgttggtggtttagcagccaaccacttgtaatcactctcattttgattcttttaactcttacattttagagtcaaactctgctggtatagtggctcgagctgctgcccaaagcatctatttcagctcgagcccagaatagtccttttggaagtttccatacgtgtgtctcacacgaaagcaactgtgcagggtgttgaagatagattccacaacattttggaaaccctttttcctatcactcatcttagtgaatgggttagggttagtcagtgtcaaatcatccttcaacagctcgaagaaccatgtccaattgctagttgtctctttttctataactgcatatgctattagaaatatgcatttagccccatctatctcaacaactaccaacaatactcatttgcaataccctttaaagaaacacccgtctaaacctatcagtggtctgcactctcttaaaaatccatccttgtaggccttcaagcatataaatactctcttgaatattctttgtccataaaccaggtcagtctaaagcttagctttgctaccaggatttgtagctaacatctgattccaataatcctccaatattgcatattgttgagctactaatccctctaaaggcaacatggatagatataaagtgagattcgtggaaaatgactacggtcaaagagaaggcatcaactatgatgatgtatttgcttcagttgctcatcttgaaactgttatattattaataatttctttagcggcccaaaatagatggaagatctatcaaatggatgtaaagtctactttcttaaatggtttcttcgaggaagaagtctacattgagcaactattgggctattaaataaaagggcacgaaaaaaaagttatgaagttgaaaaaggctttatatggcctaaagcaagcgccaagagcttggactagtcaaattgacaaatactttctagataaggatttcactaagggtccatatgagcatgcactttatatcaaaatcaagaatgaggatactttgattgtatacttgtatgtggatgacttgattatcactggtagcagctcgagtatgtttgaagagttcaagaaagatatggcaaaagaattcgagatgacagatattgggctcatgtcatattaccttggtattgaggtgaagcaagaaggcaaaggtgtttttatcactcaagaagactatgctaaataagtacttaagaagtttaagatagatgattctaatccagttagcacactaatagaatgtggagtgaaattgtctaagcatgacgaaggaggaaaagtggatccaactttctttaaaaaccttgttggaagtttgtgctacctaacttgtacaaggccgaatattctctatgttattggaatcgttagtcgctatatgaaagctccaataacaactcatttgaagattacaaagagaatacttcggtacaagtacgatcaattgtggactattttattcatcctctaataattgtgagatagttagatataatgataataattggagtggagactaggatgttaaaaaaagtactattggatttgtgttcttcatgggaaacacagtctttacttggatgtcaagaaacaacaattcattatgctatcaacttgtgaagccaaatatgttgctgcaacttcatatgtttgtcatgctatttggctgagaaacttgttaaaggatttgaatgtgcaacaagagaagtcgattgagatttgtgttgatagcaaatcaacatttgcactagcaaagaatccattttttcatgaaagtagcaagcacatcgacatctgttatcattacatacgagaatgcattggaagaaaagaagtaagagtggactatatcaaatctcaagattaaggagatatttttatgaaaccactcaagagagaaacattcatcaaattacgaattctaggagtcacaaatcaagtttaaggaagagtattgaaatattaaacttgatttaatatatagttaatttctagaattttcttaactttctagaataatgttcttgtatttactagtttgtttgactactcttcaaatttttagaattttttttcactttttttagtagtgataattatatatgtagaaattagccatttattaatgcgtttagaataatctatagagccctataaatagacatgtaatcccaccattttgtaccaaataaaaaatcacacaatttgagttataaaatatagccgcttccatattattctctccaatactttcttatttcccaacaacaaaaggatctatgaggtggagctgatcacagagggacttgcggactcctgaatcgcagccacttccaaatgagcccaagcaatccactgctcagtagtgtcaatgtagaaatggaggcgttttttgtttggtctatgccagacaagccaagataacagaagaagaggacaaactcatacctggacatatggctatagacatgaataacgaactcgagcttcagagtcgggaccaggaagatacttaacacttttctatttctaaataattcatttaaaaaaaaaaaagtttcaacaatatattatctaataataaaaatttattatttattagttggacttcgccacatctcatcaaacttgtagttgcacagaatctaataaattttttagtgcatataaattaaggaattagtaggtgaatcaagcaatcggtgagctggaagctagacaattaactgtacgaatgacgatgaaaccccattttatttatgaaaaacaaaaaaaataattggaaactcagctgttttgtaccttatactacaaaatgatgatcatctcagctggggatatatatatttaattatatata

SEQ ID NO: 188221 - DNA, 1555 bp, Cannabis indica
aatataaaaaagtcagaatcattttgggtcactctcacgtgtcatccatacgacatattcagaatcttcatattagccaaaggaacggccaagatcgatttagaaagtctttggtttgactgagcaaaacctccataaatatcacaaacttctaagttccatttcccttcctcttacaaaaaaagagtgaaattttcagagatttctccgattcagaattgcatttcatctttcccttctctctctctatatatatattataattatatatatacatacaaacacatatatagttggccatgagtgaaaccatgcataacccaccagaatggatgcaattctacaacccaaacttctccggtggtagcagcagtcaagggccaaccaccaccaccaatctattccccgataatcgagtctccgattccacagtagtagtcacaacagccgccgcctcaactgacctagtcggctccggaagctcaagccccacagcggcggctgcggctgcggctggagccaaccgtttcagtcccgaaggtggccgagtttccaaaccagtacgacgtcgttccagggcttcacgaagaaccccaacgacgcttctcaacaccgacaccacaaacttccgagccatggtccaacaattcaccggtggtcccaccgcccccttcgccaactccggggcccaccctggtggtccgggtttcgttttcggtcttggcggcggtggtacccgtcaaaactttgtaaaccctagtgcaggcatggtcccagctttggccggttacaattaccatcctcagccgccgccgcagccgcagccgccgacgcagaatctttatcagcagcagtacccgttctcactgagcaccggcgccggggacgatgcgtttgttcagagactgaactctggtagtagaccaatgatgggtcacactaataacatgggtgtgagcacagaggattttctgatggcgggagtatcgggctcccaagtggcgggtgctgggccgccgaggccttctttgaattcagggaacgagaatcggagtaacaatttcatgttttgatgacaaattaatttgaagaagaagaagaagaagggaaagaggacattgcaaggttaggaaagttaggtgaaaatgaagacttttagtatcatattagaaaagtagagaccactacactgacccctcgtctagttaggttagggaagagaattcttggccaatgtatatattattatataataataatatgatataatatgtactacgtctcttttagttaaccttcaacaccaaactatatacctgcagcacctcctcttcttgctaggtcttcttcatcatcattgtcgatcgatccatctatctctacaacgtttttttctcaccatttttaactttctttctttgttttattaggctcttcttcttgttcaattactttttttttttctttttctataatttaatttagttacttttcttactttgtttattattatatacttaattagtaagaagagtatgcatgtgcatcactcctt

SEQ ID NO: 188222 - DNA, 3701 bp, Cannabis indica
attttgttatattatatatatgtagatacatcattttccattgatttttgtttctcaatctaatttttgagatcgtacaagtcaaattatatagatatgtatattatatgtactatatatatgtcaaactctagcgggagctcaaaacaaagtcaaatgatatcaaactgtgtcggcaaagtctctcccttaatgtatatacatttcaatcatttgaatatatagacgaaaaaaaaaaaaccatttaaaattttaaagataaaatctcttaattgtaactttataaaatggtgcgttttcaaaataataattataattttttttattggtgcctgctctgccatttgtcacatacaacaagcacgtacacatgtccaaatatatgcaaagagatatgtaagaaaattcgaagaagtttcgagctatagtatacatgtaatatatatatatatatatgtatagatatagtgccgtgtatcatgcaatttataattaatatgatgagtgccctcacaaaagttatatgataaatttgtaaacttaggaaagttgaacaacccaactcttttttgggtttgaggatttcatcgtattaacattaattattgtcttcttttacttcaatatacgtaggtaacagctcattgatggattacacttattttttagcttcactctataggcttacattaattgctaaagagactttgaatacgactcctatatataataaagtaagatgatgatcatgtgcatgcatgaattttcaaccgtcagatcgagcgaatctctgacgtggcaacaaaccaatttaattaatcaggggtaactaagaacgactcataggtatgaacgaagtggctttgtcgtgtcaattaaaaaggaaatattgcacggtttcattagggtttggggggctcaaaatttgaagcaaacagtttcaaacatattaaaaggacacatctacctttttccatatatattcttttgccctatctggcttatatataggtacgtttattacatctctcttggctatatctataaccttgcttgaacaataattatctatcatctatatatgtatatttgatcttaatatatgatttaggaaaagatgttataaccaattcatgataataatttatttatttatttttatatttttgtgtacatgtgacgtgtaccttttgtgtcaaatccttttcgaaggatcaccccatggatccacgcttctgtacaagttgctatccaatccatcttttgtagcactcgaagacaaagccatcaatttccacagcaaagtcaaaaaaacaagcaaaacgagagagatatatagtagtctatataagatatataagaaacatatgtagaagcggatgagatgagatatagagaaattacaaaggccaatgtaccaattaattatttacaaataatattatcaatcatataagattgcatgattaattagacccactgcctgcaccatcatcataatgtacgctactactgtacggagccgcccatgcaagcctcttacttagatgaatggtgtagtatgtacgccatgacgataaaccctagtttgccacacacttttctttattttattttattttattttatttttagggagaaagagacagagagagagtttgccacaacactatgctctattgattgagccccggccttttttgtactatatattcacaattttatttaataatacacatatatatgtgtatatatagctacttataatagtgggacacattaatgttccaaacattgatatttaaaatgaaagactcatgaaacctatacatattatgatccatctacattattgcgatttatatgtgcatatatatacacacacaaaactatagtattattttataatcttatctataaatatgacatatacatattttacctagcttatttactttttcgcttttcactcttttgtgtaagacttttacctaagccatgaaaagagattacaaaaggggatattgttccttatatttagagcacactacagagatatgtacttccccttcccactcttatgtcataattttattatgtgctttaatggcaaaaaaagacaatcttttatacacacaaaccaatgcacttttttttttcttttttgtttttcttataattttcaatttgaccctcaaaagaatattaatgacaagcatgagctagctatataacatttataagttcttattattaaacaacgtgcgtaacatttttaatgatcatgtcaagaatatatagatgcctcatatattaatctatattaattcctatgcagaacaattagttaacaatcgatgtatatagttggggttttgtatgtgcaatgaatatcatttcaaaaaaaaatccaagtgtgggtccaaaaaagcttcaagtactaaaaaaatgatcatacaagggctatatatatgcatattctattccatgcaataataaaatgtatttatatatattacatattaattaatttgggattaataaatattcttttcattgctacttgatcaggggaatccgcaatgatttcaggacaaagtaaattatggtaatatacatatatataaagtcggttggactataattgtagaagtatggggctgcaaaagtttctcaaccatttatataaaaaaagggttatttttattattttcattagcatatacttttgttgttttttgaattttattacagtactaaagcaaaaaggaagaaacaaagaaaattcaaaaaaatcttattacatgaaaaaagaaaaaaaaatccaacaaatcttctaatgattttgagtatattgatgtgattagctgaaaggtaagtatttatcttattaggcctgaaaattaataaagtttttcactttagttaattaaatacatctattaagaataaaaaataagaaagcaataatttgaagagtcaataaggtttatctcattctcacatatgcctccaaaaaatttcctgtatttgaaatgtagtgattgaaatatatcttatatatacgtaatacgtgggcttagttagctgttttggccttcatttcatgtttttcctattaataaaatatgtttttcttttatcaatttttatttaccgtatcataaggagtccaaaaaagtcaatgacagagtgttgatggtcttcaaggaattactgtccacagcttcaaactactctctccaaagggtagtccaaattccaaacttgcagttagaatggaaccaaataggaaaaaaaaattgaaaaaaaaaagtaaaataaaactaattttctgttcacgttgcaaaaggactgtctcttagtgaaaatatatttttgtaaattctatttgtagatcttattgataaacatgtgaaagactctgttttagagtcactattctattaggtccaatggggtggtaggcatgtgcatttgtgtttttctttttctattttttttttccttttttaactttgaatttatataccttgagtttagccacctatatagtttcttttccatacataataataccttaatcatttcattccaaataacaatgcacccctatggcccaaaaacctaatataaatttaaaaagaaataaaacaaaatcatagcagtatattgttcatatcactcattcccatgttact

SEQ ID NO: 188223 - DNA, 951 bp, Cannabis indica
tctcatgattggttgaatatgtatcagtatgcgggagttcataattttccaatcatagtatcggatcatgcacctatcttacttgatacttgtatgtttgtcaataaaggtttcaaaccttttcgattctttgatgcttggacaacggatgcttcttgttcagaggtggtgaagactacgtgggttaatacggatgcgtctccctgtacgcttttaatccgtaatctggatcaaactagaagagctcttcaaaaatggagaaagaatgttattggcgatgtggacagtgtcattcaacggctggagaatagactttgtcaaattcaattgcagcaagtctcggatgctctcttagctgaagaagctgatcttcaaaaaaaaattactgatgcgtggcaaagaaaagagagtgaatggcgccagaaatcccggaatgtttggttgaagcttggtgaccgtaatacgaaattctttcattcatctgctacggtcagaagaagacggaatcaaatatgggcgttgaagaatacaaatggtgatttatgcagcaataagagggacatttcaggtatcataaatgattattttatcaatctgtattcttctactaatcctgtgttgcctcccgattttggagatttattccaaacaaaactgagtaatgaagctaatttgagtatcactgtggtgccatcccctgaggaaattaagagagctgtttttgacttgcatcctcttaaagccccggggcctgatgggttctcgggatgcttctttaggaaatattggaatattgtggggcaaagtttctgtgatgctatcagagaagtctttagggagggacaacttaattcaaaaatgaactatactcatatttgtcttgtccctaaagtggatcatcccagcgtgatagaacaatttaggcctatcagcctgtgcaacttccattat

SEQ ID NO: 188224 - DNA, 2642 bp, Cannabis indica
gaaattacacgtttagccagtatttgggggtcaacagttgtgatgtatgtttagggagttttgcctaaggaaacttgggaaaaggaggttaagaatgatgagttttcaaacttcaaactcagaaacactaggctaaactcaaggaagggtggaaaattaatctggctgctaagcttggctatgaggaactgatgattaaggatgagaaatgaatttcttaagttgactcagtagaggttacaaactaggctcaaaattagaattgtgatgtgatctgtatggtaatgggtgtcaatccttcatttgctgaaggcttcgcgaagagaatttggggacacttggggattgagcttgcagtaaggatgaatatggatttggccatagtgaagtttaatgacaaagctactcgagattcggtgttagagattggtattgtaaaatttgataagacacctatgattgtgcggccttagactaagtatttgaacatattttggttagtttcttttgtacctcagtgtattcgattactaattctaggtcaaaaatattggggaaaaattgtcttattgctataatcagcacaattggcatctatgattcaatttgctagggtgttggttgagatgaagatcatatatgacccacattttatcacttattttatgaatgagaatggccaaatacattatcatttaatagggtacgaatgtctcctaattaaatacaatagttgtaagagatatggtcataacatggctgagtccaagaaggaagggcgcaaggcttggggtgaaaaagagcactactgataagaaacttgcagaaagaattggctactgataagcctgaaaattgagccactatagagaaagagcacatgattgggacgaatggagaggccaataaacaacaataacatgcaactcctaaacataaaaataaggagaactgggaaattccttaaatggttgggaattcaaagataaagggaaggcaatgatagtagataattaaaaaatttagaatacctttaatgctctccaagatcaagtaatgggggatatggtggggcatttcaaccaatatgttgatgatggattgctctaatctaattagttgggatgtttagggattaaataagagagataagttagttaaagtgcttagtctcttgagatttaataaagtgggagtcggtgctctcttagataataaataaaagaaggacaaagtggatcacgtgatgacaagtgtgtttcatggttgggattctcactattccacaataatagagggaaggattttggtagtgtgacaaaaagaatttgttagggtaaagatcttgtaagaaagtcagtagttcttgctttgtatggtttaaattgttggtttacaggttgtgttttgcataacttttgtgtatggattgaacacattagaaaagagggttaatcttttgaagggtctcacaagaatgacattgtctattaagtcttgttcattattggagattttaatgcagttttatatcatgatggaaaaatggggggcaaggccataatttcttcagagttggttgattctaatgcttggctagcactaaattaagttaatcaattaaagagtttaggctccaaattcacatagttgaataagcatgatgggaaggatatggtctactctaagattgatcatgcttttacaaatgaagattgacttgaattattattgaatattgttgttgtgtttcaatgggaagtcatttatgatcatttcttttatttggtttgaaactcataagcagggggatttaggaaggaaacctttcccttttttacaatttttggaaaacatataagaatttaaaaaatttggtgaagggtaactgggataaggcaatgtatggtcgagggttgcaccacattattaaaataatgttgtgactttagcatgttcttaagccctttaacaaagagaaaatatgagatattgagcagggatatcatgctgctaagggggagtttcaacatgctttattgtggctcaagtttgtctgaataacacttcattataggtgactacaaaagaggatggtaacaatttccaatatcattctcattatctttataagagttttcttatttgtaaaaagcaaaataacttggttacaaaagaaagatgacaacaatgcttatttctatgcctatttaaaaaagagaagcaaactgaattgtttctttcctagatgactaaataattataataaggttgtcaaacattttcttgatcacttcagaagtttatgagaagttctagtacaactactaaattgatttaactctagatggggccttgcctagatattgctatgcaactgaggttaattagaaatttagcaaagaggatgttaagaagtccctgttagcattcctggcaccaaaagtttaggaccagacaggtatggctctgagttttataagttagcgtggatggaaattaatgattaagcatcgaaagcaattcttgatttttttttatacatgaaaaattcctagtgagttgaacgaaaaataatagcctcaatgtctaaaactgatatgccctctcaggtaggtgtcagttttaaactgacacttata

SEQ ID NO: 188225 - DNA, 1866 bp, Cannabis indica
ggtatcattaattttgcaagtcatttctctgaagatagctgcaatatgtttttttaacaaatgttttatgaccaacacatcctaatcgatccaccagagtttaaatacgatgtaagagtcattaatggaaagagaacctttccttaaattttcaagttgagtagtaaacatatcaatttttgtagaggtctgagtaacagtgtatacctcaataattttccaaacttgagcaaagatttctgtgccaacaattcgagtaagtttgacattagacatggaggagagaagccaagagtataagagttgctcttgaacttctcattctatgaatctcggactaacaacaccacgagcttcatcttgatcacgaaggaaacttcattgaggttgaatcgtatcagagatatagtcttgaagacgatgtccacagattgtagataggatctgaggttgccataacagaaaattgctatcattaagtttgatagaaactttgtgagaaaacacaactggaataaatgcaggagctaaagcagaagattgagtagccatagaggactaccaacaagaacaacaacagcaaagatgaacaataaagatgaaacgaggaagtgaaaaaaaaaaaaaaaggctatgataccatgttaagaagaatgagagaggatggaagtgtgaattgtatattcattactgaaattatgagcatcaaataaatacaatgtatattaagctgttaggagaagactaacagaattagttacagagttaactgtacaacagaacagaaataactaattaatcctaactcacaactgtacaacaaggcctaactaacattatacatcaaatattatggtcaatggaaatgaattgagtttataagcacaagcagctaatacattatgtcatacatgaagaagtgctagagatgaaggtcaactcttgcattttaattaaagtaccatttgatcaataatgtatacataaacatatccataatttatttgatcaacaatatatatttatattatattgtaaaattatttaatatccctagataagatataaagtcaatgaatattgtatattgaagagaaatcgatctagtactagctagctctggtttcaggtcatctatggcagccgctaagaagtgagattaagagaggagaatggatttgaagtaaataagtttaatttgtttggaaaactaactttattaatttgtttttgtagtgctcaagatgttgttaccatcgatgtatatacagccaaaggtcttctcagcataggccatcattatttagacgtcaggttagttagcactatctctctgtttttagtcttctactattctgccttttcaatttcaaacaattttaatttatttcgtctgattcaacaaaaatgtgtttgtatttatattaataaagaactacaaaattacccgtacatgttacattttctcttctttaatcaaatatttctctaccaaaaaatctgagtttcaaacaaacagtaaatttactttttttaaaaaaaaaaagaaaaaagaaacaaagagcgccttgaacgttccttacatgctcatcacccaagaaggtaaactttgacatcaaattcctttaccaactatatacatgaattcctttttttaagaaaaaaaaaacgatgtgcatgaattgaacatcaaaattaatcaagaattggtgttgaaaatttaagattaatttctttggacctttaagaaggaaagaagtatatacaggaataattattaattgacatgcaagatacttatccatatgagatctgactatctatgttttatttatgggaatgattgatcaccaggtaaagtaaaaa

SEQ ID NO: 188226 - DNA, 6432 bp, Cannabis indica
atttcgaagcttaaattgcataagcatgtgtttgacattatattttcttgctatagtttgagttgccagaagatgctaagatgcgtgtgaagacagtttctgttatccgtaatctttgccaaaaggttagtgcatggattgagtttttatgatgcttcgacactcgacttggatgcatattttgtaattttgacaatgtttctttgaatctggttttgtggttttcttttttcaatattttctcttcattactccttgataaaaaaggatttcttgtttctcatcattctgatcttgtgcttcattttccactgctgaagcctgcttctgtaagaaaaaaatgtttcaatgctgtttgtcaatctgctacgcataagtgcctttgaaattgaaacataattgtttccataaccagagacttctgtttatatgctgtatttgcttttggtgacctggagtttccgaactcttgaaaggcctatgtttctgcacttgtggttacatgatatccaattttgcaatgtttttgaaagaattgttctaatattagggatttgctgtggtgatattctctgattcatccatataaaagctcatttatattgctatgtggtttataaagtaatctctgattaatctatgtagacttacccttgttattgctatttggataaggaagtcaattttttgaggcaaattttatgctgcattgatatttaaacatgaaatgttatgaataatacattgaattatattgggagagacatttgatgttcatttttcactctttccaaaatgttttctgtatttgtcaaatgcatggataaccagtgagttgcttataaccttttctgcaggtaggaattacaattgcagctcgcagatatgaccttaattcttcaactcctttccaaacaacagatatcctgaatctccagcctgtggttaagcactcagttcctctgtgctcagaagccaaggaacttgttgaaactgggaagatccagttagctgaggtgtgtgaactgttctttgagttttcagccccttttggcaaacctgtttttttaagctgcttttggcttttagaattaaaaaagcacttttgagagtgtttgagtaaaacataaaaagatcttcttaatctttaagaccttttaattgaagttgggcttcctagcatctaaaaaagagaccttatttagaagctataagctaaagctttgccaaatgtggggccttaatgtgttttccaattgccagagtttggatattttgagattgggaagaaaagcaaaagattgctttggaatcatctgtatagtatggagatgcttaaatatgaaatatggttgaatactgttgaatattttgcttagaatagaatcaaggaaggaattatatgtcgattgaaatatcgacactataagtttgtgaacatatttcgatatcgatggaatttcaagaaaaattataaatacaacattaatatgaaaagtatgataaaatttgtagaaagacaataaaattaaacaattacaatacgacataaaacataatgaattataacatcattagaatcatacctaatttactttaaaaaaaatcagaaatatgatataatatttattagcatatgctttgttggagtttaaatgatatatttatatagatgtgtactgaggagttcatgttcatgtaaatatctttttttctaagttatgaaattttgcctaaaattatttaattccaactaaaaattggaacccttcaaattacgagaattccctgatatttccaattttttcctccttggttataattagttgataagaaggtcaggtccataagttgaacataactaaggcttgtgttgtctttatctcagggaatgcttagtgaagcttacacattattttccgaggcattttcaattcttcagcaggtagattttatctcggtttcgcctctttgcacttgatttggaactatggaagtatataaagtttttttttttattctttctgattccaggttactggaccaatgcatcgtgaggttgctaactgctgtcggtaagtttccaggattggatcactgcaactttgttagtcctcagaatctacatttatggaacacatctgtatttaattatttaaattgggttttctattgtgtttcaggtacctggcgatggtcctatatcacgctggggacatggctggagcaataatgcaacagcataaagaactaatcattaatgaacggtgccttggtttggaccaccctgatactgctcacaggtagctatttgttccatttgggtggtcactattcttgattttttatatgagaattataattttttttgacgagagaatttgatacattttagatttttctttacacatatgatatgctcgtgtattcttaggctaatgatatgaaaactgagcagcattttgatatatacctgtacacctgtacttaacataggggcttatgaaaatatgaggttgtagttttttgtgaacggatacataggtttattgttgttgatgccaactttgctattgttacgagattggcatctttctccaaatttcataggttattacattttattttagcttgttgaggtgcatactttacatattgttgataacaactctattcgttctctctactctattcatacaatatgctgtggtatatttgcactaacactatggaaagctgtggagagttttctttgcactcttcatgtttcttattatatcactttacagatgttgattttaagtgcattttgtgcaagatttttgtttctactcttgaaacttcagaatgttactacttctagtgataccactactcagaatattgcatgggtctatgttgtatcttttagttgtagtgtattataagcatgagcactatagttttgtagttttgtgtaactggtgctctatgcaactgagttcttgaactgtgcaaacacattcttctatttctttatcagatgtttcatatctttgctctgcaattgcagttatggaaatatggctcttttctaccacggtcttaatcagacagaacttgcactgaggcatatgtcccgagcattgctcctgttaagtttgtcatctggtcctgatcatcctgatgttgctgcaacttttataaatgttgcaatgatgtatcaggatattggaaaaatgaataccgcacttcgttatttgcaagaggccttgaaaaaaaatgagaggcttcttggtgaggaacatatccaaactgctgtatgctatcatgcccttgccatcgcatttaattgcatgggtgctttcaagctttcacaccaggtatatatcttaaattacggtcttttgatttgtagaaaaaataatcaattaatttgttttaaaaactttttgtaaattcaaagagttcttccttctttcatatttgcgcttatctctccatcatgtaagattccagatggaaagttaggatataacagaaatatttcatttgctttatttgaaatgtctagcaaaatactgaaggatcatgtgattgcaatgttgcttattgctacattgaaaatatctagtcctgtacagagttagtgtatctgggtagacctgtcagcttatgtgatgctatttgcagtaaattatgctggataatcactgctctcagtttgaaaacttctttgatttactgccatgactagacgtaaaataaaacttcaatctctagatggtggtggtttggattttttagagttgcaaaagtaaacatggctggtgatggagatattatttggctgtaaactcgggatggttaaatttttcctagtgattaaaaaaaaactaaggaatcaatcactactttcagcttgaaactacatattatagtcactgagtcgtgaataatttatcatacattagaactttaagctgttgatggtggtgctgagaagtgagaacttttagaggtggttttgtaattatggccggtgataggatatggtgtggttatattgacttgtggcgtaaaactgtgacatgaaaattaaggatcttgaacgactattaggcatatgagctgatatgggagccttgaataattctgatgcaaaaattatttgactctggttaaaatatggtgctgttatatatgagactgggacttgagtacagggagcaggttagaattgggataacttaatactcttgagcatttgctaactacataacccactttgattttgtgagtaattagaacattccctgggacttcagattatatacaatagtaccctccagactaaaatattatccaaggggatatcaagagagattctacctttagggagatgtttctattattttcagggacccttggcatatcttttattttattttcacaagaagtggtggattgtgtacttgcatgggcattgctattaggcacaccgatggtgtccaacaccaaggtggcgctttacgagtagttagcggttgttcaatattgttaataaatttaaatgtggacctaatattgaattataccaataacggtatgacacagtagtgcctatgattggtgttattggtggaatttgtagggacaataatagtatctttgctatgtcatccattttctaaagtagcacgttatagtttctaaaagttccttactcttgatttttcccaaactatgaacaatttaaggaattattacaacctttcaatgccaaccaaaaatttggtagcagtggatgctccacaaaattattactctcttctttgaaaccaagcttttggtacgagttttttgaatctcagacgtatctgtgcattctataagcctcagtttgctgcacttttgcatcctgatcctacaaaatgaccatgacatggtgttttccttaacagcatgagaagaaaacatatgatatacttgtcaaacagcttggtgaggaggattcaagaactcgcgactctcaaaactggatgaagacatttaagatgcgtgagttacaggtaaattgatccttccaaggatgaatggatacaaacttcatgctgcaatgcctactttttgagaagtgttcctgttattttacaatttctaaatctgagcatgttatttctacagttgaatgctcaaaagcagaagggtcaagctttgaatgcagcctcagcccaaaaggctatagatatcttaaaggtattacgagagctcatttgttacatgcaaactactttatttgggatgaacatgcattctttaagttcagttttagaggctattggagctgttaatgcttcatatgcttccccatgaaattaaattttcatctgttggcacgtaattctgtctttatcaagaattgcgatcactttattctgacctcgtaagaaaggtttaaaaatctggcattatttccaggatgtcttgcagtatactctgcaatatcttatatattcactatttaacaaattttatgctgcctttaatttctgaattcatccaaattgctagttcttggatttctaggattttttttggttcactgattgtctgcagtgtactctagcactagcatatctgtttgctgatttgatagttggaacataaatggcaggcccatcccgacttgatacaagcattccaagctgctgctggtgctggagggactggaagttcaagtgggtctgtcaacaaatcacttaatgctgccatgattggtgaaacaattccccgaggaggggagttgatgaaagggctgcacgtgcagctgctgaagtcagaaaaaaggcagcagcaaggggccttttgattcgtccgcatggtgttcctgtccaagccttgcctccccttactcaacttctcaacattataaattcaggggcaacgccagatgccgtgaacaatggagagacaaatggagtcaatgacacaaatagtcatccgtcaaatggttcagtagaagtaaaaatagatcaaccatcatcagaggaagcaggccaacctccggtgggattgggcaaaggtttagggtcattggacacaaagaaacagaaatcaaaacctaaagcttcatcttaattttttttttgaacatctgtgattctagataggcaggaacaaatagattctagataggcgttgatgctgcaaattttttcaatgggctcaaggaggatcaattcctaccaaaccttagaagctagaaagaaattgagattcatatcaaacccaataatgccagttttggattgtccatagtgatatttggtctgaaagacatggtgggaatcaatagatggatcataaaatcatcctggtagtctggtatagactgatggatgtgccttgtgtactagcctatatttctttctttttttcgttttgtttttt

SEQ ID NO: 188227 - DNA, 4047 bp, Cannabis indica
cattgtcagcactctcttactttatggtaaaacgattctgagatgctcattttcaaagttcaaatttcctagtagtttagtattaaaagagacaaaacaaatacaaatcagatcaaaattctaaaaatactagcctcacatgaacgtttagagtgcagccaaaatccattaaaggtcacacaattactaacacttccggccaaagaagaacaaaatgattatttttcttaatgggcagaaaaaattgatactagttcacaacatgaaacttgtggactagcaaaatgaggttgatttatgtgaagggaaaaaaaaaaaaaaggactaaaagaggtgacactgtatcagaattttgaatcttagtgcgctccaacgttcaaaaaatccaactaggaaccccgtgattcatcgaacggtcacaaatgtccatgtgaacgtctttaaaaaattgattttcacagacaaccctccaaatcaaaaaacaactgtttttaactttctaaataaaaagggtttgggattggctactataaatattgaaagacagtgtttgagagtcttcagataacatctccaacagcattatattttctcagtcacacttcgagttataaatacatacatatatatatatatatatccatttgccaccatccttttcatcattataccttcttgtgtacgtgaagacacagaataaacccatgtctgctttgaaacttttcttacttttccccttatagaatatgttttctctccattcaaagtcctccatcttctgccagatccgaaactctcagaggttcttccccatttatttgttcgcctcatttttctgatctgagaaagacccacctctcaaaaatgcatattctgaattgggttccagctcttttgttcgtctccgcattctttggtttgtttgtggagtctttgggtgaagcaaccccagtttcctcagggtcggatagagctgcacttcttggattcaaggccaaaatcgtgaaggacacaactgatagtctctctacttggatcagcaaggactgctgcgatggaggttgggaaggtgttgagtgcaatgaagctgggagagtcactgtactccagttacagagaccagagaaagacagttcactttacatgaaaggcactctgtcctcttctctgagcaatttgcctttcttggaagtgttggtgataagtggtttgaagcaaatcactggtccaattcctcaaggcttctcaaatttaattcatctcactcagctatccctcgaggacaactctctcacaggtagtatccctcctggtttaggtcgtttgctcttacttcaggggctttcattgagtggcaaccatttgactggggagattccttcaagtctaggaaatctcagaaatcttcgacagttgaatttggcaagaaactctcttagaggttcagtcccacccactttgcaaaatattcacggtttgcagtaccttgatctcagtcacaatcaactgtgtgggttactcccagagtttttaggtcatttccaaaacatcacctttcttgacctttcctataaccgattgtcagggcagatgcccatttcattgttcagtttggccaagcttcaggacttgtccttgagccataaccagctcacaggtaaaataccagctcaaattgaaggcttgaaatcccttactagtctctctctgagtgcaaataggttcagtggtaatattcctgcatctgtttcaagattgcagaatctttggtaccttaacttgtccagaaatgcactctccaatcctctaccaaatactttagccaggggaatcccttctcttttatcaatagacctctcctacaataatctcagcttggggattgttccggattggatcaaaagtagacagctttctgatgtccacttagcaggttgccaactcaaaggaatcctcccaagcttcaccagcccagattctttgacctccattgacttgtctgacaatcacttcagtggcggggttgcaaggttcttcatcaacatgtcaagtctgcaaaagctcaagctctcaaacaaccaactcaagtttgatctttcccaaatgaatttgccagaagggctcacagtcatcgatttcagctcaaatcaaattgttggacccctctcgaagatcataaacaatgggacaagcagctttttggaggttttagatgtatcaaggaatctaatttcaggcaaattcccagagttcagagaaggattgaggttgaaaacactcaatgtagcaagtaacaagatcagtggagtactccccagttcaatttccaacttgattaaccttgaaaagctagacatttcaagaaacctcattacaggcactatcccaacaagtctaggacttctgataaaacttcaatggcttgacctctccatcaatgccctgtcaggaaaaatcccaaatagcttattgggaattgaagcaatgaggcatgcaagcttcagggcaaacagattatgtggagagatcccacaaggcaagccatttaacatcttccctgcagctgcttatgcccataatctgtgtttatgtggcaagcccttggcaccttgcaggggaaagaaaacagcagagaagagccagtaaaatgctgactccgttgctcaaagatatgctcatgtcatatgagcattttcacatattaattccactattccatttccacctatataatatttattcattttcacatttagttacatcaatgaaattgcttttaccattctagaggatatattagatttacagtacaatccagaatttgtgatgttgagaatataatagatactaatgttatgttagacaggtatgaattgggctaaataaatctaaaattgcataaaacaggaggggaaaaaaacgccataataacaaactgcaaaagttgtctataatgtagctatcaagcattcaagatccaaaaaggacaacttagactacattgccattacgaaccctctatctaccattcttacaatataaaaattttatacataaaatccaaaaaaagaagtaaaatggtcactgcaaccatttccaccaaaatataaaataaactcaatcatcctactcctcatcagctacttcatctacttcttcaacttccttttctgaagcttctttatccgaacctgcttcttcctaaataaatcaaatgcagatgaaaaaaaaaacatcagatataaagaaacaaaccaattcatactaaaaaagaacacaatattgaacaaatccacaatgtcagaatcgggtagagaaaatcaacctctgcatctgcctcagcatttacatcaccatcttcagaattatccgcctgcacagccttgtcatactctgccttcagttctgcagatttgtcctgataaactttcttctcgtcatcagacatacgcccgccactttgcaccaccctcttttacaacctgaatttcattcaacaagttaactacacaacaaaaaaaaaaaaaaaaccctaactaccagggaaaagaaaacaagatcataatttatacaaattatagagaaccttaacaaacatcacaagaagaagaagagaaaaaaaaaacttaccactttaacgtccttagagtcgggattagctgccttgaattcctttctgaaatcatccctggaacatgtgaaaaaacgttagtatcacgtatcctacaagcacatttatgaaatgagtaatccaaagcagtagaaaaatgattacatgaagagaaagaatgcagtgggagggcgcttgcgcttgttaggattattgtccttagacttcttcccaactcttgctttctttgcctttggttctgttgatgagggtttcttcctataaagcccaagaattaataaatacgcattattaatgaagaaattggccatgaaaaaaaaaaaaaaagacaaaggaccaaagtaaaatcaaatacctctcagttgtcttcttgacctccggaggtgcctccacaactttggcatctgaaacgaaca

SEQ ID NO: 188228 - DNA, 4151 bp, Cannabis indica
ttggggagccaaaatctagttttatttttaatatgaaaataggatattcacataaaaaaaacaattattaaaatttatataaagaaaatgaattttaaagaattttttatttattttgaaataggaatgtaaaagaaaaattaaatattaataaattaattcaagtaaaattattttgggtgtaagatgatgaagaagaagctctgtgattatcagaagactgtgaagtgagaaagaagaacacttccgccattgttatgttcaagaaaaccttatgtcaacttcaaaagcacttgactttaacttcttcaccacatttcaaatcaccacactcaaattccccaaatttgttgaaacaatttctgaactttccaagcaccgaaatagctttgcaagcttgttgtgaccatggtcttgttcgtcaaggcaagcaagttcatgcccagttggttgttaatggcggcacaaaaaacaatcttttgggtactaagcttttggcaatgtatgttttgtgtggaagctttttacatgccaaaaatgtgttttttagatacctcgaattgggttttgcctcaccttggaattggatgattagagggtttactaatcagggtttgtttaattatgctttgagattttatttcaagatgttgggttatggaatttcacctgataagtatacttttcctccattgattaaagcttgtggtggtttgaataatttagggttgattaaacatgttcatgagagaattagaatgatgggtttggaattagatgtgtttgtggggagttctttgattaaattttatgctgagaatggttgtatttatgatgctagacaagtgtttgataaaatgcttgaaagagatagtgtgttatggaatgttatgattaatggttatgttagaaattgtgatacaaaaagatgtgttgagattttcttgagaatgagagagagtaatgtgaagcctaattcagttacttatgcttgtgttttgtctgtttgtggtggatcagaagagttgatttgttttggggttcagattcatgggcttgttttttcatgtgggttggaattggattctcctgttgctaacacattgttggctatgtattcgaaatctcaacgtttgtttgaggcttgtaaagtgtttaatttgatgccccaaactgatttagtaacttggaatggaatgatatctggttatgtacagaatggtttcatggttgaagcttcgaattgttttcgagatatggtatctgctcgtatcgagcctgactcggttactttcgcgagttttcttccatgtgtaactgaatctggtaatcttaaacaaggtaaggaaattcattgctatatcataagacatggtgtgtcaatagatgtgttcttgaaaggtgcacttattgatttatacttcaagtgcagaaatgtggaaatggcttgtaagattcttgaccaaagtaatgcagtggatgtcattgtttttacatcaatgatttcagggtttgtccttaatggtatgaattctaatgctttgaagattttcaggcgattacttcgagtgaaaatgagaccgaattcagttactttggcaagtatttttcctgctttttcgggtatgactgctttgaaattgggaaaggaattgcatggtaacaccattaaaatggggcttgacaagttatgctatgtgggaagttcaatcacagacatgtatgcaaaatgtggaagattggatcttgcccgtcgagtatttcaaagaatgcccgaaagggatgctatttgttggaactcgatgattaccaattgttctcagaatggcaaaccagaggaagccattgatctgtttcgtcgaatggggttagaggaatcaagtatgattgtgtgaatatctcggctgctctttcgagctgtgcaaacttaccagctctccatcatgggaaagaaattcatggtttcatgattagaagaagagcattcagctctgatattttctctggaagtgctctgatagacatgtatgcaaaatgtggaaacttgaatgttgctcgtcgggtatttaacgaaatggaaaacaagaatgaagtttcatggaacagcataattgctgcttatggaaaccatggtcaccttgaggaatccctcatactatttcatgacatgttagagaaacgaatcgcgcctgatcatgtcacattcctcggtataatttctgcgtgtggccatgctggtagaatcgacgatgggattcacttttttcgtctaatgaccgagagctatcaaatcccagctagaatggagcattatgcatgcatggttgatttgtttgggcgtgctggaaggttaaccgaagcattcgagacaataaaaaacatgcccttttcacccgaggcaagcgtttggggaacattacttggagcttgtcgagttcatggcaacgttgaactcgctgaagaggcatcgaaacatcttctcgaattagacccttacaattccggctactacattttgctttcgaacattcatgctggcgtcggagactggagaagcgtgcttaagatacgaaatttgatgaaagaaaggggagtacagaaggtgcctggatatagctggattgatatcaacaacataagtcatatgtttgttgcaggagatggaagtcatcctgattcagttgagatatattcattgcttaataaccttcttgaagagctgaggaaagagggttatgttcctcaactttacctaccaatgcatccacaaacattagggatatgaatctttgaagaacattttccccatctttaaccttctgagaatttttaccacctgaactatgacacttacagggttttgcctttttgtaaaatgttctcataaaaatatgaaaataactgcaaattcggttgtattttgttcattttttcaaatagttcaatcatgttatacatcaaatgcaaaaagattgattcgccattaaaatactataattcgagttttgtgtatctgtaattttagagttaatatttgaatgtttaaattattatacttaatttcaacttagtttaaatttaagtaattaaattacaggtgattgaagagtatacatttcagaggaacaaaatgctaaaactatgttgcttagttgctacatttcagttcagttcctcctgcatagataatatcagaagccatttttgctgattgagccaatgagatgaaaaaaaatgttgtctttcttcttcttcttcttccttgtgatgtaagtaacttgattccttggctccttcctttgaaaagatcttcagttcattctgaagcaaagggaatttctttgatggagcaggcagagagaacagaagattgttatgtgcctagaaaaggcggtacgacaactcccttcctcctccactcttgttcttctaaattcgctttttctacacttccattcccaacctgttatgatcgaactaaccgagcagcgaaagatccatcgagtgaatgctttactgggaacgaagagtagaaaccctgtgatgttacgaaatcgcttggaacatatttttcgactgattctatattgaattcctgtaacacaagtagaaagtaggaaactttagtaactgttcttgaacatagcaaggtaaagaaaaacccgagcagaagatcttaccggatgccttagaagaaatgcagctactctatcttcattttcttcgggatcaattgagcaggtgctgtatattagaactccccccggcttcaccaatctaaggatgcataacaaagtacagtctatagtgaaaagaaaagaaaattttaagggtgtaacacaaaaatttctcaggacgccacccatcctagtactactctcgtccaaacacgcttaactgcagagtttttatgagatccagtgaaatggatgtcttcgggtgcatataaacattagtaagagtaattttttgcttcattacttacaccacgactcataactcgaaatagaaagaagggcgaaaccaaatttgacacatacttacgtgacaagtaatttcaacttattatctttatttaaaatgagtctcgcttatcaaaagtgacttattactcgaattcaaaaggggtaaagaaatgttatcgtacaagg

SEQ ID NO: 188229 - DNA, 1586 bp, Cannabis indica
tggtccacacacagaggtgggcagttggcctatgaagacaagattgaacaaggcagaaatattagaccaactaatctaaattaagattgtcacaatcttttttaatatttggaaaatatgaggattagtaggttattaatttccttatcttatgttgtgtacgttattatggtattggaagctaggctttaataaaaatgggataattggcatatagataggttaggcaaatagaaaagtcgtcacaatcaccaagtgattgtcccatataaatgtatataattgaaataattattaaaaatagaaataaagtatgaaagcactagagtgtaatatatgaggtcacttttgagaagtggataagaataataataggaaaaagaggaacaatatcttagaaaagtaaactttatcttctaaaaatttgtttgaatccttatatatatgagataatgcgtgattagccagccttattcattgtttttgtaaactatggtaaaagccaaaaaaaactcttcttatgtaatcttgtctgattcagcaaaagagaaaagtcttgaattgatccataattaattactcttacaaggaatagaagctatgagttaaaagaaaagtgagtaataaataaaaggcaggcaggcaaggcattaaaaatttagaaggaagaggagctagctagatcgaattatataaggctcaatcaataaatgaacacttgtcaaatcacaggtacagtgctgttgctataaaaaagttaatggaaatactgtagagttcacctaacttaaatggtcaagtgtaggaaacccaagttcttattttgaatcacatagagcttgtgatcaatttcttcacgtacggatatacagtaatggatcactctctctctctctctctctgtgttgtgttattttaatatacaggtcttttgttttaattatgggttggtgtatgtgggttcaacacttcaagttgataaataattatgaaaattcaagaagtagaaggcaaaagtttgttgttgaaaatgaaatatgttataatggaagagacattatgcataaatcacatatgaaaaaaagttaataatataacttattattttaggtccacctttataattttcttcatgatggtgatgattgtattcttatcattgtaatataaaaacaaattatatatcatgtggtactaggctatccaaaacaagaaagtgcaacttggtgggggaatgaatatggtgtaagagcatttagtaaaattgattaggtagaaatgcttggacatagttttagtaaacaaagttgttaaataaggtgtaatattacctctcatgaacccactgcactccattccataacctgaaaagaacaaaaccaccatgaatgcttgctcaacaacctcacctaagacacacacacacacaaaacagagagagagagagaaagagagaatcgaaccgtgacagagaaaaacaagagcttttggagaagaaaaaggtaaccatctgcaagtgaagagttgtactcctcttctgttcctaatgtaatccttctccccattaaaaaaaaataaaagaaaaa

SEQ ID NO: 188230 - DNA, 4015 bp, Cannabis indica
atttcaaaccgcattatttttgcaatgcgatgcggtgagggcgattcgagcggtttgatgtacaccctactttttgtagtggtgcaagttgacatactgatgtcaaccctgatgttgtgtgagtgaaaaaacgtctcgaacttatattttttgatacctaagtgatatgttgacatcactaagtcaatatcttagttttggtgatgtcgttcaccagttctcaaagatgtcacttttttgcaaaattgggtagactcaaaacttcataatttgcagctaatttgtcgatattctattttttcgaaaaggtaaaatatcaaagtgtggatttgacttgtcacaagctataactctcgttgactatggaaaattagtcaaatgctcgaggcagaattgaaattggataagaaaaacctagtgcaccaagctatatgtcaacctaggtgtgtgtgctctttaggggacttccaggggcttgttctgatacctctatggcattagagattgcaaacaaggtctcctatcccatttttgaccaataagaagaatgtccaaagcaaaatttatgtttgaggagcagaaacatgtgaatcaggttgtacgtcaacctgggcacaaggcccaactcccatgtcaatctgggtattgtggtcctattttgtctcctaaaagatctcgtttactccctgagatcacttatatcatcttcagaacacttttaggagaaaacacctagaaatgccccagttttgcctgccaaatgcttctatttgattctcaaaaatacttatatctcaattattggtgaaaatgaccaagaagacttcttgggagaaatgtttggaaatggcccaagttgacattgttgggtcccaattttgactcttagatgtttccgtttgtttcccaaaagcacccatatcataattgttgatgaaaatggagaatatgcccataagaatttgcctgaactattgttggaaatggtccaggttgacaacatgttaacctgggcactaggacctagcaccaggtcaacctgggcactgggtcccaattctagccaccacattgattcatttctttcaaaaatatacttgattcctcattttggatggggacgaagagaatgcatggggatagttcttcaatattgtggttggaaaggttgacatacaatatgtcaacctgggtcctaggtgcatcaccaagtggtctgggcaacatgtgctcgggtgctccaaatgtgaagtgttcaaattctgattccaatgcctttgtcatattcgtggcatgtcttatttatgtctaagtataaattttgagccatgtgcactaagtcgtacccaaaaattgaaatcctagttgggaatgttaacctgggtactcggtgaaaaccctaagcgctcgggttgactttcagggtgttattttgcttcttttcatttttcaaatcttggacttggattcttcttgtcttcttagtttagaatattgaaggatgatgagttgaaaataacttggcaggatccgaacacttattttggagttcttcgagtcaagttgggcacctgactagggacctcttccaggtcgacagctatgactagggactactcaattctgtaaatattttcttttttgtcacatgtcaaaaattgatgtccacgtcaccagggtcagttttggagtaaacaaagggtaatgttgacttcttagaaaaggtgtgcttgaattattctcttcagttatattaatttgaataatatttttaaaataataaataaattttaaacatcattaatactatgacttattgttaaaaaaaatattacgatttatattttatctatgagacttcttttttgaaaaactgaattatttttatgttattgacaatagtataaatgtgcattatacgtaaattttatgtcgatagtgtgcataaatgatatagtgaataaaaataaataataaagtgataaaatatatgcgaacatttattttaattaataaaaaatataatgaaattttgtattttttaattattaaatctattttcttaatgaataattattattttttttattatagttaatagatataattaaaaattatattttattttattttattttatttttttaaaataatatataagattgaagtagtcaatcaatataattcaaatatttttgttacataggtgtctactacaatagtgcatacttgctcccttaaatattttgttaaaataatatataaaattcaagtgtccatatacaaattaccattatattagagaccatcaatagttttttcagtacatgtatgtagctacacatatttttgttacataggcttctactacaatagtgtatacttgctccctttaaataacctaagcaattaatcaagcaaaattacaaaatggctgagagaattaaaaacaaagaaccaggttaacccaaaaaaaatctaaaatgaagtgtgttggcaaacctttatatgcttaagcaagcccaattgaagtaaataataatcaaggaaagaggtaaaggtaatctaagataattatcctagctaggtttaaaaaaagaaacaatttcagcccattccatttgaatgggtcaaaacatcattatgtgaaatgggatatttatataaatagaaaaagaggtagaagtgtagaagagttaaacaaaccatgtatggtgggggtatttgtttgataattttgcccataaaagtatattaaaaaagaaaagaaaaaaaatcaaatttgtgagaacatagggaaccttgaaagacatcaatagatattacctaacattcagcaatggcccccatccacctctcatctccacacttgacactccactcttattcatttcattttttcacagttgtgtctagtctattacttggaatgattattcatttcattcagtttatatcactcaccaaatgcacaaaccaaaatacacattaattcaggaagtaaatacttttaccaacaaaagtgtatctttgtactataatataaatatagtaagaaaatatattgaatgacacaactgaaataatataatatattagatatataataattatcttgtctattcaaatggtaacttaattttttcttcttctatatatcaacacaacatatgaaaaacactctcatatcataactctcttcaattgatcaaagacatatgtatgtatacaaaattaaatactaataaaagaaagaaagagcaaaataaacaaaaaaatgagcatggtattattagaaccatgattttccccacctagtctgaatctgtaagcaatggaaaccacattcataaaaaagggtcaaacctagttgttgaccatcttgggtttagcatatatttcagagtcaaaggttcttaaggtcgcagcaccaagacccaagtttttccatctgcctaactttgctaactccaaattaattaaaataaaaataaaatatattaataaataatagtacattaaatatatttatgaatgaatgaatgagatgagtggggtgggaattgtttggatagaatagaatagaagagagagaggagcgtcccctttcatttctcatatatgctttgtttcttcttccctctctctgaaagtggtccagcctttcacacgtgaagacgctcctcttctgcaattatattcacgtgcattatcatactcttctatcttaatcacttaatcattttttatatatttctttttttttattattattataatgtgttttttgcttcctcatactttggctttctaattatggcccaaaaaactttcataaaaaagaagatgaataaaattattatggcccaaaacctttctccccctaaaaataaaaacatttacaagagtggagtggtaggaccttttttttaatgtccatggacaagtgaaattaaatttatgtttattgcaattactaattacacattcccttttgtacgagtttttttttttt

SEQ ID NO: 188231 - DNA, 1856 bp, Cannabis indica
ttattattattattaaaatgattatactgccaaaaacttataagtctatatttctgtaatgaccatcatgccccgagtcggccccattactactgtttctacctaagtaaagtaggtaaatatatataaaaaaatctgaaccggtcaacaagaagaaaacaactcaatcatataatcattaattagaacagttatgatgtacaaattccataatcattaagtggcataacaactaattaatttaattatgtacgaaagagttgcattaaagttcttataggattttagtcggctgcaccatgcacaccggccccaacaggttgccaagtgcttgccaactttatcacaaatggggttttgattcacttgcacattgatccctaattccctatgcattaatttttaccatataatagcttgttttcatagaaaaacttacatcttcaaagggccaaccaaaaacattttttatattacctttttctggtttaagtacaaagtgaaataatgggaaactggaacctagttgtggtttttcttttctttcttctgttagtatatgcacaaatagaataaaaatattattagatatgtctttttatgcgtgtatattatataaaattcgatctatacataatatgtatattatatttatacctttgtatttgttgaaacatattagtttaaaattaccaacttggtcatgtatctatgcgcatatgtgattgcatggccttattatacctcattccctcaacttcctatcataaacaaacacgtacattatatataacagtagtctttagagaattcgttgtttatgaattagagaaagaaaatctatgtttatttagtgtatagcttaagaatgaaatactctttccaaatataattctgcgtttaaaagaaataagcataattcctcatatacgtacactttcacctactcccggtcctattctattagcttcttctttttgttttagccttaccatgtaggcatgtaccaactccatgaaagcttctttatgcacgtttttaacttttctcattttgctttttagttttttttttaaaaatattattattattattattattatagcttctactactactactactactactaatatcataaggcgatatttttaagtgtatatgcatgcacgtttgttttatagtattcttaaccgatgaacttgtatatatatatgtgtgactctccatttgcttatatagttaggtgcctggaccgcacatgcaactcaaagtgcaaaaattctttagtctgataaaaacttcttctcccttagctactttttctcttctctttagagccaaatacacgtttacaggaatcaaactaaggtgaccctttgtcttatttatcatgagaagaacaaatcaaaactagttttcagcttctatacacttaattacaagtttcatgtaatagactggttaatttgttagtagcaactcagtatctgtttcatgtagtttgatttctttggtaaaatatttctggtttcaatcagattttttcttcttttcatgtcattcattctagaacctttatcataggactgtatccatgcatatgcagaacacagcagtaattctatgggaatcaaatactttgttctcttttctagtgatgcattagataagctagctagtgatatagatatttttagtaacagaatcagttgcatatattttttcctgaataaactgcatgtatttgttttctttataaacaggtgttaaataaacactagttctaggcaagaaaaacattgatcagcaacaagaaaatgactttggcttcacctgagaaagttgttcttggc

SEQ ID NO: 188232 - DNA, 4933 bp, Cannabis indica
cagttggggtgtggtcggtgagacaatgatcaatttcgtgtggttcctttggtgattagtgccattggtttttgctctccattttgtcttgtctttctttatgtaagggtcttggtgttttatttgtttctaataacattatttttacacccctatttgatctctagtctgttttggatttggatgcataggttattctaaaatttttaccgatgtcttttgacatcttattttatgattcttcgagatttattttttgaaaactttaacatggtctatcatgattttttccattattgtagtaatggggtgtctttatccaatttttattagaggatcttaggttgtttgttattgataggtgtgatttgtcacatgttcatttagagtgaaaatctagttttcttcacattattttgatgcttcacatctggcggcttataagtcatttagttgaagatgatattaggatttttgttcttttttaatataaatagcttcattagcctatttttattgattttgctcaataagcaatatatacatgtaatagacttagggtcggcccaccagttctctcttcctagagcttggtcattaaccaatctcttgcctgtttaattctctcttgcgttttctctcttcatctggtgtctggtgtttgtttcttctctctcgatgtgcttcgtgtctgtgagtctttttctctttcgtttgggtcatgtgttcagtctcgttctagtttgtgtttgttattttcattcttagtctctttttctgttttcttttctttcctttctctgtccgttttcgtgtgtggggtctaaggtctctgtaggtggggttggtcggttttgtccaagattgtgggagttaattattgatataggttgttggtttgtcgtttgctgtctctcatttatggagatagttaatgttgctagtgttgctaaaggcaatgttgtctcgtgtgtggatgcaactatctctctcaatccgagtgcctcttctcttaaggctttgacttctttgtgtttggttgggagagtggtggctccaatggctgttgatgtggatgacgtcaaggaatttgttaccaagagctggcttaagagggtggctgtctttgacatggctgaggtttcgacagtaccgaactgcttcaaactggggttcgatcgtgaggaggacaggcaatgggctttagatcaaagtccttggtcttttaaaggatacacatttgctctttctgcttggaagtcaggtggtgaaggctataacccagttgataagatctgtttgtgggttcaaattcataacttaccacatgaatacttctcggtggacaatggtaagatcctggggggattaattggcaaggttcttagagtggatcttgaggaagataaaccgagtttgtggaatctctttttcagagtccttgtggagttaaacatagaaaacccactcacttcgggttgctatttcgatcttgcttctggtgtgaaacgctggatccagtttaaatatgagaaagtgggaatcttttgctatttctgtggttgcctggggcatcaacgacggggatgttctttatcctctccgtccacggtggcgaagcttgatggttctccatatccaatgttcggtccatggatgtccacagcttccaagtatcgtgatgtttttactagtactccgattaaaatggggacggaggctgcgactaaacttcttgaagtcgaagctttggaggttgggacggttgctgtgcctcgacttgccggagccggagctggttcggaaacagctgggtttcgtggcccgaggcttgtagtgacaaggacggataatgactcatctgggcatgggaaaagtgtgcagaaaaaatggcttcccaagatgaagaggactggctttggtcgaggtagagccgtaaatggtaataagggtgaagttgatttgaattttggtgaaaaggcttctgcttctatgccttgtttagagccgttgactgggggctttatagtagagagcctaggtggtctaaatggtcctactattatggaaaagccacctaggattgtgacagaagcttttgcaaaggacactttgtccattgggccgactgggccgactgggccgattgggccgattgatatgtgtgtccaaaagggttcttttggtagtaataatggtaatgggccttttaatctaaggaatagtgggcctaatattgttaactctaaacaagtgggttcttttgaaaaggttattgagaaagaaggatgcttccaacccgaggcccaaatggaagaagtggatgttcatgaggcggcccactcttgcatgggacaaaaaggtgatttgtcaaatgtggttaaacaaattgatggtggtgatggaagcttggccgacccccattgtgaggaaggaaaagctttaagtcaatttttcaaggctcaagaagacttgctttatgacttgaaacattttgggaagctagatttgtttgagatcaagaggattggaggtgacataggtgtgttgaccacctcggaaactaatgaacgaacaactccttttaagaagaggaaatttgaaggatccgcttctttgtgtactagacctcacaagactatcaggactcatcctgatgtggttcgagactttccttgggacaccaaagagaaggatcgtgaatctaaggtgatttatgatgacccatctgaagaagagtctgattctatgagctgcaatgaaggaattatgaagaacccactgataggatcctttgttattgaggattctggatccagcttatcggtgtactcgcaaaaccctgtggaggagaatgtcaaaactcctccacaggcgccatgagaggggttgcttggaactgtagagggttagggcagacctctacagttcgcgaactgaagtccctgatcagagcgcgctctcctgattttgtgtttctatccgagcttaaagtggatgcgacgcctctggtacgtttacttagatccctccatttttactttaatattaatgttccatctattggtacgcggtattattttggcttggaaagttggttttaattttgaatgcatttcttgttctcaaaatcatatatctggattgtttattcggatcccccttcaaatccgtggctcctctcgtgtgtgtatggccccccttatcttcatgccaagaaaaaattttgggcggagctaatgacccttggagataggtttgggggtccttggcttatttttggtgataccaactttgtgcttagcaactctgaacgagaaggctcttcaggaagagacccctttatccctattatctctaaccttgttgattctagagggttgatcaatttgtgtattcaaggggacaagatgacttgggataaccaccggtcagggggtaggcatgtgaaatctgctcttgacaaagggatagtgaatggagcgtgggtccttctgtttcccaaagctgttgtttgctcttcccaaacgagcaactcggaccatagacccctgttcctggatacgagtggtccttctcctaaattcaagagatgtttcaagtttgaagaaggatggacgagggatgagagaagcaaacttgtagttgccaatgcttgggcctcaattaatcatgcttgggctcctgcccgagtattcaaaaaggtgggagctactaggattgctcttctcaattggaatagaacgcagtttggtaagattgattgggtaattaaagacctggaacgaaaactggatagtattcagaggctcccggcaggtgcccgggattggaagacagaatgtgatgttcggaattctctgaatgaaatggtgacccgaaaagcgctctactggaagcagcgagctaggatcaattggctcaaggaaggtgacagatgctcgaaatttttcttcctttcggcagcaattagaggaagaagaaatgccattgaaagtattttgaacaaggacaatgtctggatcacggacagagacgctattggcctagagtttactgatttcttcaagagtatctttgcgggatcagacttggaccagaacctggattgcaggaggttgttcccagaaaggatttcttttgaggaccaagaggggtctcttctccacccctctcgggacgaaataaagaacactttgttcgctatgaatagtcacaaggtgccaggtccggatggaatgtcagttctcttcttcaaacattactgggagtttgtgggggatgatttctgtgatgcggtttcggacttcttcaggaatggtcaaatgcataaaggtataaacactacgaatgtagtgcttatccctaaggtcccgaatctgaagagacccagtcaattcagacccatttctctttgcaacgttatttataaggtcatttccaaaataattgcgaatagaatcaaaccaattttaccttctattatttgccctacccaagcagctttcgttcctggaagaaatattcaagataacaatgtgattgttcaagagattatccattcgttcaaacgaaagaaaggtagggagggcttgtttgcaatcaaaattgatcttgttaaagcctatgacaaacttagttggaggtttattgaccatgttatggattgtcttggtttccgttcgaagctgcgctcttggattttccaatgtctttccacatctactctcaatatttgtctcaatgggggtcaagtaggaaagattacgcctttgtgtggccttcgccagggtgaccctctctctccctatctgtttatttgtgctgctgaggttatctcgagacttttggatgaagctctgggtaaaggcattatccatggaattaagctttctagaggtgggccgactttaacccaccttctatttgcaga

SEQ ID NO: 188233 - DNA, 1896 bp, Cannabis indica
atataataatgacttgtatttaattagggtacatatatagaatagtactcatcagtctccagcctaggatatattaactgactataaccctaatttagggtataacttaattatgcatatggtgtgtttcctattaatttcttttttatatatataaaaaaatttattgatcagaactaaaaaattaggctggttcatttcttactctctctgttcattttagcaaataactgattttttttagggacttttacactttaaaatagtttttttattattatttttatggaattctacgtagaaacttctattgcaattaacggagcaacttaaatggcaatcaaaatccgtatagcaacctatatagaaactaccagagaaaccattttagaaactcaaaaccgtaaagtttaaaaaaaaaaaattaaaaatagtatatgctgtaatttttctttttttgattcattgaaaaatttgtttattctatcctatgtatctcgaattagaatagaggtcaagacatctattccatgcaggtcgagtcactttaataaacttgatcattttgatatctattaagtcattaggcgtagatcggttttgatatgcaattcatgtagattctttctttggaaagggactgcagatttttagtgggtcgggatatgtagcatgacatatgatttatgtaagcctcgttataaagatcgaaggaggattggaatttaattagaaagctattgcagtggtatcagacgggttttggcaaatatatatgggcggtagctaccaaatacaagatatattgtgggtaaaaattaatgagtgcataatgtgtatattaaagtatgaaaatttgtgggattaattatatccttacttcactaagtagcaggagaaattcaagaaaatcatcaatctccagcagttcatgttgattattgttgattaggtatacaatcaaacaagatatgaacagcttgaatttcctgaacaaaatctatgtgtcctagtatggtgatgtgtggggtcgattcatatcactccaaagcataaatttatattgtatggttttcaacatcaatttgaagattattgtacagaagcaatggaaacagcaagtcatctcttctttgagtactgttgttatatagcaaaaggtgtttggaagctatttctttatggcttggctggcgtagaacagggagtaatactcatttacagaatttgttgtgagccatcaaacggaacaaaactaccaactttcaacgataggtacgtatatgtatagtttatcatgtttggagagatagaaatgaagtgtcatgaaatcaattttgtttgcctactttgaatacattgatttatagagtgaaatataggatgtgaaatttagaatatcagctattttgccaaaaaatatatatatgagaagatgtggtttgataaattgtaaagcgtatacatgcatagtgcaaaatacacaggcatgcattctttttttagtgctgttaggatgtaaagtttgatatataatagaatacaatgagttgattaatttctaaaaaaaaaataaaattatataatgaaggaatattctttaagaattgtttgatatatataattaagaaaatgaaattatatatatttgttcttacacatctgctattttttttcttaattaggtatatgtgaaatcataattagctagagtaaaggaatcatagttcttctatatctctatgaaaaaatctttgttggccaaattcattatttttaaacaaaattagtctgtttattggttgaatttggctgaagttttgtagttattaattagatataatgaagtgctttaatcgtttgtctaattcttgtgtcatatatatatattttata

SEQ ID NO: 188234 - DNA, 3081 bp, Cannabis indica
aagaaaaatagagaaactagatacttctacactacaccattataaaacatggtataaagtgaaagcagacagattataactaagactggaagaagaacaaacactattggcatccatgagaaagaaaaatggtagagttattatattaattctcgtatcctaccttcaaaacttcgagggggtggcatgcgagtgtactaacaaatccagcagcagcaccagccacagcaacaggagaaatccaagagagcgacaagttaaaactaacaggaccaaattgcacttttggcccatcattccgcttccacttctcttgagctgatgtcattgttcgtttcacacactcaaatgttccaagctcaattgcctgtgtagggattatacggagcatattgattgcattcccagcccaaagtcctgtccagccctgtgcctcaatgacctcaaggaaactaccactgatatttttggatcctacaccaacaaccattctggttctgcacatgtaaatcaggaaatatacatgactaaatgtataaagttgcatagactacagggtttcataattcacaacttcaagaaagagaaagaatccttcagtaggctccttaacttcctagattcgtctagaagtttcaactttgtgactcggtgcactagtctcactgatctaactagaaaccacacaactatccaaatataaagtaaaaagcacataataattttaagaatatttcatcactagaaacacaaactgacaaagaaaagaacccaaaaatgagctttgattattcctttctgaatcagatgcaaatgatagactttttttagattagaaagagtctaacagtagaaacgcaccagaacaatgaaatcccaccagaaaacttttattgaatctaggagaattatacaatcaagctcttcaagaagcctttgctcctattctaacctttcaagagggctgatttctcccaattctattctctccaaacatacctacaggctactgccaagttcccttactctacttatagagtatagaacttgccacatcagcagcctagttgaattctaatacccactgaaaatacagcaactctctaaaaacaattaacacaactaatacaaaagaaataaaactctcaatactaacttatacttggcctttatggcctttctttctctgataaacaaactaaataggaggtttatcagcaaacatggtgtcaacctcttttaaaattctaccaaattcacaatcaagaaattactttagatcctgagaaccagcgatgagcttcagcagttgagtgcacccgaaactcaacacaagtaaacaaaatactccgccattgtaaattaatgttaagcacagctcgtcaaaagcaataattcattgagatgtaggggaatgaaaagaatcaaaaaacaagtaaagacaagtaaacctgatggtctctagaggtgcaagaacagctttagtcatagctcctgctaaagccccactgaggaactcagcagcttcccttgttttcataacatcctgcacgaagtcaaagcgaatattagagcaccaccaacaaaaggtatctaatatcttagagcattctgcttctttgggttacataatactcagatacataatgcacccaagtcatggtaaacaggaaaaagaaaacagtgctaaactgagcaaaacagtgcataatttattagtactcttcaatatccatagcaagctgtatgaaaactgattgaatcagatttaagtaattgccaaatctatctttatttaagatttccttttgaaacaatgatgatagggtcttaccatttaatttacagcctaagatcaacattatgatagggcatattatttcaggtttaattaagtgtctcaagtaaaaatgtagtatgaaaattgtataatatccaaaaaaacaagagagagagagaagagcacctgaatatgtcatatcacttgtaatagaaaattgaaaagaggctataataaagatcaatgttgtggaaagcaattcccacaacagttatgattatctataactctttttaagaatcaagaggcacaacaacagtgagtctctcccctagtagtgattgatacttaacattcatcatatttgattttctctcttttttcaccactttctcattaacaaacagagaatcaaagagaaaaaccaaacctccaaaatgcctcaatgttttttctagagaatcaaagagaaaaaccaatgaaaacaaacaaaaatcattaaaaaaaaaaaaaggaactcactttgaaggcgcggctgaagtcagggaccggtaaacgaaagtcgaaagatggggtaggcttattctcaagctccacctccttgggaagaagcatcatcgtcccataaacatctccaaaaacccctgtaaacttcttcttcttcaacgactgattttcaaatgccattattttacttatcagtattaaaaacgaaatatatacataaaaaaatataaaaacaaattcaatccggccccttaaatttgcatatgtatatatgtatctatagtcctcaatataaataaaaacaaaaacagaaaagctgtaaaggaattgacatgcctgaggctgagagagagaaggggtttttggagacatttggtttggagggagatttttcttcaatttctttttcccctctgttctgttttcttctgtctttttttttttttttttttttggttttttgacgatgttgttgtttttatatcaaaacaaaatgttttcctcgtttttgttttctcttcttttttttccttttcagaatttaaaaacacttttaacactattatgcgtttttaaatttgttttcttgttttccggatttaggttccgctcggcgctttcgaatggaagagagacctttttgaatcactttttatcttttttgggttttggctttcagaattcaaacatctttctgaactcaccacccattccttcccacttgcctcgccagttactgattttttaaatatcagtctaaattcaagtttcattaccaaataaataaataaata

SEQ ID NO: 188235 - DNA, 2023 bp, Cannabis indica
gggggcatatccacatagtagtttatgctgtcaaatgacattgataatggtttaaatggaagaaccattcctcttttcccatctaggagtcgcatttcttctgaaagattatcatatgacaataatttattcacttcattttaagttcataatttttccctaaaggtttatagtatttttttcttactcatttgagacttcacttggttagcttccttattggtatcatcttcggatatgattgcctgtggtttcccaaaagctattaccataaaaagatgaaaattagtaaaacatgctcaaatttatgtaagagagaaaaagaaagaaaaagaaaaattggttttaagtcttaccatttaggtacataagtgaaaaggtaaacaaaacattaaagagaatagtgaaccccaaaagagcagcaacaccaatccaataccaatattgttcatgagggacatcaaaattctctagtacttctacacccaactttgtaatgttccctggtgcctgcattttttaaccttaaatttcagctacctttatctcaaaatctattattatttttagaaaaattatttaccagtttatgcatccatcttggagaaagcatctcattgatagttaaggctttgaaaccgtaagaaagaggtgaaagccagtgtccccatgaccaccatacaggaattcgtcctgttccattataagaaaaactactattacaagagcctaaagtaggttctcattagcacaaatatgcatactgggtactgatcaattttctcaaaagactaaccttttggaagaatgaaacccccaagtaaaaacaatattaacagagaaagtgcacccccagtgtgagcaacaatcatggttctgcacaatccagccataagcctaaatagcccagcagccatttgctgtatcagaaaaataaccaatagctgcttggcaaacctgaaaaaataaagacaatcttgataaaacataatcatagttatcattattcatttaaggcctataacacatgaaacataatcaatgcttacctgcttgcttctggtgcgtagcctatggtgtaatatgtcactgctgtccaagccaaagactcgaatatagagataggaactcgaagcaagaaattcggtatggtgaaggcccaagcaggatagaaaaggagatccctctgcttgtaaaacacaggcaatctcatgatggccatggataactcagcaaaaccattgaacatgttgactatcatggcgaatatgattgccccgatgtatagggagccgtcttcgtatgaaatatgtagtgtagactttaagaacactgtcgaggcaatgatggcaacaatgatgatttgaactgttttgaagatgtaaacaggcatagttcgcttgattaagagccactccctgtccatggaaaccttgagaagctgcattttggaaattgaatattttgagaatgctagtgcagctttatggctctgtgacttattgtaggggactaacaactcattctcaagctgaagaccaacatggaatgccttaaatctgtttgcgaattctgtcactgatatgtatctataaggcttgtccatttgtgaccaatattgctcttgatctttccttgatgtaacctgttatacatgatgaaagagttagtttcagcttaatggggtttgattcttttgaatttttgaccattcttatgtgttatagtttacctcttgaaggtaatcggcagtgccttttctttcagggcatttgaatccacaactctcaaagaactcgagaacgtggtctctagggccttgatagacgatctgaccctcagacaagagaatgatgtcgtcaaaaagatcaaacgtctcaggatcaggctgcaagagggacattaaaatggtggcctcagtgaggtggacaatctggttcaaacacttgacaatttgaaatgttgtggagctatctaaaccagttgagatctcatccatgaacagagttcttgaaggtccaac

SEQ ID NO: 188236 - DNA, 1989 bp, Cannabis indica
aaaaaatgtacatgtgaaaatatagcttggaatcttgatgttctcagtttaaaatattacttagagttgataatataaataataagcattgaaaacaggtaaaagttagtaatttgcataaaaaatttcaaatggaaaaagattatttaatgacaacttttaaaggccttgtgaaataaaaatgatatcttgcatagatatagtcaaatctacatgtgtacctaaggaaatcgagaaaagaatatatgtttaatgatagcttttaatttagaggaaatgctttgctttatcagtcattcttatacaaagttgtcatagcaagcttgtaatagagttacctgtaacatttgatttactgaagaacaagatgaagaagaagaagaagaggaaggagtagagatggcagtggaagaggctgttgtttcatttgttattgaaaggcttggtggcttgttacattctcaagatctttgagaatgtaaagatcaaactcaaatgtatgagggctttcttgaaagatgcagatgcttttgtaagaaatggcgatgagagacgtcgccttttggttgttcaagtaagagaaaattcttatgcgttggaagatgttattgaaacttatgtattcaaggtggctttgaagagaaatggaggtgtcataagtgtggtgaaaaggtctgtttgcatactctaaagagttaattgatgtgcatagagttggatcaaagatagaggagatttcaaccaatactgatacttggacttcagaattagaaaaatatggagtacaaaaatcatgctgaaacttcttcaaaccaagttcaagagcagagacgacgagcttattctcatgttgtggagagtaatgttgttggattcgatgaagacattaaaaattcggtagctcttttgactgcaaatgagaatcctcaaagtcatagggtgatctctgtatgtgggatagtgagaaaggtttatcatcatccttaagtcaggagtcactttgattgttttgcttgggtctcaatctctcaacaatgtaataaaagcaatgtttgggaagggatttcattttctttcacttctccaaccaaggaaagaagagaggaaattataatcccaagtgatgatgaattagttgaggagctttacaagtttcagaaagagaagaaatgtttggtgctcctcgatgatatatggtccactgatatatatcgccaagaagacattcaacagaaactatgaattggtggataggagcatggttcaggtagagaattggggtttaactggaagaatgaaaacatttcgcatacatgatcttatgtgggatttgtgcttgtctaaagcacaagatgagaacttcctacatcttattaatttgaagaataaggttgaggagccactaagatcagtatctactaaagtaaggagagtttcccttggtcttgattatgatcattttggtcatttttcttgtttcgttgatagtgaaaatgactctcttaggtgtattattgtagatatgaaatgtacggaaaaacaagttttgagacatgtgttcaatagttttttcatgctatggttaagccaaattgggctcactggaaattgttcataaagtgaccccactcttaaaaaattgcattatttcaaggtaacaaattgatacaagagaaaacaagaacagatctcactacttaacacacaaactaactcatatataagaccatagatgtccaactaagataaactgaattaactaacttattctaaatttcaagagagatcatccacctgtagtcttcatcttaaacatttaatataagtccaacaaaatgcttcaacttttgaaaatgtcatgctgcttgtttggttagcagtcttaatatgtgcacattctctgtctgttcaaaatagttgttggagaaaataaaaggaacaaatttatcaaattaaaatcttgataaattgtgcaagcagactatcaac

SEQ ID NO: 188237 - DNA, 2245 bp, Cannabis indica
ctaaagctgaacagcctaaacgaaagtgcccactaactaaaccaaagggtccccgtaacgtacggacaacacactataagctcaaatgcttagagccaaactccgattatctgccattgctggcgccaccatgatttcttcttcttcttcttctaaaaccctcgcaaaccctatctttttctccacttcaacctcaccgctcttcaatggactctctctgcccaaccgtgttactttctccgccagttttgctcccgcttcgcttcgatgttacgcttcctcgtcgggaaatgatcgaattcaagtccagaatcctattgttgaaatggacggttagttctcataagttgtatacatatatatatatatatatatcaatttctgaaagttttattgatgtaatttctttcttcaaaaaaatcaggtgatgagatgacgagaattatatggacaatgataaaagacaaagtacgagcttctattcgatgtcaatttctgtttttcttcttgaattagaatttcgtagaagaattataatttgatgactttttctttttcttcttcttctttattgtgattgcagcttatatttccttatctagatttggatataaaatactatgatttaggagtattgaaccgtgatgctactgatgacagagttacagtggagagtgctgaagctactcttaagtaagttatttatacacaaaagaatctcatgcttcacatatggtgctcaattctgttaaagggttctttctcgtggtatggctttcttgtactggaacttatatagaagtataattttcgtagaataaattttagtatttcatcgactaataccaatggtcaatgctgattaattgttaggattccaagaacagaggaaccatatctaaagtggtttttattttttctaactaacattagttcattgccatctttattgtgctgcagatacaacgttgctgtgaaatgtgctacgataacacctggttagtgtgtcttcttctaagatcttcatttttaatgattatattatatgcacctcaacagaagatttatgaatactcaaagatcatattatttttgtattatggaactagttgatagcctttcatttagttaagactttctatgggaaatttatgtgaagagagtaaaacttgtctatgctgttttgttctttgaagatgaaaccagagtcaaggaatttgggctaaaatcaatgtggaggagtcccaatggcacgattagaaacatcttaaatggtatgtctttaatatatgactcaagagcatttgtgtaatgatttattcatttaaaggtttggctagctttattacattcttttggaattggaagataatgtgctttatgttttttacccttctaatttcttttatgtgaatgtagtaacgtcaaattttgttcaagtaatgacagcaaaatggctactgtttataactttatgttaattagtgaaaagttatctgattttcgacatcattgttagattgttgttttcatttttaaactttcatgtttgatatttttctcacagtggaaactgttatactttttgcaggtactgtttttcgtgaaccaatcctctgtaagaacattccaagaattgttcctggtaattcattgctcttgttgcattcattaatggggtaaattcatgtgaattaccgcatagtactgcttagaaccgtgtttcttaaatttcaggttggaagaaagccatatgtattggtaggcatgcctttggtgatcagtatcgtgccactgatgcagtcattgaaggaccaggaaagcttaaaatggtatttggtaagctggttgtacaaacctagaaactgattttatattaaataatcaatctgcactctatttctcatctgttcctagttattttttctcatcaagttgtctttcatatctatattttagttcccgatgatgggggtgcaccagtggaacttgatgtctataatttcaaaggtccagggatagcgcttgccatgtataatgtggatgaggtatataaaagtcaaaattaaaatcagcttccacaaatacgtattgacaattatagaaaaccgtgtgtaatttttcagtctattcgagcttttgccgagtcatctatgtcctatgcatttgcaaagaagtggcctttatacttgagcaccaaaatacaattctcaaaaaatatgacggcaggtagatctctttctat

SEQ ID NO: 188238 - DNA, 4451 bp, Cannabis indica
tgtcgtttcttaaattagaagaatataaaagagattggggtgagagaggctcgaactctcgacctcaggatcactcagtagctatgagacctacgcgctagccaactgcgccaccaccccttgttgatatattccctatatttaataataagatttgtttataggttttctgtttttgaaaggaatttttattattcaataatgaaatcaaatattaattttattattgaaatattaaattgcttttattcaatgacttttacaattttttatttttgtgacataaatatctaagttaaatttttgattataaataatatttctgtttattttttgacggtaataatacttaaattatattttttaaacttctttaggtacctgactgttaagtgtcaagtcaatgaccacgtgacagttcttaattggtctagactattaaatttttattttttatgtattataaaatttaaatatactaataagaaaatgacacgtgaaaaataaacacttaataatgagttacctacataaattttagaaatataacttatgtatttatttgcaaccgagagttaaacttaattatttacgccgcaaattattcttttattttatttagtagcttgatgcattcaaacatttttttttaatcatgcaaatttacatctcttccgttaaaaacacaattagaattagaatcagaaatatagactaatcgaagtaacttaaataaaaagatacttaaaatcatgtcacatagataagactaatcacaataagaaaactatataccttaaccaaaccatgcctaagcccaaagaagaccgacgagcctgaccgaggaaaaaaactaggtgacttagaatttaagaagaaaaactctaacatacaatataaaacatttagaaaaccctacatactacatagttttatgcattcaaaggggtttggtattgttcaaaaaaacaaaacaaacaaaaacaaaaacaacaaaaataaaaaataaaataaaaaataaaaaaagaaggggttgaacctcaaaacgcagccgttttagttataaatgcagtagaagagtggtagtgtagtgataatagtgtacttgttcttcttcttgtacggttggagtttttgggaggaaatcaggtacgcataaccccaatcctcatcgacattcactctcatcttacttcattccaatccaaccttctcaaactttgttacacttcttttactttgcatttctcaaaccctaattgaagtctcttctcaattcaattcggtacattacaatctaatttactctgttcgtatctttgtagcgctattgtgtaatttgatttttttgttttgggtcgtcaatgtatttgtgctatggaacttctgaggtagagttgtatttttctgtaatttttagctggtattttgtgttccaatgatgttggaataggaaatgagagtagtttgcttttgttttctttttctttaatataaaattttgaaattttcaaaccaatgttagttgattggactttgaatttcaaattttgatgctcatttagtgaatgtaggtggtggttggttatactcattccattgagtatgcttgctttttcattgtgttgattgaagagcaaaggagttcctttccttcactcatggcagaatatgtgccatctatgtcatgtgttaagctgcatacgcggataagttgtaccatcaaacaaaagggattctcacccaggcaatcacaaatcagaatagtacaaaggtttacttgcttgctattttaagctagttgggtagaattatttcattagtttcttacactaacattcacatgtcttggatttatgctctttaagttcaacactgtgattagctgtagttatgactgcaggaaatattcacatggaagctgcaactccatgcggtcaccagggttgaaaatgtgtaagcttactgttcttggcatttcaaagctgagagcaagtctttggtccaggaggacaactttgagctgtacctgtttaggaccaggtgcaatagtttctacttgggtaccagttgttgatcaaatacttctgatgtcaagtatatttcttacatatatggctggtgtaattcctattaggcagccttatagaaaagatgtctccagtgacagcaatgtttctgaaagttcgaccacttctggtaggtaagggtatgcatatcgaaaaattgaagtttcatgttctgttgttggaataaaatataagttactcagctactaacagatcatgtgatgcctctgtcttctgatttaccggtttctatttcatttagttacttatggatttttgattaattgcagctcgaaaacaaacaatgacctagctaatccaaagtatgttttagatatcgttaaaaggaaacttctggattctttggatgcctttgaacgtggagatgtttcgggaagtaggattcttgaatacagtgagctacgtccaaaacgacctttaaatttgagtgcccttgcggatggtccaagattaagattgctctgggctacttttcagcaaattgaggaagtggtaagttctgtgttcttgtttagctgtaattactttgttggactttttctttacctgcccgagtttatgcattccacttcattaaatggtcagaattattctaatagtagacctgctaatttgaactgttatcatttaattaatggccataactttcaaaactaccattgacaacaagtctctgttttatttgtgaaatgttatgcttgttgatgattatatgacttattaatataatcttttagaaaaataagtttttagaaatcttctatccagggttgaaatatacattttatacatagaatgatgtagctgatgagcaatctggttatattagattaactagttgctccccaaaattttaatttgatgattctcactatctagtataatacttcctgtcatctgttttattgacagatccaatcttactcttccgtatttcagttccctcaactaatttcctctaatattttattttattttggttcatgcaggtgaatgatatatcaaactcagaatctctcgacttgtatgataggttgattgttttttctagagtgattggaaaatcctgtcaaccggtgtgcatgacttggctggaaagggagcacacccttgcaaacatcaatcttgacaaggttagtttcataatctcatgtacctttcggtagcatttccacagctggtgtttttctgattagattaccattgtatcttccttgtgttaaggcacttgtttctttgttgggtgcaaagttaaatggagacaacactgtactgctgaacattaagaattcaggcaaggaagatctttatgcagatttattgtgctttctttgttttggttctatcaggtaatcattcatgcgtgtcttgactcttgtgtatttaatcttagtatatcgtcattaatctgttgtgtttgttggtattttttgataagtcgctgccattttataactacaaatgatactatgcttatgtaactgtcattgggtatatgatcagaaattacaccattgtctgaaattccaaacgaaataaactatagtgtccctattgattttgcagaatacttcactttaaaagttatgtggatacatgcagcacaataaatattgttaaaaaataacctcaaataaagtacttaagttaacagatgagcagtagtctctgtttgatgttgattgccataatcatttactgctgcatatgcactctacacattatgttccttaagaagaattttctcattgtaaaggtattttcgcttggctttagaccaatgctgtactctttttttcaatgcatcctgtatcgaacctgtctttaacttttaagggtgtgcttaccttcatatgctattttatcagggaggattgctattatgacaagagtctgtttttctcaaatggaatttccatattggaagatttgttgataaacatagctgatgggatggcaagcatatatttagagcttatttctgttgatagtaatgtctcaaatgaaatgaataatttgtgcatggcattatgtactttgtcaacacgagctcttcaaagattacgcaatgaggtacacccttgtgaagcattggagtttaaaaatcttctttgcatggtgttgtttattgaacatgttccttgcatgatgcaattgttttgctatttgcataagcgttctatttctttccttaatatgaataatcaggtatcactttatttttagccatcatatatttcttatatatattttaaagaagaaaaaaaaaagtaaccataatgtttacaattactatcacctgctttgaagacttagacggaatggatttggtttacgggtctagaaggagagcttttattt

SEQ ID NO: 188239 - DNA, 5726 bp, Cannabis indica
ataaacatttatgtttggttttgacgaattttttgttgttgacttgagtggaaccttgagtacatcaaacaatatcatgaagtccaatggtttgtatttttatgtcgctctaggttggtttggatattccaaatgttagagctagttttgttgtggtgttgctacattcttctagtggaattttagccatgaccacttggcctttcggtggtatgttgattgaaactcgcctatgacccttttgtatgatgttgggctttgtgttcgcttggctatgtcatgtttcggtggaactaaactactggcgaaactaattccattcgcttccctagctttcgtctctcaatgtcttaatattatcaatgcgcttaaaatttatttaatggataattcttacttaagatgcacattagtagatagtagagatactttagcttattgtattctttctagtaatttttcttttgctattatcacaagttcattggcaaaattaattattacattagatgaccattttgtttggtagtgtgattatttcacttatattattgtttttttgttgattgattcttattaatttatgttattttctttgcacatattttttcgtgtcgaatcgtgctcgtggactcgttctgatttcgtgtcgtgttaaaaaatttgactcatatttagagtactattgccaagtatgtaaactactcaactctcccaccaaatgcaaaaattttcttattctttagtgaaaaataataataagtaatttgcggcataaatacataagtttaactcttagttacagataaatgactaaatttaattttttacggtaataatatctatgttatattttttcaaaacttctataaatacataatcattaaatgctaagtcaatatctacgtgaatcaagactaccatgttaacagtaaaatacttacgaaagttctaccaatataacttaagtattattattatcaaaaataaaatttaattatttatttgtaatcgatagttaaactttgatatttacgccacaaattactcaatatatatatattcataaatatgcttaaaattaaattttcattgccatcctataaaaacatcaatttaaaaaccattcctcattagtaattatgtgaaatatgggttgtagaaagtgaaacgagtagccaatgagttgttctacgctaattattcaagggaactctgttctcccccgaaatccaaaccccaaatccaaaaacttgatacacagtaaccgaagaagaagagaagtaatctctgtgttacagaaatgcaaacacattaaccaactacgctctttacatgctaaaatcctaagaaatgctcaagaacaagaccccttcattgttttcgagcttcttcgtctgtgctccaagaacaacttcattgactacgcctacaacattttccgaaccgttcgaaccccaaatgtctacctctacactgctctaatcgatgggtttgttttcaatggtttatactttgatgggtttcgcttatattgtcttatggttgatgattccattgttcctgataactatgctgtcacctctgttcttaaagcttgtggctttcagttgggtttgaaacaaggtagagagattcatggccaggtaattaaacttgggttgtcttcgaatcgatcggtgaagatgaagttaattgaggtttatggaaaatgtggagagtttgtggatgcacgacaagtgttcgatgaaatgcctgaacaggatcttgttgcgtcgaccattttgatgtcttgttattttagtaatggattagttgaagaggggaatgatgttttcaaccggcttcggaataaagacacagtttgttggactgccatgattgatgggttggtcaagaatggggaaatgaataaggcattagagctttttagagagatgcagatgaaaaatgtgaaggctaatgaagctaccattgtttgtgttttatcagcttgttcacagttaggagcattggaacttggaagatgggttcattcctatatggaaaagtataaaatcaagcttaatcatattgttggtggtgcattgattaatatgtactcaagatgtggtgacattgataaagcacagaaagtatttagatgacatgaaagagagagacgtcagtacttataactctattattactgggcttggtatgcatgggaagagcattgaagccattgagatgtttcgggtaatgataaaacgaggatttaaaccgaatagtattacttttgttggtgtccttaatgcctgcagtcatagaggattggtagatttggggtttgagatatttcattctatggttaaagactatgagattgaaccacaaatggagcattatggatgcattgttgatcttttgggtcgagttgggagactcgaagaagctcactccttcattcagagaatgaaaaacaggtccctgatcatattagtgttgggtgctttgttgagtgcttgtaaaacacatggaaaccttgaacttggtgaacaagtggctaagactttgctggattgtgggaaagcagattcggggacctatgtgcttctctcgaatgtttatgcttcatcggggagatggagtgaagctgcaaaagttagagcagagatgaaggaaggtggaatccaaaaggagccaggttgtagtttgattgaagtgaacaatgaaattcatgagtttcttttgggagatataagacacccccaaaaggaagaaatctataataagttggaggaggttgagaataagcttagatcatcagaagggtatttgccatctactgagatggctttacaagacattgaagattggcaaaaggaaagagctttggcaatacacagtgagagactggccatctgctatggtctaatctctactgaacccaacaccactttgaggattgtgaagaacttgagagtatgcaatgattgtcattcgatgatcaagcttattactaagatttgcaagagaaaaattgtggtcagggatcgaaataggtttcaccattttgagaatggggtttgtacttgtggggattattggtgaaaaaaaacatatatatgtatattgaaaatgaccatgtgttacagcatctcattattatgtatttaacattatgtaacactatgagaagagaaatgctaatagaaagatgagagtactttatactgtgaaaaaaccttcttcatttctttcattttatagaaactatagctgaaaacatttcaatgttatcacttatttatggttttagttcttgatgttgtttatgtaacaagtcaatcgtttgtatgaagaagattcagaactttttgacaagacaaatgtgcacagtttggaatagaagcaaaatatttcagttgtgattagacttgatatttctggaaatgattacacaatttgagaagttttccaattgaataactaacccaaaaattgccttaaacccaaaaggaaacattggcatccaccttaagttgactcaactgagtttaaaatattggatttgtaaaccaagaaggatcgtttgccaatgtagcttactgccaatgcctttccactacaagtgagtggagaaaatgctagctgagaccgttcaagaacaaatccagtggaaaagcttttcctgtatgaatattaaaaagaaaacaaaagagtcaaaactcaatgaagatgaaattgataataattaaatagaacaagtaatttcaactcattcacagtgttgctaacataaaagaccaaggaacataagtcttttgttgcataatcttcaaccatatcaaagagatccttaaaactcatcaaatatttgacttatacttgaacacaaaaaaatcccaaatcaagcaaatttctaactttgttggaaactctatttctgtctggaatctcaaaaaaagcagtttctttacctcactgcctcgagcaaatgagtggctattcgttttcttctgttgacaggagacacccaaattgctctaatgccacagacagcaggcaccggtacctcctcgcaaataactgctccgccgacgtcttcatccaactggttagtattactagcagagtgagatcttttcactgtctccctctgaaaactaatatcaccaaatttaaggatagttggtttggctctttcttcttttgtgttaatagcatcattgcatctatctgttgaatttgagatgactttgaatgccttctctattggttctgcaattaggcatccagctaccctattggatagaatgaatagtaaaacctgcaagaacactaaaacatctctaataccatttttaaaactaaacaaaaaaaacatatcacatatctcttgacactaaagatttctttgcaaagataacaaacaaagagaatccaagtgcatttattatgaatttcatgatgtaacttctacagagattttatgatttttgtgaataaggaatgaaaagtataaattagaaccagttttaataaaacatggaggacggcaactgtatccaaaaatccaaatgtaattgatataaaaatgaagtaaaagtaggaggatattaccttacaaaatttatggaaaataaatccatttccaagctcaatctccatcaaatttacaacttccttaacctgcaagccataatgtttcattcagaaaagtaaataacttacttacactttctttattcagcaaatgtcactttcattaacgaaaagaagagtctcaacctttttctcaacttttatgttcaaaaacacatgccaaaataatttttattctaatcttttgtcttggcaatgtttgttatataattataatatctatcctgaccgaaataatattttaactataacgaataccgtcataaaaaaaatattttaatatatattttcgaacgcaaaagttgagaaagagattgtaataaaatattgtaattaacactcatcttaacaagaaaaaaacaccccttaaactcaatcttccctataataacataaacatttctttgacctgaatgaaaatacaaatattcaatctaaaccttgtttttttgggcattagaatcacagtccaaaaccataacaatccgaccaccttccatagtaggcatgtgaataagcctttcaacagaccaaccctgcaaaattacatatcaatagttttgttataagcaataatcaaattaccacaacaagaagcacatttcaaaactaaattttaaacattttataccttaaattgaattccatgggtatagttcttatgaaattccttatgggtcttctcatcactctcatctccaggagaatacttaaacccacatgtggaacaattatgaaagttgaaatcagactgacccaaatctaaatggtattgggcataacttctcttcttatttttcaccattgttttctttgatattattgattcagacttcgaagacaaactactggaaacagttttttccagccactggtcatctttggctttctccttttccccacttcataaaaaaaaaaatgtcagtgattatggaaagaataccaatatttaactaacaaaattcaccaaaactctaaagctatgtttggaagttggattttggtgaggaaagaaaatttaggggaaaaaaatcaaactttcattgttcaatcaactttttttccttaccaaacatgag

SEQ ID NO: 188240 - DNA, 2691 bp, Cannabis indica
atgactcccataatttcatctcaactagtgcaacatgttttctatctcatgagtctattcagcatggttcatcagcttctccagaactagctctaaattattcactagttattgtagcaccattgttcagcttttagagactcattgtctccaccaataaacacaattcaactcattaattcccactaggatttgaaccttagcttgtaagatagaacattgcttcctcaattgctacctcttctcacaatatccccactgaacaacaaactcaaatctcttaacacactggtcttttattgtcagctcagctctatcaactcctggtcctcctcctcagctgaaaattactcatcaaatggaaaccagatcttaagtcagggattcacaaacccaaaagtttatagtatttttcaaatacctacttttctagctcaagcccttcaaatggtccactggagagagtaatgtcagatgaggtcattactttagagagaagccacacctggatccttgtacctttgcagccaggacgatgtttgtatttttgccactaaattacgtctgtaatggaataaatttttcttgattatcatcataccattttccaagatcaccatatgtatgaaacctgaaagtaagaacatgaaaatattattgacctcttttcatatgttgtatccttagaacggtgaagtcaaactcataccttgatcttccagatcttcccccaacacaaggactaatgtgggctagtaggataaaaagtgtatatgaggcttcttgttttttctcaacacatgagcaagaacaagtttacggtattaatggagagaaaagatatcagattaatcctttttaggctttcatgaaagttacgtaactttttggcttatacaatattttaaaataaaagcctatgaagatttaatttaattaattatttaaattcaaattatttattaaatcatatttaattatttgaatatatagtataatcaaattttgttatagatatttattttctataaccgattaaaggaatctctcagccatatgagagaatatctcaactactttttaaatttaaatttaaagaaatatttatcttttgaattaattaacccaaaaataaatcctgtggggacaccttacattagggttgcctacattatgtctcgacacagtgtaagtggcgcctctctctatcttagttaagacaaaggttatgtttattttctttgaaaacttttttctattcctaatttatttaattaattaatttgaaatataaattatttattacaaaataactgattactattttgacagattaaaatagattttaccaaatttccgtatgcacttttctccctccctttgcagtatttcaaggtggcgatcaggggaccatggacctataatcctaagcttcaataaactagataatttattaaatctcatcaatcaaaaaattgtgttttttaattccatgattactccactttaaatatggaattgaactcttagtaattgtagaattatatttattgagtttactgcagtgcccattgataaaattaattccagtgattagctctctttgtgtcagttcgtaaggatgagttgatcaatattcttcaaggagaatttcaaatttagattggattcgtatcttccaagtctaaccactctccatttcttcttcacacaaagcagtcaacaacactggtgttggtctatgtagatgatattttggtcaatggtattgatcaactcatagtcgatttgaactttgaattctccttgaagaatattggttagttgaacttcttccttagtatttaggttttgtatacttgagattgaattcacttatctcacgataaatacatgaaagatctactatccataaccaagatgcaaagagctaaaccatgttcaaccccaatgaccaatggactcaagctctcaacctatggaagtggccctattgaagatgttcagttatatagatctctagttggagctttgcagtaccttgtgatcactaaacctaaaatttcatttagtgtgaacaaggtttggcaatatatgcaaaatcctctgcaagttcactagattgctgtcaaaagaattttgaggtatttaagtgggataatgaactattgcctgcattccaagaagcctaaacagctgcagaccctaatgatagaagatctacttctagctttgctatatatcttggctccaatctcatagctcggtcttgcaagaagtagcacacagtttctagatcaagcacaaaagcaaaatttaggagccttacgaatgttgtagctaaagtaacttagctcaagtctctgttttcaaagttgcatatctcaattcatagactgccatccatatggtgtgataatttgagcacaatattattgactgaaaaccttttacttcattctaaaactaaacacattgaactggacttatactttgtttgagagaaaattttgcaacaacttgtaaagtcaagcatgtcctacaattggtcaaattgcaggtagactaaaaaatgcaatttctagtgtaaagttgagtgtatttagagacaaactaaaaaattgaagatgctacaatcttgagtttgaggggcttgttgagacaattagtgagttactgtccatttttcta

SEQ ID NO: 188241 - DNA, 4318 bp, Cannabis indica
aaattgaaatagaaatcgattattgtcaagttgcttaacaaacattcccatacctggttgccataatgaagccaatatattctgcattttttcgaagtcgattactcggttggataagaacctccctaccaagcaccaccgatcatcaattccttcatcctgtcttccgccgtgacgtaacatcttccaagtcttcctcgtcaatgtgaaacatcagagtttcattctccaaggctcctgtttgtcgactagaagaggccataatgaatgacgatgaagcaaaacaaaccaatcccttttcccagagacgatagcagcaaagaacaaggagcccagaaaacaaataacaccctctactggaatagaagaaaagaccaagaacgtccaaaactaatctcactcactcaccaacaatacacagaaaccatgtcaatagacatgaacatataccagcattactttaagaaaataattattagacacttttaaatatgttcttcttaaaagagggaaatgtgtaaaaaaaaatagagagagataaaggagggatgataagcttaattgaatggtagaagaaagaaaaagccacaaaccataaaggacattaagtttggatttggtgaggatgaggaaacttgtctttgtctattatggtttgtggcttttttattaaattacaaaaaagccctttttctagaaatcaaataaaagaaaaatggtaggaaaaaatcaaatcaaattatctttgtgaaaataattaattaatattattattaataaaacgcaacagaggttttatttagagtaaggttcatagaagaaagagagaccttttacccatatcaggctcagagcctttctctcattcttttcctttctacgctttctctccttcctcagactttttctttacattcttactcaaattactaccattttcatctcaaatcacgatcttaactaggtatttccatctctctgtcttttcctctcggtgctctggttttgtagttcttctgcatggaatgctaaaaagggattttgaataagaatgtacgaatttagctgtggaatcttgtacaaaatcccaacttttaatctgggttaagcttgtatttgggtctttcatctgttttttcttccctttgtcactcaacacaccccacattttcattttattctacacaaatcttcttgtcttaagccttacgaagtccaattctggttcaatggaaagatatgtacatgtctgtgtaatatatatatatatatataaaaatatttatacctatatgttttatacttcacccttctctctcatgtctattctctatgctcttttcacagatagctttctctttcttcttagtagttgggttttatctagtttctgctatgatgcttgttcaaaagtgtatgaaattgttttgtaaaatttgtgtcaatatcttctccaaaattttaatattatcaagtctgttaacttaactaggctgaaacccataatatcagtgaatagattttaatttgtggttattttcttctttaacatctgaataataagcttctgacctgtttataggtagaaatttacttcataattatgaatatgtattttctttaatcactggttaatcttaaattagatgttgttcttgttataatctatccaaatgaattcatttgtggctacccatatctttttttgctgaatatattgtatttttctccaaaaatgagtttcagtttgtagattttcattagattaaattgataacattgtcctttgtaatgttatatgctcttacatgggttttgtgtctttcttgggaaagcaatggatatgtattttaatcttttatattatttttaatgctcatatatgatacacaatgtaaacttggactggatacatatttctaatgaagtgagttcgttactgggttttagggatcattttattatacatatatgtatgtataatcgtatagaagatgtctcttgaggccttagcttctcatatatcattaagatagtcgaatccaaagtcagttgtcttactcaagttgctcaatccatctcatatatcattgctatttgtgatctgcaatgccactatgattgagtgttttcgttttctatattttaatattgaacattgttatccaactatcctactattattttacaagaactaacagagtttggggttgaagttaacttgttgcttttgtttgattgtgaggagatgttgaatcatcatgtttgtaatgcattagatgtttgaaacgtaagaatatttacatcaaatttggataggactatactcatttttcatcttattgttctgtatttgtattttctgaatcttatgcattttgtagaccagctggtatattttcttgagtaaggatgatatagttaagtttgtggaaacttagattccataaacaaatctgaaacaaagcttgttaataaagtcaattttcttactcatgtattgtgctttttttttcttcttttttaatttcaaaacacccactatctatcatctactctggcttttgaagacaattcttaaactactctggcttttgaagacaattcttaaactactctggcttttgaagacaattcttaaactatcttttcttttggcattggaggtgtgaggtgtcaatattgctatggatttgttgactaaagataattaagaggggattgttcaataatttagagctatttttcatacttatattatgatattgcttccttctttttgtcatagtacaaatactttctagcactctgttagtctttttcttatgatccagttgcaccatttgaaaacacctctatagagtattttccttctcacttcaaaatttacttcttcttcttcttcttcatttgaacttagaatacaaagaaatgacacattttgtttataattatgtgtgttgtgctgtgtcatttacagataatgaaattctctatcagcagcctcaacattaaggctgtcatcatcgccttatccctcttcatttcttattcctctgcactaaaggtcttccctttttctctaatttatctacttttcttaaaattatttttgtgattttctttctctttttaattttcttagttactacacagattggagaaacctgttccaaagacagcgagtgtgattccggcttgcgttgtgaaacttgcccagctaatggaaatactcgatctagatgtacccggattcagcctatcatcccaacttcaaaggtttatttttctatttttttttgattacccttcctctttatttatgtgttattcatttatttttaaaaaaatggaaataggtaaaaaatttgccgtttaataagtactcatggctgacaacccacaactcattcgccagagctggagataaatcggccactggctcattcctggtcacacctatgaatcaggaagacactgttgcttctcaactcaatgtaagttctcttcttcttcttttatgggttaaaattttatttgggaactcaatagtacatccacagatatttggggtgaaattaacaaaagcacatgtttttgaatgaaaagaaaaacatgtggtacaaaataatgtaggatttatggggaaaaaaagacaagaaagtgaaaataattgttatagaagaggacataaactgaaaaatgtaatagtgaaatgaaattgtgggacctttctttcttttattttcactttaaattttgatgatgagggtagggtctgtatttgattattttagtacatgtttacctgtcccttagctttaaaatcaagcatataatataagccactctgttaatttcttcttttgattaacaatatattataagtgttccaactaatccatgtactgtataaaaatcttgtcctggaacatatgctttctttcctttttagtataaaattttggaattaaactcaatttttttttgaaaggtatgattttgataagaatcacttattctctttatactttttttcgttgttgatagaatggagttcgggggctcatgctagatatgtatgactttcaaaatgacatttggttatgtcattccactggaggcaaatgttataacttcacagcatttgtaagtgtcacaaacaaataattaaatataattgagttttcgtttattatagttttggtctgtgaactgctttttcttttgttttctttctttttagcaacctgccatcaatgtgctcagagaaatcaaatcatttttggacaaaagcccatctgagattgtctaccat

SEQ ID NO: 188242 - DNA, 2338 bp, Cannabis indica
cacgagttacaaaaatattctcgttttgtgtcaaaactcatatttattcaattagagttcttttagcacgtactttcagattttgtattaaaatcataaattatgcttaacgtggctaattcaacacatgtaataagcacaaatatgaataaatcatacatcaataaaaaagaaaaatcaacataacattaattcatagaaagtttcaaacaatctcccttaaaattcttaaattaaagtttagctcataatatccattaacatgttcataatcaaatccataaaagacattcaaaatcagaaaataaaaaagaacagaagaaactagattggaggttgtccctatgctccaatcttcattatcccaagcctccaaatacttttttgagcttttcagaggtaaaaaattgatgaaaattgcacttaaatgtgtttatatagtaaccttagcgattcttggtaaaaagacacatttgcccccttttacactaaaaatttagaggtagagagtacagacaacaacgccacgacgccaataccagtaatgtgagaagactttcttaagttattgttctataaatttattcttaatgttgtgttatacataaagtttcactccttttctatacaacttaactttagaattttgcatttatgaatatacttttcactgctaaaaattccatctatcagtaaaattatgtcaatcaaaagggttacattaacaatgcaacaataataaagtttggaatacattattattattttgagaagagggtagtactatactactaatataaaactcgaaaaattcaaattaattgcaactttggtacgggtcccaaggggtacacagttttgtgcgcatgggtgatgactcacacactgaaccactacacgcatgccaccaagctaagtgagtgtggtgtcaccttattacattttcttgttcctattttcagcactgttcccacgatcccattcttcccgttactaccttaattatgtgcatttcatatataatgcatcagaatcaatgggagaaagacatctttttcttataggaaaatataatatatagttatatatgattatattacaatatgtattctaagcagtagtggttaattgagggtagtattttgatggttctttatcgtacaatagagctctgatacatacagtggttcgactggactgttttatcctgagacgacaagcctgatagtctacttgcacaattctgagcagtgcgaagaacgctttaaagagagcgacttagtccgcgactcaacccaaattttattctttaaattcattcctttttattattttattttctgccgcaactatttcaacaaattatggtaatatgatcaaggcttcaattcgttccatcaaatcgaagccttgatgtgatgcccattatggtttctgttggcctgcattctataggtttttaagatcaagtaaggtttctaagaacaatgcaactgttttgagttttttttttttctgtattaattaattattaataatatttcgtgtttgtttgtgattgtaaattattgattattagaggcggctttggatgtattttattacaagctttgcttgatgcatggcaattgctttgtgtgttaattatctgattattatttatatttgtgattgtaaattattgtttatgagggacgtgtttggaagtgttaattttcttggttcaaatatgaatcaccattaggaatattacatctaaagaattttggtcaaacccaattaaataatgtgtgtaggatttgaatttattataaaaatgtccaaaagcagagtttggatcctgatttctgagaatcaagaacatgtgttactagtttaaatgttaagatatataatatgataatataggtaataacttataagatgataagatggtaacatgatacacatcataattaacgatcatcaaatttagtaatttagacattcaagtcaacaccatgaaaagagttccaacaacttgtttctctcttctttttgttcttatttttgtgcttattccattgaagattacttgctcaccaagaattgtacgcctcgatacttaggcgcgctatcgtgattttccaattaacataccacatttgctaatgaaatggttttctttgaaaatcgtgctaaattaataaaatttttgatttaaactattaaactttataaacatatatatatactagtaaaaagttacgtgcgaggcacgtatactaaattttatgctagtttttttctacgttattaaaaagtgatacaattaaaaattaaaaaaaatattattagt

SEQ ID NO: 188243 - DNA, 2857 bp, Cannabis indica
acaattgcaatttgaaaaattacaaaaatatatatgcaatttgatttaaaaaaaagctacaatttataattttgtcaaacacctctacaaatcaaccaccctaactgaaacacttctttaaagaatgtaccacataaatttcctatatttttttaaaaaaaaattaaaacgtttagaacattatataaataaaaaaataaaaaaaaaactaaaaaagagtaagaaattacgaaattgtcctcaaaggagagagagaagtaactgttctcactgtacgaattgtatggagccgtttctctcaagtgagtccgttacggcttagaaccgcagaggcaaacgtcgtctctttctctctctttctttcatactttctctctctaaaactctgcaaattcgaacttgaaacgtttagggctttagaagaagaagaagaagaagaagaccccaaaactaagttgaagaaccaccaaaacgacgccgttctgacaatctataccctgagaaccactcaaaccagtattttttttttctagggtttttctttgaagtaaaagctttcatgtcttatgaatggagattgcctctagtttctctcaacccttttttgtagctctactcttcactgttatcgccatcctcaccgtccgatcgttctccaaacgagttgaatccaacggcggagaaggaagtttgaggaaaacgacgaaaaaggagaagaagctctgtaactgttgctgttgttgtgataaagggagttcggagtccgaaacggcgccgtatttgaatggtggtggtaaggagatgttggagaatggaaagactggggcttcgatgatggagcaattggttccggagattacaacgcatgcacttagctatttggattaccctagcctttgtcgtctttcgatgactaattctttgatgaggaaagctgctaatgatgataatgcctggaaggctctttatcacaaggtatttgtctatgaattttgattttttcaagtttgaatttcgattgtttgaattcgatttctatgtagtatagatggaaacattaattgatggagtcacttttgtttgattgttcagaaaaatgtaggaaattagaaccattttatggtgtttgaatgatatttgaaatgggtttagactgaaattatgatgatcttgaatttaatagtgtttgaattagattgaacctttgtttactgtattagattggtttggttaaggatttgagttactcttttctgtactttgtaggattttacattggaacaggatactattacaccagtgaatgggtggaaagcttactatgctgcaaccagagcaattgtgaatataaacaatgatttctttagcatcattagagaaaggtctctcactgcaatgagatgtttttggatgaatgcagattatgtgaaatgtgttcatgcctcgggagagctcttttcagggtacgaatgcttttcgttattttgtagggaatggaatgaaagtatttacgtaggttcatgattcatccgattatgggaaaacgcctttttatttctgtctttgttattatttatgcttgctctgtttttagcaacagtctgcccagttttgatttcatttttattgtcgcgacttgcttaaatacgaatcttatatggaagaatatactttgttagttatattagttatcatgcagaatgaactagttcaaattcaactcggtgaatttaatgggacttgcctttttgtttccctacacgcgcacacgcacacaagcacacgcgtgattaactgtccttttagaaagtattttcttataacggatgataatacaaatggaagaaagttgttcttttttggatgttatacttgctagaagttatttacagtttttcccgattcgatcttgtgcaacataaatggtgcaatattgattttcttatggttccaatgttctgtcattttcataggaattctcaaacatttcttaaaggtgttgctacactgactttagctagagcgagaatcccctagaaacatggaaaggaatttaggccataaacaagtgatattatcttaacaagccctttattgttgttctttcctgcttaatatgataggttttgattttgaagtggcttgatgtcgatgatgagatctattttgtcgtctaatctggtccgtttattgttcaggtatactgctgtgatacaaagttgggagtttgcgtttaattgggatcaaggagtcaactttcagattagggatgttcgagctcgagtacttacagacatggcttgggttaccatgaaaatgttcgtcgatgtggacactggcccttttaatgtgactaatgtcttcgagttccataacggaagatggtatatggtgcatcatcacagctctgtaatggaaggagaattggagcaagaaattctccatgggtaatcaaatcaaatcaagtaaagaataattcataacaatgatatacttaatactagttaccaaaaaaagatcagtggcacttatttgcaagagcaaatttcttgaattcactatcatttttcttgcagatcgtctttaatctttttctccaaccctagttttttttcatctttttttggtagtagtatggtcaagaggtcattttatttcatttttctttttaattgactcatattttcaaccattctttctggaattaatgcctcaaatatacacaccttccttaccttggttttctctaaggttttagggcttttagagttttgagagaaccattatggttttgaagattatgggatttctgggaaagtgtggattttaagttgagttgttctggaaatgtgagtag

SEQ ID NO: 188244 - DNA, 6674 bp, Cannabis indica
tactatctgtatattataatttttctctcaccaattcaattttgaccaactctataattaataattatatatgtagatgtactcttgaaattccgttattttataattggaattaccaactttgtaataattaacatccgtgtagttgttgaaagaagctcccactgttccaatctcaaaaacccaccaaaacccttttctcaatctttatttggaatcttttttttctctttctttctttgaacttaaaattaagttattggttttaatggtctttaattattatgtcgtatactaatgctagtttgttgtgtttgtctccaggcttgtagtaatgatctttatggcttgtttttcctttttttttttttttgttaagggtcactctctttaagtctatgcttggattttaaaatctgggttcatttcttcttttccggatttcgttcacgttgattgcgaacttgttttctttttctgaaagcctgaaattcaagctataaacctttcctttcaactgctgtgattgaactcgggctatacacttggacctcatatatatatatatatatagatcattgatcacaccaaactccttcataaactgtcaatttcattggataaggctttctgatctgtgaatgtgtggaagctgatagttttcacttgacagctatttaaatgctcttacagtcttctttttaatttttcttgatgattttgtttgtatttcaagtttaaacccaggtaaatgcccgtttggatacctgtatttgtgtcagtttaccagtttatcctgtggatgtgtagtgtagtgtattgatttttcaatctgaacactgatgttgagaacttgatcatcttttcacatggttgcttcataggcgtccatgtcaatcgcctgtggggttcctatccttgagtgtgtgtactgtcttggctgtgctcgttgggtgtggttaaagtgcctctacactgctggctatgagagtgaaaattggggtctagctactgctgaagaatttgagcccattccccgcctctgtcgtctaatccttgctgtatacgaagatgatctacgcaacccgctttgggcaccccctggaggatatggcattgatcctgattttgtaatcttaagaaaaaactatgaagaaactctgggtcaggttcctccttatatggtctatcttgatcatgagaatgctgatatagttctggcaattagaggcctcaatcttgcaaaggagagtgattacgcagttttacttgataacaagctggggcaaacaaaatttgatggtggctatgttcataatggtttactaaaggcagcagtacgggtttttgatgaggagtgggagggtttgagggaattagcagaaatacacccgacatataccttgactcttactgggcattccttaggagcaggggtggtagcattgttaacaatagtggcacttcaaaatcttgagaaactgggaaccattgttaggaagaggatcagatgctatgctatagcgcctgctcgttgcatgtctctgaatttggctgtgagatatgcagatgttattaattcagtagtactacaggtagtgtcactagttgctcaaaatatatgatattcagttaaatataatgtgtatgtaaatttcacactatgaagataatgagatttgtactgccatagggaaaatgtgctgtattgacttacaggcattaatatgaatcctgagatatatgtaaagccatcttgatctcctaattaagggcactactggtttgaaatagaagcacttggataactgaaacatgaacttatacttgtactccattaagctatggggttgcaagcatagaatgtgtgatacattatttacgtgataattagttagctgtctattattgttgaagttacatgtttctgtgctaataacttctcaatgaatcaggatgatttcttaccacggacaacaactgctctagaagatgtattcagatcacttttctggtaaaatatagtatgtcttgagtcacctttttcgcatttgataagagtaaaaacataggaattccaggtagcaaaatgaatccaacgctaggctttagtaaggtgatataaagtgagagatcgaacgcacaaactaaacagcgacctttatgatatcgcgcgaatgataaagcaaaactctagacgactgtgagagtaagaccccagtttatagcctaatttacacaataaatttatttcaacctaaacagagagaatattacaatggattttctggtagttcaattttatagcatagtgcaatctaagtattttcctaagccttgacagttgttgaatagatcacatgcacattctgtttatattgaaaactgttcgtgtgttactattactacagtttaattgcatttacttgcgctgtagattttttctgaaatactaattcagctgaattccttcgtatgaacagtttgccttgtttactttgcctaatgtgcttgaaggatacatgtacattggagaaaaagaggcttaaagacccaagaaggctatatgcccctggtcgtctctatcatattgttgaacggaaacccttcaggtaacaacatgctccctgctgatgtatgctttgttgtttactctactctcgatttgtctgtctgtgttcttttgtgtgtgtgtgtgtgttttctcctctagccgatgagtgttaatgtccaattgcttgcctcctcatagatgcaaaggtgacatagaattagaaaaagattagtttgatgggcatacaatgccttcaagtgatgtgtggtgatatgaggaaccatgaaagtaatataaaattacaaatcctcagtccattccaatgaaatgatattctttacgggggtttctataaggggacattgcatatgtttctgaaaatgttagtcgccctagaagactgttattgctctataaagagagaatgagagcattccctgaagtttgatgattaactcacacctttatgagattgatcgtagttttcaagcactgaactcaagcagagaaatgaatttatcggtgctctcatgttgggtctggcttagggctgtgggtctacagggttttagttacctatggtgtaagattgaatgcttccctgacttacatctaacatgtctccttgccgtaattgtcagactgagttatatggtgatatacagtgtgatatctacaatttaatccttgaagttgaacagaatctgagtggtggtgtcgaattggaactacatgatttttggttctttttagcatatgacatattaataccttaactggttttggagcacttgtgaggtgaataagagatacaagtgtgggaaataactaatcaggtattgctacttgcaggatgggaagatttccaccagtagtaagaacagcagtgccagtggatgggagatttgagcacttagtgctttcatgtaatgcaacaactgatcatgccattatttggatagagagagaatctcaaagggctcttgatgtaagttcctaggccttgaactgtgcagatctgttctctaaactccctagtccatttgtttttaactacatccaacaaccatatttctctacatttcagttaatgctggaagaataccgaacaatggagattccggaaaagcagaggatggagcggcaagagtttcttgttcgagaacatagtgaggagtacaaggcagccctccaacgggctgtggctttggatattcctcatgctatctcatcttcaccttatgggacattccatgaaaatgaggaaggggagaattctagcaggtcagcaggggagatgtcaatgttgtcattcaataaattgagggcaagctgggatggtttcattgagagactgtttgacgtggatgagtctggtcacatagcattcaagagggaccaccctgtaaatagtcactaaaatctattctttgattcaattatttagtattcagtgtaattgctataaaagaaaggattgcttataccaatccaagaatagttcagctagtttattatccaattattattggacaatttgtacatctactaattcaataattaatgaagctagttttgttaatcaattataaattagacacattacaaagtaacataaatgtggcaagaataaaccttgtttatttacttttttaacccaaaattgaaattgccgctgaacttttcttcatctcattagaatcaaacaactcacatatgcgtttgcaaaatcagtcaataatgtctccaagggagaagtaaattctattttcgcttgtagtaaattctatttgtagattaatttaacaatttatcgatgctttgtttgttaattataaaaaaaataaataaataattccaatatgactgtcaattactggcctgaagctggtataaataaatatttattcactaccataaacagaatataactacaatttggggggtgggggcaaatcaataacataatcagcagaaacgtttatgctccttgtactcgagtagcttcgcctgcaataagcatagagtttgagtgagaattgaacacagtcggattctttaagacgatgtatactcgtagcattaaaacttctctaaaacagattatggcaattaagagaaagaagctcgaacagattcagaattcatcagctagttcaaatagaaagttgaacgccataccgtgcattttcttaacaaaatgttcaaattccacaaagttgtgtctttccatgagatgtggactgaccctaaggtaggtaaatgatgaaaaatgtcttctgtctggatcagaagatggcttagcgtcatctaaaattttgttatagcttacttgatcatgacagggaagagaattttcattggcaaccggtacgcagacatcccatgctgcgttcagcacctgaaatagaggttcattgtcaagcattggaacaaaatttaccaaagaatctaaaaaagcccattgcaagacaacttcctatctttgccaaacaattcacattctttcggaagggaaaaagaaaattgctctgccctgaggcttttggttggcacatagtttggaggttaagcatacgggtcagatcatgcaattgtttaaactttagatcaggaaattatatataaatatatttatatagatctttgatgctgacaatgagatttcacaattttgaagcttacttgccaaactaatccctcagggtcagctagggcctcttggaagtcctcgtgatggtttagcatgtgcagttcagcacatgtgaagttcagagcagccccgtgcttgcttagcattgacataattgcagcatagccatcacgattacatgaattatagaatccggcagtcagttcagcagcatgacttgccgtcttgtaccaccaatgaatacctgatagctgctcaacaattaaaatatagcaaacacttgatcaaaaagcctaaaagaatgacttctatggctccaaactcaattgaattctcctttagcttgggcacacaaaagacccttagattaagaaattttatgtctagaatgtgcacattgtaatatttagagtcaaagttcagccaaatcgtgttttttctgtgatacagtggaaaaaaaaggaaataagagaatattttattgaattggaagtggagccagagcaatcaaacaaaaaaaatacacaaaataacattgattgaaaacaataaacaaaaaggcaagttacctttgtagcaatgcaggtgccttcaaaagccaattttgcaagacaaaggactcgatcaccgtgatcaactaaaaccttagagtaccaattaaggaagaatctgccatagaagccatcataatcacctccgtcacaaaagaaaccagtttcatgaggccgggaattataagaacctgcattatctggtcctctagcccaaaaggagtgtcctctttcctctgctgccttcctcagactttttagcaaatattgatcgtaacactgcatgtattcaaataatttattgttcaatgctcaaatataattgaaaaagcttttgatacttaaaatggtttttttaaaataaataaatacatttataaataattattttctcaatcttttttttctttctcaaagagggatttactggagggatgtaatttcataagagaatggttgaggagtcatgtcacactaaaacaaagttctcaagaataagatccaacttttacatacaaattgtctcccaatcaggtcttgtaaggggttgaatgctaatgtaatgacttgatattattatgcataaggagccaagacaccaaaatgtgtgtaatatatatacaactacaaaaatataggtaaccaaactttaaggactggatgataaactacctggaattcaccaatgccaggatatctccaaccatgcttaactggacaagaagggtacctcagctccccacatggacctagtccaacttgaatcatggagataataccttcttcaaagaactcattaaattctatccggaagcttctcatgtagtcaaagtagacctgcatcaatcttaagatttattagagcactagtaatctattatttactgaaatacaaatacaataaaaaaaaaaaaaa

SEQ ID NO: 188245 - DNA, 1450 bp, Cannabis indica
tcctaatccaagaggaacaacttcagaagcatcattcccatctggcttctcaatgtacccttggacaattttctttatgaacttctgcattcatctctattttcgttcactggcagaactctgagaatctttatcgacaagtgacaaatcaatcctcttttaaatcagaaacaacacctgcatctaaaggtccaggctgcaacacaaatactacagttaccatctgttgctccagctgcctgtgaggtgagataaagggcaaaagtagttttctccaagtatttgaaaaacaaatataaataaatgaaaatattcaaaagcacaagctaacattattgagagcagttagtcgttctatttatctgtgttgttttctatggctacaaaataatattgaccctggccaaactcactccctcttatggataacataagcatctagtggaagcttctattgattcaataaacaagtagaccttcccttttcatcagattattgatctatgctggagaaattttgatatgaatggtgacagataaactccttattacaatggcaaaaacaactgctctcactttggaatgaaaatatgccaattataacatggaattggaaaatacatactaatttacattaccaaattcaaatggacggtataatatcccctgttcacgaataataatgcaaaaaatacatatgcagttaagagcatgcaatgcatatgcatataaacaaaaccagacgattctcacgcactcatttcctattcagtgctgcagattaaatttttggtctgaaattacagcccattttatgtttttgcttaggagataaccccattttatgagttgacaaggtcagtctctctatgtaaaacgggcttcggaagccacatttttaaatagaagaggttagacccatttcatattcctcttcttcaaagaacctatatatgaatctttgctcaatagccacattttggggttaaattacagtcttttaaagagtaaagatatgtgcatacacaaatcacacacaaacgtgacaaacacaaatgtgacaagacacttttaataagcaggactcctcttaaataaggataattgattaaaattatttgtagtgcaatgtgtgtcaagtttgtgtgcacatatcattactggtattcgtatccaccttttcttaatccaaattgttgttaacaagcaatgcatgaaaagtttgattgaggcatacttgaaatgatggttaaaactctaggtgccacttctacttctatataaaaatggagataagttgtcacaagcaatacatgccacataatactggcaaatcagcctattgataggttgagaggggtactaataaaaaagataagtcaagatcaatcaagaaaaatctcaaggtgaatgaagagaaaatcaagattgcattcaatctcattcccat

SEQ ID NO: 188246 - DNA, 1725 bp, Cannabis indica
aaagaatgctactattgaaaatgctcttatataccctgatagaaacacacattccaatccacttggtagctttagattggtttagaaagctacaagagttgcaacaacttgtagtcctccgatttgaagttattagggcatggattagtgttttcatattctttgttgtgtacaatatataaaatgacaatcactactaaaaaaaacttttataggtactttttttcagtcactaaaaagaaaacgttgccataagatcccttatagttggtttttttttttttttttcgtatccctttagcgattcttagaatgccaatagttataagtttcgctaaaatcacctcaaaagactatttttatagtagtcagggctgactttaggttaaggcgggttaggtccacgcttaggactcactactattaagggctgaaatgaaaaaaaaaaactttttataaatatatattttttcttaataatattatttctttttaaaaaaaaagattcatttttttttctatgacccaattttactcggggccggccctaatagtagttattctcgtaaggttaccatgaatgagctatccttttgtattgtatacttttgattattatttatttggtgtggagttttcacacacttagctagtagagtagctctcctcatttgtcaaatttcactagactttttattaggtcatctaaagaaaaagagaaagggacatgaaaacaacattaataataaattattaaataatccaccacatgttttcatataaaaatataaaattatacaaagaaataatcaatgcacatattttagtcactcctttttaaaatctttatgaaaacgtattgtgggggtggaagttagatgtggacaatttggtcattatgatccactagtattgcattttacaaaggagagttttatttgcacatcaaaaatttataaatacattttattttaataatttttatgttatttaaaatatataagagaattactatatatatatatattattttttaacttttttaaatgtttctatttgagttgctatgtggattttaattataatttaggttgttatattagtttctatgtaggtttcaatataaatttctgtaaaaatataaaaaaatactgcttttaaagtgtaaacatgaattttttttttccaagtgaaattcttaaaaattatatttatcaaacagaaataaattagatttcaaaaattttatattagaaaaattaaataaaaactgtgtgaaatttttattaaaataaaaaaaatatacacgatttaaaaaatatatgaaaataaaattaaatatgagtattgaaattaacagaaaataatatgagaattttttttttaaaaatattaaaaattatttttaagcttaattttttttttaaatattgggataaacttattatttttgtatttgtggggtgcaaatagaatttctctttacatatatttaagttttattacaactctaatgattcacactaaatatttgactaaataaatatattttacttaaaagatttcgtattttatattatttatattagtaacccaaaagaactaatttatgatataattataacacaactactagtaagaatttaaaatcttaaaagaacttaataaaataaaatatttattaaatcaattaaaataacatattttttttttaaaaagaaaact

SEQ ID NO: 188247 - DNA, 3271 bp, Cannabis indica
acttgaggtgagatttatgtagttagttttttttagtttgttaaattaaatataagaaatttatatataaaaaataatacaagaattaatatttaatttctattataacatgttaaacacttacactctttaattagccattttcttaataataataatatgtcatgtattaatggtatgtgacaaattacgtggcacatatctttgtgacatatctaacaagtggatcaatattaaataaatatgattactttaaatttctagcccaatttgtgtgcattaattttttattttttttgtgtacaaaccattacttggtccacaaaataaacatcaaaattagctcatttttgttttatttactaaatatagattaatgaatgaaacaggtactcaacgacgaaatttttgctatactagtcttgatggccctctttacaactttcatcacaacaccaactgtgatggccatctacaagccatctcgtggtggcaactctattcgaacccaccgcaagctccgtgatttgtccatgaccgaagaattccaagatgagctcagaatcttggcttgtgttcacggtcctagcaacgcagcatccctcatcagcctggtcgagtcctcgcgtagcacgaagaagtcgatgctcaagctttttatcatgcagcttgtagagctgacggagcgatcctcttccattattatggtccatcgtgtccgaaagaacggtctccctttcttcaatgtttttcgtcgtggcgatggcacagtcgtgttgctggagcgtttcaaacttatggccaactcgggcgagtctcagttcgacccactaccgccatctcgacactctccaccatgcaccaggatatctgccatgtggctgaagaaaaacgtgttgccatgattatcctgcccttccacaaacaatggaatggtgctgatgatgagtccttgcaaaacatgggccatggttggagaggggtcaaccaaatggtactcaagcactccccttgctctgtggctgtgttggtagatcgtggctttggtggctcaggcattcaaactcctggtcccattactgttgtgacccaaagggtctgcatagttttctttggtggacccgatgatcgcgaggccttagagttgggtagtcggatggcagagcatcctgcagttaaggtaactgttgtcaggtttgttaataaggagggattgaatggagatagggtaacactaatgccgtcaccgaacaaaagcactgagattagctatagcttttccaccgccacaatgaacagaccagttgaaaaggtaagtactaactgttaatgagctcattgtcacttgaccatatgatatattttactagattaattagttgttacttgaacgaatttttaccaaaaaattttgtgatgcatacaggaactagatgagacagcagtgacagagttcagaagtaggtgggacattggaatagttgagtacacagagaaagttgcgacaagcaacatgatagaggaggtcttagccatagggcgcaatattgattatgaccttatagttgttgggaagggtcgattcccatcaaacatggtggcagaattagcagaacgacatgcagaacacccagaattggggccaattggggacattttggcttcaccagggcaaggcctaacctgttctgttctggtcattcaacaacatgacttagctcacaatgaggagttgccagtctcaaaggttgttcacccagtacaaacaagtaccactagtacaagcagtagtagttccatccaacaagtctcaacagacgttgtataggaacagtaagataatttttagtaaatataatttggtatttcaagaataacagaaacttgaatcacatcatcaaattattgtacacacatttatatgtggcttttttttattctcaatgaaaatatacagtcaaatattatacataattatttttaacactacaatgtcgctcacattttagataaatgtgatttgttgaaaaaaactatcaatttattgtgtataatattttggcaaatactttgagcatatatcacattactctattcacatggtttcagatattgtcaacctcttccattaattttatatttagagtaatgatatgagcaaaataaatataatatattgtgattatttattgagatttttggaaactaattaaattcgagcttgagaaataaataaaatagtaagtaaattagacaagtattttttgtggttcgagagttaatgatccctagtctagaagtcagtgtattagccttttaggctcgtagaatgtattacaagtgatttttaccaagaaaccctatcttttctcattttttttctcttgaggaagaagaaaggttaaagtaattttagcaaagcttcgactatcttttttcgttcttcccccgatttatgtgaaaataaaagggtatttataggctaaagtactgtcatgggcataaacatgacatgtctaggatttttccaaaatatcccattattgaggtaaaatatatgcaaatgtctgactattgggcccccaagattgttcttcctcgtgtggggaatcatccgtacaatggggaccatttttggtggaggacaaacatcgaaaaaaagtctatcttatgtggtaaaaacacccagtaaagctgtcaggcaagaaggcatgtgtagaggttgtatggacactaccatggcctgatgcaaaggacaagatctgatcctatgtcaaaaaagtataatcatcatataaccatctggcttttgcctcacaaatggcgttcgactctctatgctcaacagttttctgctttatactccctaaatggatattcagcattgtcctgccttcatgcattaatcactcttcttcacctctgggagcgacaataagaccttcgggtcctaaatgaataccattaacaatagaggtattagaaaccttcgggtagaggctaaagaaaaaattgttatcaggatcgcgaaaaggatgaagacggcattagatgtagatgaccgtttggttgcagactgggcgttcgcccaccctggccccctgactaaggataaagagctcgtggagagatttgtcacagcatacctaaatgaggttgctctcgaggctagcacctcgaggagaggtaaaaggccctactatttttttcacaccccaagccattatagaataggtgaaatccttaagggttagagtagttgcatgccgcc

SEQ ID NO: 188248 - DNA, 4397 bp, Cannabis indica
taccggaaatgaaaatacagagaggtctccaaccctaaccgatttgtattggaccaatgggttagctgtatgaagcatgcaagtaagagattgccattggtttaagctcaatgagtccccaacaaacattatgctttttcctctaaaccttgtcaagaaatctcgtccatcgaatctataaaatcaacaaccaataatgtctaccatcattttttgtgtccaatccaatttaattataatacaatacaacaaattaaagggattagcgccatatattattataagagaataaattctaaaaaataccgataatgtctagtatgattttccgtgttatattattagtataattaagccggatctcatatcataatactaattaagataataacactaaccaatgtagagtgcttcctttaaatatggtgcctactgtgtctaatagcggcgcttttattatcagtactacccaatacgttttacaattggttagcgatattttttaaaattatataaaactcgatactaattatactaatagtgtattaatttgcgcatttcttgtcttatgatatggtgaggtgaggatgaggaaattcaccaacagcctttatttgggtccctcaaatatgtctttttcctaaatggccatgtagccgccataatgatctattggactactggactagggtctacttccattgacaaaactattaagtaatcaataaaagaaaaactacatatcattggtttttcaaccacaagagattgtggtccccctcatctcatatatgtacattatgtacctataatatattaattaacatattgttctatatatttatatgactgctcattagaatcgtagacaaataggaaacaagcatataaaatagcccctcttcagtcttcatcaccaataaataatgccaataccatgatgatgatttaagcaaattcactcaatataatcgattagagctttataaatttgaagataactctaatctctcttccatgaaaagaagctcatatatgaattaattgctagccaaccattaatgtgctttgtacttatataagaaacttattgttattattatttgatatattaatttcaacctagctaataattaaatgcattaatgtctacaatcttgacttatatgtaaacattgtatatataagtcatgaattaaaccgatctaagtgatataactacactttaatttgtacagcttatttaataagaaatgactaaaaaaatttaccaaacaataatatttatatatttgttgggtggtaactaattagttggagtaaaatttaaggaaaattaaaaacttggagagtgacttttaaaagttttggttggtatatatatatgatatgtttagttacaaaaatatcaatttggtggattggttaatttccaataaaaagttgaaaagcaaccacaatattttaacacatgctcaatcaaaactattctctgcattgaaaagagaaaattaaatttaaattatgtatatatatggttaatttaattaattaagtggccaaaaaccatagagagaaaatactcaaaactataacatatgcagacaaagggaatgaccacatgaaatggacttatccagcactcacagctgtatatatataacacatatttttgtaaattgtaataataaatacataacttcagattatttattattaataattaaccagcctacatattattccactataaaaatttaaatatttatattaatattaacattccaatattatccagcaactattatttgttatgtaataatctaactcatcagtcgtcagttccaacagaactttcccaatcccaactaactaaaggaaaaatacatgacaatcttttaaaaagaataattaataaaaaaacacaaacaaaagaagagaaggggatgaagggtaccttggtaatttgcaggaagagggctgccatctgagcttaaggtagagcttgtcaggtcgaccgttctgtacacaatcaaattccttctctacaaaaggacattttaaggtgtcgtagagtggatacgacgtgtcgtatacccaattaccatcccagaaatcacaccccttcgtcgtagtaattattctcgtattattaataatatcgttattaccatgtactacgaacctgttgaaatgatcatgatgctcaatattattattattattattattattaccttttgcttcgtttagaactaataataataagaggaacaccaccacagctaaaatttgccttattattatgatagaacccatcatcgagagaaagaagagaaaaaaggttttttttttggtaggtgttaattaaaacttacgtgactcaattttgagtctctattggaaataaatgaacttattttggaggctatatatataagaatattgggatgttttttatttgttaaattaatataaaatacacttataattaactttttaaacagagagaaagagttgatgaaagtgatgggctatccaaggaaaataactctatcaaagtttatatgtttatccaattagataatttttatttataattagttacatagcggtggactcaggatttaaagcaaaaaaaaaaatattgttggtgggatttaaactttaacctctaaaatatatgcaatttagcttaattattacaccaaaaataagattatgtttataaatattatatataaattatgaaattaattatattagagaaaaattaaatattgattagctagagccacgtttaagaatctctccaatctctttcagttggtggtggacatatttggtgtggagtgttgaagacaccaaaccgaaggcccttatttttcaggtggtcctaacgaatattttctacaattaatataattcaaaatatataaaatagtaatgttaattattttccagtaaaataataaacaaaaatatataattgtgttggtttggttggtttgtttggaaagatccaaaaatatgttttaattctctcaaaataaatcaataaaaatgttgtgtgtggcttgtttatattatgtgatggactatactaaatgtatctataattatttagcttttcccactaaaagaaaaagaagaagaagaattaaatatctattaacatagctatctaacgatctcttgaatattgattataatatgatcacattattttcataaattaagagatataatatagagctagcttagcaagaaaataggctagggtgttaattagctaattcattgaaaatatgttaatcaaattattgcactacatataagctacattaacccaaaagtggattgaattgtatatcatcaccttcttgttaatggaataacaaactctaagatataatatgtcttcaagatgactaggtaccccaaccgtttgcactgaagaagactatgctatataggctttagggacatgcgattatgttgaaatagttgtcacagaaaataaaaaggaacgaatttatcgaattaaaatctaagttgaatcgcgaattaggtcgctctctttaaaaagttagtagtagtactggctagaattgtgcaaacatactattaacactgtgttagaagagggaataggctatccaactattattggagaaagtgcaaattcccactacaaaaaatattatttttagtcacaacaaaattcgtgactaaaagtacaaaaaaaaattacgactaattataaattaacattcttatgttgtaactaaaagttctgtgactaaatatattagtcacaaaaataataatttattgtgactaaatgtatttttagtcataatactcgttatgattaaaattaaattagtgacaacttgtatctaaatattatatttagttataagtaacttttttttgactaaaagtcacatttagtcgtctatagtattaggtatggttataaaccgtcgcctataccctatcataggcgacggttttaagtcgttagaaatgaaaaaatggcaacggtttcgaactatcgtcaatcttttttattttgcgacagtcgaatagacgacggttatagaaaccgacgtgaatactttatctgacgatttaaaaccgtctgaaaaattatttttttattagtggcatgaagattaactaagaatttataattaacactccttaaaatatgaaatgtaaaattcttataaatatcaatccatacagatcagtctatcctacacggcaaacaagctcaaaaatattatatttgatgtaagtacaatttaatataaaatttcacagtcataacattaccttaattataactttaattatgttcctcaaaattaaaataattgagtatgtta

SEQ ID NO: 188249 - DNA, 4188 bp, Cannabis indica
gtactttctagatttttgaattggtaatgaacattggattgctttatctgtacgtgatgaaattggatttctaatttttgtttaccattttttagattattatattactataaaaagtacaagtaatagagtaatatagcgaaaactttatatatcgtgaaatctgatgtttaaatatattatcgctactcaactttgattttgctcgacccaatcctgattaagcttggaaacgttcgcttagtttgaaatcttgttttctcactcatattgtcgtatcatattttttagtgcatacaaatgttagtgagcggtgaagtagattctataatatatgataaggaagcctaattctaattatgaggaaaaaaaggcttcatatagaacaatctacatctacttctgcagtgcaaatgattatggatttaatgagactttttttctttaccagatttataacattatatagtcttagcaacagttgtacattatatagtcatttgttatttttatgtttgtaattaatattgttgtgaactcagattgcctcgtaatgtagttttttggttcgagacttttgctatttggatatagagatgtctgattgtatttgaataagctaatattaagtactaatctacatattcttatgattttcaaatttcttgctttcagaaatcaatatacaaggagcctcaagagtcaaaggtttgtctttcagctcagtttccccatctgtttttcaggttttataattgaaaattgttttctttggcagatttttttatataacttgtgtttttttattacttttaattcctgttatgttttttattagaggttgtgtggtgtgaaaaaaagtggtcttattactttgtttcaaacattgttttttgggtgcttctgatgaaggcttgtgatggaatactatttgaattttattttttcccattttatcttttgccttctcatacatctacaatgttcgaacttgccaaggttttgtaacctccattttttcctggtcttctttctctcattttctttttcttatcacagtgtatattttgtttctgggttgaatacttgtccctttctctcatagaactaaccttttcaatttaaatagttattcagtatgtctttggcataaaaatgaatggatacggtttcccccattcacttcatagacagggatggtgttacaagtagtgttgcagttgaaggcatatagaaagtgatattttctaatctttctcattaatatctggtttaggaagttccgccgttggatgtgcctgaactcttggcatctctggttaggcaatctgggcccttcttggatcaacttggagttaggaagggtaagtaattcttaattgctccttacagataaatgggcatacttcattttgtttcttgttgtacaactgaagcttaaaactttttttttttattttactgttattattaaacattttagctttctatgaaagacatttatacctttttatttgtcacttttttgggggggcttctcgctgttaaatgcatcctatcaattagacatacaaaacccacgttgatttttactaaatgcatttcaaatgactgttttttgcttgttttgttttgtatgagcacgtggttcaaattttgtactatcaattagacatttataagaggatgtatgtgggactgctactcctttagagttttaattgtgttcccaaaatgattacagatttgtgtgataagatagtggagaacttatgcagcagacgcaaaaatcaattacttttgggctctatatcttcagaagaatcctcaatggtagagaatgaaaatataaatgatgaattggatttaaggatagctagtgtccttcaaagtacagggcatcattatgaaggtgggttttggacagaccattcaaagcatgatccacctgatggaaaaaggcatgttgctattgtcacaactgctagtcttccttggatgactggaacagctgtgaatccactgtttcgtgctgcttatcttgcagagtcagcaaaacaaaatgttactctactggttccgtggctttgtaaatcagatcaagagttagtgtaccccagcagtctcacttttagttcacctgaagagcaagaaatgtatatacgcaattggcttgaggaaagggttggttttagagctgatttcaagatctctttttatcctggaaaggtacatctttcacaaagtacataagctactttctatttattcatatagtatgaatctatgacggatactgatatgtgatgttgttgtttcttaagttttcgaaagagaggagaagcataataccagctggagatacttctcaatttatcccattcaaggatgccgacattgctatactggaagagccagaacatctgaattggtatcatcatggtaagcgttggactgataagttcaaccatgttgttggcgttgttcacacaaattatttggaatatatcaagagggagaagaatggggctcttcaagcattccttgtaaaacatataaacaattgggtgacaagagcttattgtcacaaggtatgtaataatttattaagcatacagtagctactagcttacccaacattatatttattggtcaacataacttaatcctctgccatctttatcctaggttcttcgcctttcagctgctacacaggatttacccaagtctgtgatttgtaatgtccatggcgtaaatcccaagtttttgagaatcggggagaaggttgctgccgagagggaacttggacaacaggcattctccgaaggagcttatttcttaggcaagatggtctgggcaaagggatacagggagttgatagagttactggcaaagcataaaagtgatcttagtggctttaagttggatgtgtttgggaatggagaagatgcccatgaagttaagagtgcagctcaaaggctagatttgaatctcaattttatgaaaggaagagatcatgcagatgattcccttcacaggtaaagattattggaaagctgcattacttatttagttgtacaatggcgtatgtattttaactcatataaagttaatcatgcatcttgtatttgcttgaaggtacaaagtcttcataaacccgagtgttagtgatgtactctgcactgcaacggccgaggcacttgcaatgggaaagtttgtagtatgtgcagaccacccatcaaatgagtttttccgttccttcccgaattgtttgacttacaagacttctgaggacttcgtggccaaagtgaaggaagcactagaaaatgaaccccttcctcttactcctgagcaaagatataatctgtcatgggaggctgccacccaaagattcatggactactccgagcttaacaagattttgaacaatagtgaagaagttaaaaaattgagcagcagcaagcacatgactaaatcagtgtcattgcccaatctgtcagaaatggtcgacggaggattggcatttgcccactactgtctcaccggcaatgagctactcagactttgcaccggagcaataccagggacacgtgactatgacaaacagcactgtaaagacctgcatctcttgcctccgcatgtggaaaatccaatctatggctggtaagaagatgagaaatctattagtttcagttgtattattttttacttaggtataggagctatgtttttagcaagaaagtcatctttgtgtttattaaaatgatgtatttattattacctaagcatctgaacttagttaaattcaaattttgttggcttgatatggctagtaagttgatcagtccagtcggtctcagtaagaccttgtgtatactacttaggcgtgtaggtatatatataaatatatgtgctctgtataagcctgccaggtttgggaatccgtaggtttcttctaattctctctttgttgtaggtatttgtttttgtagtatatgaatcttgatagtgaattccagtcgttttgttcatgacaattaactgtctttcttaccacggtttcctcattcgtgtaaagacatgtttctaaataagtaatgagaatcaacgctattaaggtagtcatttctttacttttgttgagtaaaaattttgttaaatatgcaataaaagaaatacttctcttac

SEQ ID NO: 188250 - DNA, 1441 bp, Cannabis indica
gagtatgagaaataaagttgttactgaaactgaactataaactagaactgaaagtttttttcacttttgcaagattagaaatggcaaatgggttgggcccaccccgacccgcaccattagcgctcttgaaccggattgagtcacacccgatccaaatgtttggccttttttttaccacttaaattcaaaacccatctcttcatttccaaatataaacagaacaaaaaagtgaaattaacaaaatgggccaaaacccatgtgaaactattgtaaaaacacacacaacacactcatcaagaaatttttggtaatttcttttcccaaccagagaaagatgaggtaaaaattgaaagaatagtgtttgctgtaataatcagaggctcttttaaaggatcgaccgaactgacgaacacatccaccggtgctaaatgattcggctcgccttctcgctcgaactgaatcgaagattgagaaggttgtcatcatcaacctcttgatcattgttagcatcatcattattgagaaggatccctcttctttcttgcttaaccttccatttttctactctgtctttccactcatcattactgtaaacttctttctctacttgatcaaattccttgatgagatcgccatactccgatttgggagctacagtaaaatcccgaggaaagccaaagtgagagagagaaagaaagaattagggatttagggatttgaattttcaatttcaggcatttttttagttaatgtataaccgggatgggttagccctgacccaaaataaaactaaccggggcaaggcagagcgaagacctaggtagcaacccccgggtagcaattcggttgtcctagagcggggctgacccatcaggtcggccccaacctgacccgcgaaaaagccccattttgtcattcctacttgtactctaggcttagttgagtgtcatattggttagttgaatttgccagctaggcagattcatattagagttagttaatgacagtttttgaaaattagttaatgacagttagtgtcattgatgcctataaatagagctggtgctcgggcgggaggtcaggacgccaaaaagctccatttgccattcctacttgtactctagccttgaggtgtcatattggttagttgaatctgccagctaggcagattcatctttagagttagttaatgacagttagtgtcattgatgcctataaatagagcttgtgctctcatttgtttgtaacctctatctcagattgtaataaagcttgtacagattcaatttatgaattatagttgcttctgtggttgttttcggtattgtgcattgagttgttcttcctgtgtgagatcgaggacaattcccaacaagttcatttcacacataaaatgacacacaagttcttacattctctcgtgaatatctctcttgatcta

SEQ ID NO: 188251 - DNA, 3683 bp, Cannabis indica
aaaaaaggtgatttttttatgtttaaaacaagtacttggccaagccttgagaacgtgggttgttgttggattagactcacagccgaaataagttcacaaagctccaatttctctgttgacttacgaggccaacatgggttctcacggaatgcttgctacaagggctgtacagaccgagatgccggtaatggttcaggtatgcaccccaaaacctcatctgggtttcttcaatttccttacttttagctgatgtgatggttgttgtttttgcagattcaagaattggtccgaggagtcaaaaactctatgtccttggctcaggtacgtgtgcttagttagattgttgagaaatgtggattcttcattaccttttttagttttccaatgtgttattatttattataggtctttggggttagagttgagtgtgattagtttttatttagctgttcctactcttggatttgtgctttaattcgatcttgggaatggaaattttgagtattgagaagctctctagtttaacatttccccccttatactttagttaatatctctaatgaaacatgagatcttcactgatttctaggaataaagaacaatgactttgatctacgtggatgtaatctcatgcgaaaatttgtgatcttgatctttgtgacaaattttagagagagcttcagtttatgatatgataacattctttttttattgcttgtgtttcattttaaggatgtatttggtagtggcctttgatttttttggtgaataattttttttagggagttgttcactggcaaccacctacagaggcactgcacaaggttaaagagctactctgggagcctgcaattagcaagtacggtgctgatgaaggagttcctgaactcagggaagcactgactgaaaaggtatattcagctgcattgtttccaacaattatgatataatctacctctaaataatgacattacattgaagtactgagattgctcccttaactattttacatgagaatgaatgattagtcatactcagtactgtcctgatagctattctattagtctggggaacatgacagacttgttgagttactttagttttggtggattggtgtgagaagcaacccagattaggtgtactcttcaatcaatgtatatgttaccatgattaaattaaaatacaaatgacaaggctagttcagacatcattattcacatcagagtacgatttcttctatttctgatgggttaggagtttctgggtgatattcataggggtgaaaaagtttccaggatgttcttggtgttctggggtactggagttgggggttaattatttacgaggagagttaggaaccattatttgagtttggtgtcttgggaggagtaactaaagagaggagactttgaattttcaacaagttaaggagaagaaaatcagtgattgcttacattttaacaggtcttgcctcaaagttttggtcgcttgttttgttacagaggattttcctgtcatggtttgtgagagaatcagtcgtctgagagggtaacaaaacagcaaatttaaggcatccttatatgtcaaatggaagattcaagccaaactttctttctcttattgtgtttactgagtaacctcttgacacatgtgaataagttctcttatttagtaaattttgcagtagagcaaattgaaaatttgtactttttctcgataattatcttttagctgattattctttttccctttatgtcttgcagttgcggaaagagaataagttatacaaatcatctgtgatggttactgctggtgcgaatcaggtgacacggaatgcacttctggatttttgcttagactaacacatctcctttttccatgtttcgttttactggaatgagttcaatgagggatatcaggctttaattttagcatcttttctttgagcactgtatttcagaagtcatacgtgaacgtgaatagttgcgtggttggtctgagatacaacgtgaacctattttgatagtaatggaacctggcaaccacttttagaaatgtggcgttaacttagacattttctttgcaggcatttgtgaacctggttcttacattatgtgatgctggggattgtgtagttatgtttgcaccatactacttcaatgcttacatgtcgtttcagatgaccggtgtcaccaatatactggtcggtcccggtgacccaaagacacttcatccagatgcaggtgagaaacttggtttttttttagtttttattgttcatattacatctttgtttggattatgcatctttactctgttaatgttcagactggttagagaaaactttggcggaaactaaaccagtgccaaagcttgttacagttgtgaatcctgggaatccctcaggaacatatatacctgatcctcttctcaaggtcttgtttttctctctcacacgtagctgtgaacttctgtactattaatcagagagaaaaatcttaaaactctaaccacttgatttgtttgtttggttgtttgcttttctctgattattttcttattggcttgaacagaggattgcagacgtctgtaaaagagccggatgttggcttgttgtggataacacatacgagtaagttagaactttttctcatatccaacatttcatgtcttttataaatatgcaattgggttttatgttggtgaaatttagtttgaaacaaactgattaagagatgagaacccaatgggaaagtgatcaatgcgctattcgttctgattacttttgaatgaagcatactgctactggcatccgaatcattttctattgtgagttttacaaattggttttacaggtattttatgtatgatgatttaaaacacacatgtgtagagggagatcacatagtcaacattttttcattctcgaaggcttatggaatgatgggttggagagttggatatgtaagaaacaacaccttatctttcatgtcttttcaacccagtgttgttcttactttgagaaaaaaattatatctttcaattgagtccaatattgttagttgctaatctagttcttacttttgtacacacagatagcatacccaacagatgtagaaggctttacagctcagctcctaaaagttcaagacaacattcccatttgtgcttctatattttcacagtaccttgctctctactcactcgaaatgggacctgaatgggtaaccgaacgagtgaaatcccttgtcaagaacagagaaatattaatggaagccctttctcccctaggacaagatgctgtcaaaggaggtgaaggtgcaatatacttgtgggcaaagcttccagaagcttatgtcaacgacttcgatgtggttcgctggcttgctcaccgccacggtgtggtggccattcctggaagtgcatgtggatgctccggtagcttaaggatatcttttggaggcttagtggaagatgactgcagagtggcggccgagagacttcgcaaagggttggaagaattgatcagagacggaatggtgcagtaaaagtagtagcaactgtatgttaaagtgtttatacttggaaaaagttataacaagtccattttaccagtttgcaaactggggttcttatgaataaatggctgatgtctgatgatgatgatggcctcctctcaattt

SEQ ID NO: 188252 - DNA, 1261 bp, Cannabis indica
tatatgatcataaaaagtgcagttttaatgtatcagtcaacgaaattatacattacctcagtaaaatttttcattaaactaatgagcatggaactgtactgctcaacagtgtaggtttttttgaggtaagaattagtgtagtagttctgtataaagtcggtagtgccagtggtcagtacataaagagcgtccttcataatggatttagctttactctggccagctacttcagccagctttgattggtattccttgtaatacttcaattgctgggacaaagggattgcgtgctgtagaaaagggtttcggtattgaccaattaagttagataaacagaactagttagttaatgcataaaaatatagcataagaagtgttacattttgagttgcagttttgtcatagtaaccagaaccagctgaagcaaagttggctccaataagaagtgttttccctgatgcttctgggctaagatatgcaggtgcgtaagacttgaaacctaaagtcccagctgcacaatatccaatttaagtttgctcatcaatataacaaaaaaaacacaacgtaccatgcatgcatgcatacaagcctacaacataatctagtatttgttgttgttgggttttaagttaagtaattaatacttaccaacgaagtcagtggctaatttgccattgcaaaatcttccggtaggttggtgattaacgaagtcccttccataaggaggtttgtcagccctgaaaagagtggagagatagttgttgttgcccacatcgactatggagtcaccaaaagtaatgatcgctggaacaatagtgtcctgtgcattcccaatatataaaaataataatccacatacacacattaccaaattcaaaaccatgttagctccttcttcttctttttgtaacactccctatatgattaagacactattgttatgcaagtttcgtaaaagtgaatttttcacaatacatgcagtaacagctaatactgattgttaaatataagttacaattctgttaaactggtccatatatatatatgtatattattcaagtaaaaagtgaacttagagaagcggctaattaaggagggtcggcgggagttgtgtttgatcattgaatgactcttttaatggctttctctagctaccactagctaaaaaagtgtaactaactctcaaacaaattgtatatgatattgtgttaattttttcgtgccttttcgggtgaccattctctctctctctttctttttt

SEQ ID NO: 188253 - DNA, 1970 bp, Cannabis indica
acaggtaatgattttactatggcaagtacttcaatcatgcacgcatatatctgattattttaacctagtgttatttttttatttttcagaggagaaacagaagagcatagatatagagagcatttgtgaattgttaaatattgttctaggatctgaatacccttcccaggttgaattgttcattgagtatttgaaggtgagtttgtatcatgtttacttgagtttacaactgtgatggatgtatataaccttttcaatatcacctccagaaaaaatcctatttcacccactttactttggagaagatgttttattcaatatattaattaaagctgttgattacaggataataagtggagaaatgattattaacaatttcttttcttctccatttatgcagattcagaatgattacaaagtcataaacctggatcagtggatgggcttttaccggttttgcaatgaggtatatccaggggagagggcttatgcttctcaagtttattagaaaatttattcataaaattcttacccaataggttaggtgctatactgcatttgaagattttggatgaagctatattgatcgcctctataatagtgttgatagcaaatccacccctttaattccagcatgtagcaaatccacccattttttttacagcttgattaatctcaccgtaaatcaccaagttcaatttttagttccatgtcaggccaaccttccttacacttataaatgatgcacatttagcttagtgtagtttcgatactacaaatgaccaagttctagcgattgaagagcgagttttaaagcaagagattgacaaataaactaattttattttagtaggttgaaattttctatttcgtgtatcgtattttcctatacactcagctttttgcagactcaactatgcacttgatgtaatgatcctctaactttttatgcccctcaatgccatgtgtccaacctaattcattactgttgatccacagattagttttccaggccttgataattatgatcctgaactcgcgtggccattgatcttggacaattttgtcgagtggttgcgggagaagcgattctgaagtttaaattttttcggtcgacttggttttgtgctataaaccacaaatactgccatagtatgttctccggaatgcatatgtttcataagtgaaagtgctgcaattttttctcgctatatttaagttcttattaatgtcactaagattgataattttcttgcagggctaccaaaaactcacacatcaaattggatccagaaccagaaaccgtttttgtttctcctcatcttttttcaagcataatgtcaaatgctcaaaattgcccacattggaaatttctgttagtaatgtgaaatgagtgcttgagagaaaagtcttgaaacataatctccatttatcttgtaatttgaaatttgatacagtggatactaatcatactactactactactgctactactacctaattgattgtttgttgcaagttatttcaagctgattctattattacactcggaacgttgttgtgtattattatatattccaacaatcagacatcatgaatctcttaatatgttccttttcttaatattttagagtccgttagaaattagttttgtaatttcaatctctagatatcagaacaagaccatagagaagaacaatccttacatgtgaagctgattagttgcaattaagtatgtgaaatttgagtttctatgtttaatggtgcaccataattagaaaatcccacataattttccatctaaaaatgacatttttcctattgattccattgttcttgatagagaaccgtccatacacctggatgaagagcaacatcagccgcatgtgtgtccacgccgtggtgatgtgaagtggcagccgccttctcttgggacttttaaaatgaatattgatgccgggttttgtcat

SEQ ID NO: 188254 - DNA, 4861 bp, Cannabis indica
cttagtgtgtctggcattattttctacattaatagtgtgtggaaacttaacacatggacagctccactcatcattcatcaccaatagataaaattccatacttcttagcctacaccctatttcattttccaaaaactacatttccacaatctaacaaacatgcaatatagccatcgaaaaaaaaacaaactaacatgcaatatgtatttgtcttctatttgagtaacaaataatagtgtgtacataaaatgtgcacaaaaacattacaaagtggcaacttttatcaaccaatcatatagttaaaatgacttgccatgtcgcgtgtaatactttcgtgaacattttgtaagcacttatcattactcttgttttgcaaattggtttgaaaaataaattaatgaaagtcttttataaaaattttactaaacatacaaagaaaatttatgatgtatagttttgaaaaacaaactacatacaagtttttattgttaaagtagaatagtttcatctcacaactttaattaacagttccttgttaccctataaaaaactatccaacccaacaattcaaagtgtatatatatcaaaaaaagaaaagaaaaaaaaaaactcacctctatgctaatcatgatgccagtaagagagctggaattctttgctatggctaaaaagtcagataatgacacaaaacggccttcattaatgttcgctggattccggtataatgtgaatgatgaataggggcttaataaaacagctacaagtaaacagaaaagaaataaatacaggtttcaaataatttttcatgagacaattcatcatttcctgcctaagaagtactacagcagtacatagatagcacaacttatattcaagaacaaaataagaaacaaatcacgcaaatatttaacttgctcagaataaaccatatctaattgataaaaataccaaagacacaggcattaatatacttgatcaaacattttaggtattctctcaaaaacaaaaacattttaggtaaactcattgatagcctttgaataaataagtagtataatagattccaccagttacttgattagaaaggaaggaagtcagtaagtcctttgaatagatattttaaaaagcacactatttatctcctaaaacagtctatttttgttcaccaagtacactccaaagtctaagacgaagtgcctaacataaacctcttaaagaggtaatcttggtaaccagtcctgcttttgggaagatgtttctccaacaaaaacacttctttctgtgataaggactcatttttcgacctagtacaactcccacaaagcacttaatgacatgaatattgtaaaatataggccatttatcaataatgataaaatcacaagagtattatatctaaatgagcaagcacatgagaattgttatattgtaaagtaggtgatttttctccacaaagatcgaattacaagacactacaggtaaaccatcaagagcttgacaacacttacgttttaacttttgaacatcatcccatgtcaagttgaaggagaatattccagtgccattctcaatgatctgtggaacactcattttaaaattgctaaaactagaattagccacatttgtgctacttaatagatttatagaggttaaacaaaatggtatcccatcctttgatagttggactggacagtcaagtacatccacaccatcattaattgccttggcataagccttgtcagtacaaccaggatagtctccacttgctccgcattttgagataaccaaaggctttgctggagatcatgatcacattatgcaagaaacaggtaagaaatgaaatgaaaagtgacaagatcaatcagaaattaataagaagaaacaatttaaacagagtaataccttgttttgtagcgttgtttcctaggtgagcaaagcattctgtagtgtattatagaggagtcagcagcttgaaatgatcataatttatatagagacacgggaaaggtttcaccaaatggttttctagtatttttcccattttgaaataggcaatgaattaagccccttatttttggtcaagctatatgtatctttctgcaactaatgaattaagctcttaagagagttcaaactgcattgagctaagccagatattttgggatatgtttttccagagttcatactgtacgtttaatccaattcccctagtactattccctcttcaatgcaagtttatttgtttgtaaagaaaagaaaaacaaattgtaagctttatttcttatgatagagagaaaaaacattacctatggccgctgatggagtgataggaaaatcagataacaccccatcaacactgaatttcccattgtcaaagaagttcaggtactcagctactggatcatgactataattatagcttagagggacatcattcataaactccgatgcatatacctccaacccttctttgtgagcatccaagacaagagaagtatgtggaagcaaataagattttgtgttggtaggccatatgtaacttttaggaacaataattccagaggcaaacgttttaattaatttaagatttttcaagaaaaaatcatatgtccggtttgatgaaggatcaacctcattttgtgctggaaaccgaaagactagctttgtcactgttgtattgattttttgcttgatattgtttaagaaagccatctctggcgatgagatataattgataactgccctttcagatagcgagagtacaaaatttgtcatacttaaattgtgttttgtaaagaatgaatcatgctgcaaaagcagaagaaatgagaatataataatacctaaacaagagtaggttatatagttcagaaatagagtgacttgaaatctggtttaaggtaggccaatcacttacttgaatatttaaccataagtttttggtttgatttctttaatcatctggtcaactgagagaattgagaatgcatttccatcaaacttattcgtgcggctgaagactccttgacgaactgttaggaaaacaaaacaaattaagatttaagaagaagagtttctcaacaaacataactgaatccatcaagcacaacaaacccatgtaagagctagacaaccaaagaaaagaaacacttgaaaggagtgtagagtacgtagttaccagagaagattgatagctgtttgaatttgtaatccaacggaaaccatccagtgatagatttgccattaacaaggtacgtctttggcttattcctagagaactcattaatatcagtgccattgtctagcctgatatctggaaagcaaattccaataccatctttggttaattgcacgtcacaccacaacactgtattgggtgaggtggcaaccgatgtgaacttgtacgcagcatagcttgaatcaggaaatatcccagaaaatccaccatgggcaatcaccacaggcgattttcctgaaatttaaaacaatttttttcaaaaagaaaaagtaagagattaatcttaggctttcaaaatcattatgtgtattcattaattacaatccagagtgttttcattgaagaaaaaataaatctccacctagcaatgaaaagaaatatttaaataatcttaatgaaagaaaaacggtgactgctgagaaaatccttttaaccaagaccccaaacaaacaatactcagttctaacagcataagaccagaagagccatagaaacacaatatacagtaccgttaagagttagccatggaccctgaggttgaacagagaccgaagctagtaccaagctgaggagaagacaaagtgagagtagagggcgtgcgttgcacattgtcagataatagacctcgccagggagctacttgagcttctgcaatttccaataaattctctttctctttctctttcgttgaagcttgtggtaaaatgtgggagaatttttttatcaggtgagatagcctcatgatcacatataaatatagatatatgtgtgtgttgatcaaaattgagagagaagagaaagaaggaagggaaggaggagagagaaataaggagttgtgagctctgaagtcagaacgtttcagcatgctaactatagcaatatgcgttttcattcccacgtaatttttgggataataatgtcctcattctctgtcaacgtaatttggactttatatctatttttacacaaatactctcaaattgcctaaatttttacacttcaccttcggaaaattaccacctattttttcatacataacaattactgtaataaaatgcacatttttattgattcaatactatatttataaaaaataataaaacgttttaattttttttattttattcaataatgagttttaattttaatctccactatttatttaacaaagttggtgtctttattccaaaaataaataaataaataaataacaaaaacaaaacaaaaattggtgtcttaaagtggtttcattaagcatttaaaattggtaaagtttgatgagatagatataaatagatcaaatttagtacacactcccctgactacttagaactaaatctatatttataaacatgttcgcaattcactttagcttatgacgttatgactctcaccacctgagacacaagcacttggttaaatatcttagagcactcactctctactctttttccaaaatatctcacaataatactattttttttattttattttaccttaaactttaactttacacatattatgaaaacggaaacaattaataatttacgattcagtttaccgaactaacaaatacacgacacaatcaagaaaaaatatttcaagagatctcaaaattcaagt

SEQ ID NO: 188255 - DNA, 3795 bp, Cannabis indica
tatgtgttaaatagttttttttttttttaaaaaaaaaaaaatattatttaggttgagaattgctaaaagtactattttaatgtgtagcatttctcttctgtgtcatattgttatttggtgtagttaaatattgagtctcatataactttaagaatatagttttttaaaatatatcgctaactaattgtgacacgtcacctatagaagatgttcagcactactgttgtgctcttttatgtttcatctataattttacgtcttaaagtttttatttacaaaaatacaattttttttaataaaaagtaaaaaaaaacaagaaaattaagataaataaattataaaacaataaaaaaaacgaagaaaatcaaaatcataataactataaaacaattaaagaatatcaagttcataatttcataaataaaaaagtttaaaccttcttcttaattaattattgagttttatatattttaatttaatgattattataaaaaagtgctaacctcaagatgtcaccttgtaaatgaagcactaacttcaagatgtgggttatagatgggtatttttcgagaagacttgagagaactaacttcaagtattaaatatacaccaatttgttgactgagtttttcagtaacttcaagaaattgaatgaatatagagagattcatgagactataaagtgattcgaaaaacggattgtatggaattttaaaatagctttagtccacgagtcactgcgttcaattgtctagattacaagttacaatagaagttctctatgaactctgacatgaagactataggagtataattatcttatgttgatagtgatatcaaaaaagtgacatatatacgcgaaactttcccgcctataggagtataaaaaaaaggaatgtcagagtagcgggtgcacgaattttcatgttcattccactttattggaaactttgttaatcacccttcccttctcgtatggcacacgcgaaacgtgtttattgcataccatttacgcggggtcatccatcgagacatctcgcaatcctattaggaaggctgatgatgtagtgtatcaagatatccttccattgggatcgcctcttttcgagagatgccttccccgatatgggatttgagactttcttgttcgttcctcgagcaagccgtgatcatagtgatcattcggtatgtgtggaatctttaacaacaagaaaggttttagtctgatttgctaagcctttgagttaggcctaaatagagattgttgaaattaatcctcttcttcttcatataaaacccatccaaaatcaggagtatatccactttctctgattaagtttgttaaagaacacagatttgcatagattttttctgacaaaggatgtgatgtatcgccagccgagaaagagtgtacttgattttgaacaacaatccagcttaatccgggggtactttttcaatcccttttcttggagcaacaaccttatcttcctcacttctagccaaagacctgctgcagcatagatattagataacaatatgtaatttccagcattcatgggttctaattcaaccagtttgtcaaagatatttgcagctagctttatgttacaattgagccgacaagcactgagcaaagccctccatagggatgcatctggttcgataggcatggattcgataaattctctagcttcatttaaccgacctccacgacaaagaagatcaaccacacaaccatagtgaacaagctcgggatttatcttgaaatcatgaaccattgtatgaaaaagcaacaaccctttctctacaaatccacaatgtctgcaagcagatagaacagcagtgaaagttgcagcatttgggctcaaaccatcttctatcatctttaacaatgcctgaatagcgtcatgtccacgaccatgcgtagcatagccagctatcaaggcattccatgtaacgatatttctcctcggtaaaattttgaagactttctcagcattttgcatactaccacatcttgcatacattgtcacaaatgcatttgcaagagacaaattgttgtcgaaagagaactgtctcctcgttgcataagcatgaaagcattggcctcgagtgagagccgcaagatgtgtaaatgaagaaagcatgtttataatcgtgacatcgttaggttcaacttctgatatcatatgactgaaaagtaagtgagctttctcaccttggttgtttttcacaaggctagcaattatggcattccatgagatcacatccttattaggataactttcgaatagattcatagctgttgcttcatcgccacaattcatgtacatatctgtcaatgcagtattcagtgataggtcgatttcgatacctcgttttatcacaaaaccatgaattgctctcccaatatttagatagatttcatcatcacaagcagccatgatagatatgattgtgtgtgagttgagttcgattttcaaagcttgcatcgcctcaaaaagattccaagcttcacctctcagtccgttgcaagccaatgccataattaaagtgttccacgagacaacatctggacctgtcatctcttcgaaaacatttcgggcagccttgacacaacttaattcagcatacatacttaagagtgcatttccgagagaagtatctatttccatatcggttttgatcacatgagcatgtaaactcttaccgaatctcgttccatcagctaaactcgaacatgaagacaacaatatagcaatagttctcttatcttctctgatgccttccattttcatagcagtgaataaactcacagcttcgtcgtaaatgccatattcgaggtatgccttcatcatcgaattccacaaagcaacatctcgcttggagacattttcaaataacctacacgatgaatctaaacttccacaatcgctgtacatgttaagcaaagcatttactatgaacacatcatttttgtagccagacttaatagctatttgatggatttgagcacctaatttgagtgaaccgagttcagcagaggcttgaactacagctactaatgtaattgaatcaaattcaaaaccttcaacaagcaaaagtacaaaaagactacaagcttccaagtactcttccatgtcaagatatccagttattattgcattccaacttactatatttctcactaccattaaatcaaacacataacgcgaaatttttacatcgaatctaagatagaatccaatcaaagcagttcccacatgggggtccaaatcaaacagcccgtttctcaaacagtaaccatgtatctcctgccccaatctcaacttataaacctccctacaagccgaaagtaaccctacaattgtacgcgaattgggttttagaccctccttttgcatctccacaaataacttaatcgccttctcaaaactacaacaacccacatacccatatatcatagcattccacaagacaatatctttcacacccatctggtcgaatacctcacgggcatcatcaacaagcccacacttaccatagaagtcgacaattgcagtcccaactcgaatatcacgaatcaaactcgtgcccctaatacgaaaatgtactttccttcctttctcaaccgctttcagccttgcacaggccttgagaacaagaggtagagtagctttattgggtgagatgccgagagactccatatgggtgtatgtagtgagattgcctggtcattattggacttggtatgatgcttgatcatcaagttccagtctttctgctcggatg

SEQ ID NO: 188256 - DNA, 3804 bp, Cannabis indica
agagagagagagagtagttacacacgtcatctttcatattttggggatcatttacattcatttggacataacctggatccttactgcaaaataaaaggaaaaatatatatgaagaacggagatgtatgaagaataaacatacgcttaactcgagaacaatttgatgttctacatgctaaaagcaatataatactctgtactcaatcatacctgctacaacggtacaacatgactaacccagctgatgccaggaaaactcctaaccaagcaataaaacctgagcctgctgttaattttggcagatttgacgctgcatgaaagtagagggaaaaaactctgtagaattatatatgatcataacgcggggaaaaaaaaatctgcaaagattggggtagttaccaatgatgacagaatgagtgtaggtcaccaataacataaagatcatacaccaaagaaagggtgcaagtcctagctttgaaatttttccaagacgactgtttccatcacaacgtttgtcaagcagccgtctagcattcccctgcaaatttacagtattaaactcacaattctggttttccttaacatatcataacttaggtccttttggaaaatcaacaagggtgcaaacatggcacataaaagccgagaaaaaagttaaatgcagccacatttgatgatcaaattcattccataccttctgactctttcattagcttctctatatgatttttgtagtctttcatttgaaattaaacaaataaattatggaattttctcacttcacaatagccattgctcattagttagatttccatttacaaaccacattcaatgtatcacagccaacagaatctgtctacagtcttcctaattattgctgcccatgattttaggcagaacgaggcattattatgtgtgaaaaaatttgatatagtagatatcaagtcagaataaagatatggaataataggaaaaaaaaaaccttacacaaacaagaaagaaaacagcacacgacatacaacgaaaaactactaaccaatttaagagtgatttagttatggaaaacgtacaagaaaaaatgcaacatgtctgtgattcttatctgaagcaagctgtgctggagtaaggccagtgttatctgtaattatcaagtcttccttcttgccagcctgtactaatactgtgcatgcctctaagttacccctaatagcagcccaatgcaaaggagtgcagcctgattttaaaaaaataacagaagaaaaaaatcaaataagacatagttcacaaaggccttttttcccctcctaacaataatttgaattataaaaaaagtaccctctttatcttggcgtgctctatgtgcatcaagaaacaaaagaaggcgtatactatcagcaaaacctttgtatgcagccctaaatccagacatagaggagaaaaaaaacccatcaatcaactgtgtacaagcaacaacatcaaggaaatttctaaagtatgttccagcaactagaatgaaaggaggtaaatccaactaaagcatatatacaacttaaaggcagtagtaaatgaattagtattatgatagaataaagtattttgtcagtagtggatcgtgaaaaagaaattttgggcaaacaactgtaaaatttcattagtttatacattaaaaaaaaaatcatgctcatatctctttccttttttttttcagtcatatcactttaagcatatataattaaattaaccatccatgctactcatctaccagtgcagagggcttcttccatcgttatcaggaatgtctgggtcagcattccattttgaaacaatatgatacaaaaaagcagtctggccatattgtgctgcaacgtgtgttgtctgcaatcaagaaaagcctcattgacaccatgtatatttgtaaaatggcactttcagccttttcctattcacatgttcgtattctcaattttaactcattcatacataaattaacattttatcataaggtcacactcaaattaacagcaaatcatcctaagttcatacaaagatatgaaaacgttttcttaataataataactattaaaaatttgctctcacaagctaaataatacaactaaaacctctcttttctaatgcagactgatctattcaaaatagtaagaaactacgacgtagctaaatgccacccatcactttcctaattaatccgtgaagcccaaaagaaaaataaaaataaacgtcaatctcaaactcctaacccatcacacattacataattatatttaggaatagcaaacttcaaaagttatacgtcaaagtctctctcacgaatcacagtcaagatcacctttccattcaaatcagcaaaatatgaaagggagataaaataaacctgatagccgtacatatcaacagcattgaccttagcaccctcctgaagcaaaagctctgcagcctggattgcacctctcactgcactccagtgcaatgccgtctgcccagtatggtccgttgcatttatttcccctccgtgctgaaataaaaaaaaaaacaaaaaaatcaaacccaatatgattttattaaagtctcaaatttcacatttccagatgattaaacagaacttaattgacttcaatcttctacaaccttcaataatgacacaaaaaacttaaacttttactccaaaagtcattaaaaagaaaaaagagaaaagttcaaataatccatgatcattcataacttaaatcacggaatagcccaaattccattacagaacccaaaatggaaacaattaaaagcacctcacaatagaaacttaatcgagataaacaaagagtaggagaaaaaaaaacctcgataatatactgagcagcagcagtccgattattgagagcagcccactgaagagcatagtatccaagaccatcaggctccgaaaccgagcacccttcgcactccactaacctttgaagcttctccaaatcgccgtacgccgccgccgtgtacacatcgttccgcaaactatcatccccgctaacattaacatctccggaatctgcgccgggtgcagcagaattgaccaccagagcggaagactctccatcgcgggactgaaccccgtcgtcaacgacctcgatctccgacgacattgggtccaatctccctcgctccaatgaaacctggtgtgtgtgtgtgtgtgtgttttaccttctggtcatgcaagagaaatcccagagaatttggtactaaacaaaattgggtgtgtgcgtggtgggtggtggattagagcgttgactccatgttaaattagggattttgaccaattcgaaagctctagggtttttccaagaaagagctttggtatgggtttgacttattaggggcatgcgaagaagaggaagaagaagaagaaagagcgagtagatgttaaatatttgagaggacacaaatccaaaaaactcgcctatgaatctcagaaactctttttttacaataaattaaataataaaaacaaaatacaattcttttgtcttttattggatcccacataagtaagtaaaattatttgaattaatatcataacccgttttttttttttttttgtagatgaaaatgcattttatatttgatgaataatcataatacaaaagcatttaagggggaggcatttcctccaaccaagaacaaacagagtccaccgagagagcatatttggcaagtaaatgagccgccgaattggcagacctatatacatgaccgatttgtactccagggaaataggacactaagttcgtaatgtctgat

SEQ ID NO: 188257 - DNA, 969 bp, Cannabis indica
tatttattttgaaaagcagattataatcggaaaagatatcgagatgatgatcgtcgttatgagagctccaagagacactccgacaatgactcacggaagaacactgatcacgaaccccgaccggtaatttctagtgacacccttcacctttatttcctcaacaaagtttggaagctcatcatgtttagtgtttatttgttaaaactaagatggtaaactacatttacccacatataattaatataccaaatatgttaatcttcactgttgaaaacggtttcaaggctgaaaaagccttttaaaacatgtttgacatagatgacagtgttcaaaagaaatgtctggttaaaaccttctatcatatgattatctatatgattggccgcaggttgcacttatctttcttttttcttcttttgagatgtgttttccattcttggttcgtttaccttaaatttatttggttccgcaggagaaaaatccgaggtttcgcgagagcggtgactccgatgatgaagaggaagatgatggaaagcggcgaaactagcaagattcattgtcatcttaccaacaacttcaaaacattaaatttttgttaatttttatagcttagtttgtgcatttggtcgtgttacagtaagcaggcgattaactgagactatcgattatgtcttaacacagtgattttatgccaaatgaaccaaatccttttgtttccagattattgctgttcagttataagtactcgagtcacagaaatccaagcactttgtagtagaaatctcctcatttttctattaaagtcacttgtaatttcattacgaatttacgatcttgaagtacttaaatgacagtactaattactgattgaaagaatttaagctcaactcctaaaaatgtagtcctcactcgcttgaaaataaaattaaatccatccacgttatagtgtcatgtaaattgcgagtgaag

SEQ ID NO: 188258 - DNA, 9173 bp, Cannabis indica
  modified_base (97)..(97): a, c, t, g, unknown or other
gaaatgcaagacaccaacagctaaaaccactgaaaatgtaatagcatgaaatgaaaaaaggtaccactcaaatagaatcaagaacactactcaatanattagatattaactacatgactgcagcttagagtagtaaaccatatactgtaaaatgaaaacatagacagggataaccacctcataatgtattttgagatacaagagatccttcttttaattcaagatttggaatcaaatactaattgcatctgcacgctgaagattctctaagcagtttggatcagttgacaaatggttgatgcactttaatatctgaaaagtccgatttcagcttgattagagacagtttaaaacattgcaatagacaagatgagcaaaatcactttggaatgtaccttcaaaagaattgggggctcaactctattgaacatctgaaagagacgactgagcaggctttggctgcacatgtaagattttactgtcgtatctgcttgtgcaaactcaagcagaagatctgcaaccttttctagataatccctagcaacatcggcatttaatgttgacaccatgtgggaaagtaatccagatgacgttgcactccccggcctagcatttagaacacctgacccagacagtacaccagatgcagtctgagatgcagttccagatgttgatgcaccttcatcagatgatatcggtccaatctttttatttactgttttataagaaactctggtagtggaatcataatttccactttctcttccacgttgagagacatctgtagaaagtaaatatcatttattataatgtcatcattaatattccacacaacatactgacacttagataagtgtagactaaacagcagttaagatagatctgcaactatgcatgtacacaggtgcaaaaacaaccccacaatcaactgtttagtgtagttcatttaaaattaaatatttagcagctcaatcaaaaaaaatacctgcaaattcagccatcaaaaaatccagttcaccatttgccttcttgtcgtgtgcatgtaagagaggtaatatgctttcatgcctttccagtcctgagaagtggcgtacataatcaagctgaccagagaaatgtcttgaagggggttccttatccagtaagcttagcagaggccgaacttgctcgggttgagttgctcctactgtgggaaacccatttactgcaccttctgtcaactttgaaggcctatctgctgctcttgatggatcaattttccaccgctctaaattttctctctctttattaatcaccaaagaagattccttagtacctatatttgatgctttttctgaagatgtttgttcagataattttgaaggagttgaaacatctgctgctacattgctagaatggggtctaccagtatccatctgaggatatcgcatatcagagtgattgccatctaccctttgagaaagtgaaacggaagcacgtgaagcttctgatactacagttgaaacatgatgatcagttggagatggagcctcactctgagaaaaagcgggatggctagcatctaattgaccagatcgtggccgttgaactggtccctcgagtggaaagccacccccagcagaaatagaagctagacgagtagcctcatttaaactatgaagagtgtttataagcctcaaaagtattccattctttgcagctatacgacaaaaatcatttctaggtgtagagcgctgaagcttaaagacttgccacatgccatcaatagctagatgaaccatttccctgtatgtgaagatactaatgagcaaatttcaaactgaaactataaagtattgaacaacgtacacaaatgcacataataaagtattggatttatttattattattactatgattatattttatttttgaattgtattgaaagtaagtaaaacacaaaagggtggagaaaaaccaccaatatcacaaacagaaacgtgatacaagaaaaaaagattagtgttatatcacaatacgggatgtcatggctacttgttggtcactgaggctagaattgaacaatagagcttggggcattatatttgcacccaaaattttgattaaagcaccctaaatcattaaaggttatatgaaataatctttttttaagatttatacttactttttttttcttctaaaaaaatgcatatgaataaaatatattttaaatatttaacagaaaaaataaaatatgtatataaaaattctaatgataaagtgaaaataattaatattaacctttatcagttaaaataaagtaagcattaaaaattaatattaatcattattttttaaaaaataataaaaaagaaaagaaaaatagctaaaaattaataagaaaaaattaactaataatgtaagaaaataaaaattgaataaaagtgttgaataaacttcaaaaataaattagtttacatatgtaaagtgttaatatttgcatagtttttttctcattccttgtcataatctaaaaaatacatatgtaaaataaaatatattttaaatattaagataaaaaacttaaaaagaaaatatgaaatattatacccattattcaaaataaaaaaaaacaaaattaaaaaaatatatattgaaattagcataaaagacagtgaaagacaaaaaaaaaaaacaaaactattaagagtaaattttacattcatttaagttgaattattcttttaacatttcagtgcttatataattttttgggtgtaaatataatacccttttttaatatcaattattattcctcattaattaaaaacaaaacaaacacaaatcagaaacattcactttacactctactaggtcactttcgggtattagtttagcagacagagagagaatatacaaacctgtactttgcataatcagcctctaggaatgccaccaaaacagggattccacgacaagctatgaacatctgcaatgtcaaagaactgcaataacaaaactctattaacctttaggttatattaacttcagcaaaaaatgataaatgaaaagcctttgtgctatatatgtttacccaaaaacagagaatgcacaataagctgtgaacatttgaaatgtcaaggaactgcatcggaacagctctaataaccttgaatgaaaattttctattaaatatgaatgtgtttgcgagtataatatgtctctaccttgactgacaaagctgctgcaaaaaataagcagcctccattcgaacttcccggggtctatcaggtacagcaaagccaattaccatagggatctgtcatgtaacttggtagaagttagctgcatctcaaagtctatcccaatccaaacatattttcataccacacataggtactttggtaaaagttaaaacctttcagaaaaaggaaaatggaggtaatgaagtggaatagaatcgattttcattctattcctttgtttggttgaattctaaagtattagaatgcaatgatttttactattttagtgaaatgactgttccatttaaacgagggaaaagacaaattttttcagcatattaaatgtaattccatttcattcctattattgtattttcatcctttctaaccaaacataccctcaattaactcgaaagccagaacaataaaataggagaaaatgtcttagaaaataatcagtacaatgatataacattccaaactaaatgtccctaaacagttcaaactactttatactatgccacaatagaagagagcttcaataagccaaaataagaaaaacgtttactgaaactaatttttaaccaagtgcatcattttgtcaaatctccaaagccgtgcagttatcctgacaacattaaaaataaaataaaaacaatgctgacgaagtacccaccagaccaacaagacaagcattttcctggaagtcagtattatctttgatgatctgatttatgatttgaagcacagaacaaataacctgccaaaccaaaagtagaccacgacatattagctgtttaaaagtgaactgaaaagtttgacaagttctataaaaaaaattaaaacttatcaagagtaggaagagaagacatacacgagttctagggacctcaagcaattccattaaaggaagcaaaccatgctgggtaacaaaaaccattttttgctcagggcgttgatgaaagatggcaataagtttctgacaagcagacacaatcacttcttctgattcttcaggtttcaaagactgaactaacctgctaaactcaacagccttccacaaacagataaagaaaaattaatattgaaagaaaaagaaaatgcctgtaatcgaaaatggaagagacaaaaattgaatagacatattttttttattaaatctttttctgtaggcactgtttgaaagctcaacaacttattttttgctagacattttatcacttgaacaaaaagagaagaacaaatacaaaacaaaacaaaaaataagattacagagactacctgtagagggaaaagattttccccttgcaacttttcatcaaaaacctgtaatcaaacaaaattatatcagagaaaggatcaacagtttcttaataagacacaaggaattgagacacgtatcataccaaaccatcaatgtcgatcacatctggataacccatgaaatatcttaataagttaccaccaccaccattttcctgccccatttcactctccatttgttttcgatgaatataagcattcagctttgttgccaggtcaactttcccagaatcattgacaggggaattcccttggtttagatgtgatgctgatgcagacattgaagcctctgtagttcggtcttctggatgtctatccaatggatgaaataaatcatccaaggaagcatctcctggagtgtcactaaatctactcagctcattacctccagtggcgattgcctttttagccaccttcaaaaatgaccaaacaattacatttataaataataggaacatagaaacacatatattatgtgattttcggataaaatagagaataatccacattctcagttcatttggagacttaattcagatgcaccctacaaccacaatgagacttcacttaccgtttggcaaaagcaaatcaacaaaaagagctctcaaagtattatgcaacttaagttgttaagcaaaactaagttgtagaacatcattaccgcctaaaatgccaaaaactcaactgactacaataaagtaataactatggtttcaggcctacaaaatggaagttagtagaatatcatttaaaaatgtggatagtagatgttgtgaggctaatgtgtcttcattcaaagtacctcgtgagtattaatttattccaacaccctccccactccatacccaaggattcacgcattctttgaaatgtgatcagaaagtgtttaaaatcagtttgtccccaaaatatttgaggaataaatatcaaaaataaagaggggaaaaaaagaaactacaaacaagtaactgaagggaacacgtgactttcgaaaggaagaaggatcaaacttatgtgtttctcaactgtgtactataaaagctctacaggcatttgagcatcagccaatataatgtcagaaatttcattagaagaaaccaaccaggatagtgtaactctaccttttgaagactgctatcttgatttcttagtccaaaaccagatggtttacttgcaatggatgaagaacttggtttcccatcattttccatcttcagaacaggggaccctacatcaccattgaccaagacttcatcactagaacttggttgaggtaactcaagaagctcagattgatcagtggtattcacaaccctattagaagatacaccgctaaacccgttctgtagggatggcttctcatggatagctaaagtaggaacctgatctgatagatcatcttccggggtctctgtcctttcatcaacagagtttgaatctgaagcaggagtcaggacaggcttcgttatgtctacagcctcggttgatggtaactctttcctggagtcctgcaacaccaaggcttaatgttaatagccatacaatccaatcaggcacataccaaataaaccgaaccttggttccaacttccaacaatagaaaaaaataaggtctcacagctttaattgcagaagcagccatctctactttctccacagaagggcttccaccaaagctaagattatccccgtttgagatttcagcatttgctgggacatcttcttgtatatttctgcaaaaaaactgggttgtttatagaaaattaccaaccaccagacacaccagaaaagaaatccccgtgccgcataaaaaaaaaacatgtgagatatctaatggcaagtgcaccatagtagcataggagatccctggtgtcaccatagataatttatttattttaataagtaacgaaactagattgattaagtaatgtctataataatgatacagaggagattggccccagcatcacacccaaacaaaaactcagacgacgcaaacattgtagtattatcatagatgaaacctaaaatgatattaatactaaaatcaagaagaatagctcaaatggtcaagcatgttgttttcaagtccctcctaggcatgtagttggctagtctcaatatattgtagggttacacagggggcctagtgtaaatacacacacagacacacatatacacacataaggcattatctacaagaaacaataaggcaaagtctacatttaacacaataaaaagagtcaataacacaataagacagaatttaaagaaaaaaattatacaagaaaacaataaagcattatctacatttaacacaattacaccaatctctacacaaatctgaaaacaggaaaccctttgaaatcaacattaaaggagtcaagtcctccaccattttctaatcaatgagactccacaacttctctcccgctgtcagatttgctacaatcaatacacctatatcaatctgaatatatttacaatcaactggcctaagccaccccttacttttcttttcacaaaaacatacattattattttcaagtatgaaaaaaaatacttcagtttaagtggattcaatatccactatatgctagatgagtaaacatacgaaagaatttcatcttcttgaaagatcagaaaataatgctcataatttcataagtcagcaacatcatgcaaccaatagcaattttgtaactatttgataaagacttattttacatataaactgtgacaggttgcagggctacaaaatgatgaaaagcgcaagggtccattccataaaacaaacctcatagtttaccttagtgaggcagtctgtcggattgaagactgcaaaacacgcctataattctgctgtatccatgggtgagaaagcagtgtcttcgcatcaggcctttgcctagcatcctgagaagagcatctaaatatcatatatggtagagaagaaaggtatactcaacaaaatgacatttcttttgattccaactgaaccttaaaaatatacatgttttttaatatcaactaatttagaactcaggagaactcaggagagattagaaattcatgtcgcaatacaagtgaatgaagaaaaagaaaaaagggcgacttgtcaatacattgaatttgcactatataatgattcttctcaccattgaggataacttaacctcatctgccatgtatgttttctatcatgtatactagttttcttaggtggttgaactatctaattccagaaaccctgaagacatccacattccactgattccagaaacttatacatcagaacttgcttagacagaataagtattgatagtccaatctcaccttcttaaagcactggcgcagaaaatcggttatgtctggagacaagctatcaggtattggaggatgctcatcctgaaagaaaagtaaacggaaaaatgaaagataaaaagtcttgaatacactatgtaacgagcaagaaatatcacattaaaggtattttaataaaactaaaaaaaatacaaaacaggaacatgttcatgcatatcatatcagcattcaacatgggaaataaaacgcgataaagagcattatacacagctgcctttagcaaaaacaaatatggcaatagttaagtaaaagactgattctcacacctgaacaatgcgaaataaagctggcatgggctgtagatcatagtaaggaggcacacaagtaagaagttcgatcacagtgcagcctacactccaaatgtcagaagcagcacagacccctgacatttcaatgacctgaaacagtgaagatcatgtatataaaaactagttgtgaggcacatgcaaggcaataaagcatgtgccaccaatcatatatccaaatattttttaaaaaatactcattttcaaaataaatatttgaagaaaaaaaaatatagatgattgttagaatttataaattactttacaaattatagaaaaattttgatgttgtgtttttccattgttagtgacaaacaactatttcttccttttaaaaaaattatttacaatataataaaaatacataaaaggaaaaaattatatgactaaatatttgatataatcaaattatattaataatattcttttcaaaaattatacatctcctaaaatatattagaatagataaaaccaatgaaatggttgagttatgagattttttgttttgttagccaagtctaaaaaaatagtagtaatactaaggcaacaaataaaaatacatggaagtcatttttaaagataattttcactaaaagtcaatatatataaagggataagtttgtaaatatatagaaaggacaaatgattttttatatgcttaagggcatattgcctcatagtctatgtaatgatctgatgattttcaaagatacaaaaaaataaaaaatataaaagtaaagaacaatatttgcattccattcatttaaaaatatcaaaaaaaaaattattcttaacatttttttaagtttccttttttactttttgtagtaatttttttaaacattgcactttatgttattttgataattttgaataaaataatgaataatttaattatttctactttaagatgcaaacttttatacatcttttgtttt

SEQ ID NO: 188259 - DNA, 2145 bp, Cannabis indica
agcaacatatcataaatccaaccatatctaaaaaggtttgatttcttttttctgcaacaccgttctgctgaggtgttccatgtgctataacttgggataaaatccctccttctagaaaatagtctttaaatttagaatctaaatactcgcctgtacggagagtctttcatgcatatgttttgttgggattattttattagtattgggttttagtttaaggtgagactcattagacctattttaatatttttttcttatatattttttaattttcatatattatttggacccatcttcatcgagagtcatggattcaccgtgtaatagagataatactttattgatattaaacaaggacatatataatataattttatttagtgaagaagaaaactaaagataaaaataaattctctcatgtaagtgaacaaattactaaattaataaaatagtaaagtaatttcattacaatggcataaatgtatatagtaaagttattagtctatgtctaattattaagtatgagtaaacattttagaaaataatatttgtcattagaacaaagagagagtggctagcactcatcttatttttatttttctttctaactcaaattcaactattttttctctttctctagactcaatgaaacaacgtcaaccatattataaaatattaaaaggtttctattaattaaatagcaaaaataagtataaaaattcaatttttctaataacactcatgaataataactattaaaagtgaatccaaatatgcaaatcaaaaatatatataggaatacaaacattaaatatctaatttcacatatagaaataattttctagttgaattatagatataaataaaagatacaagaaacacatgtaaaatataggttaatatttattccatatgggtgggcgccgatatataattagccctactcttgggacataatcataaaaatttcaaacaaaaataaaatgttggtggtaataatttataaaagctttataaaaatcttaaaaagtccaacatctattatatcgattaattaaggtcttcatatatgtgcgctcatacatattaactttccaagaaaatatataaagagaagaaaaatatattctgatatctttgacttcccatatagcaaatataatgatcaactcacctcaccaccacaaatacttgttttcttaatttttgacaaaacagttataattagtgtgtgtttagtgggaattaacatgttgatgatgtaatatattttatataagactttcacatagccgtacaacgttctcacttaaaagccttgaaataagtcattaattaagagaaagaagttacacaaatttttttttacgtgtcagcttgaggttggatcttattgtgttgatgaatgatcaaatggagagaatttgatgtaagtagggaaaaaatggtggagccaaagagtacaacttttaaaggtgtattaattaaattattaattagtgtttgtattggtgtcaaatcattatttttttgaggggttatcatattagagacatgaaactttaattagggttatccccttagctcaatttgattagacattggaaggttttagttctcaaggcactctaattacaacttttgacttgattgttagtggcttggatgcatggaggggaccaaggaatctttccacactattcaccttaataacaagttggaaaaccctaattaataaccccattttgaagttaagtaaggcaataatgccacaagaagtattttctgctgaatttaattattaagtattaattaacaacctctcgccaaggacatactatcaccaaactcatccatatatatatatatatatattgtaattaaattgtgctacctttttctttttctctctatctcttttgtacttttttctccaagcatgtggttgcaaatgtcaaaaacaatgcatacacatatatccattaacatatatcaatagataaaatgtgaattattctgaaagccataaaatgagtgattcaaaagtacatcatacatcacaaattataacatttataacacctaaaaccactaaggctaacttagtggtgtggtgagggaaggaagggaaaaagggagaggtca

SEQ ID NO: 188260 - DNA, 2784 bp, Cannabis indica
gcttgaatttgaatttcaggttaaccttttgatgacagttcaccacagaaacttgactagtcttactgggtattgtattgaaggaaccaaaatggcattgatctatgagtacatgtccaatggagatttagacttgcttcttataggttcagtttattattaacatgtcaaaacaaaaaaagaaatttctcatttcctagttttattgacaatttgcatgcatgacacaagtgactttatctatgtgcagaccagaaaaatgaaaatgtattgagttgggaaacaagacttcaaatagcaattgattcagcacaaggtctgtaatgaaaatttacacctattattttaagttttttcccttattatctgctcaaaaactcagtacaatctctaacattcattaaaattataatggattgatatatgtaggattggaatatctccatagtggttgcaagccaccaatagtccacagagatattaagactacaaatatcttattaactaacaatttccaagcaaaactagctgattttggcctatccaaaagctttcctacggatggtggtacttatgtgtctactgctattgccggtacaccaggatacctcgatcctgagtaagtttttgcattatttatagtcttcattaaagaccacttgtcaaaataatgaaaaaactttgatttactgaattttgcagatactctataacaaaccggctaacagaaaagagtgatgtgtatagttttggagttgttctcctccaaataatcacaagccgaactgccattctatgtagaggcaatgaaaggactcacataagcacatgggttagttcgatgcttggtaatggtgatgttagaagtattattgatccgcggttggaacaagattttgaaactaattctgtatggaaagctgttgaaatagctttagcttgtgtgtccccgaaatgcagtcataggccaaatatgagccaggtagtggctgagctaaaagagtgtttggcagcagaatttgctcgaagaaaccacagtcgtatgactaattcaacagaagtgttctccagtaccaaccttacctctgcatttggtcccttagcaaggtagtagtatatattattttgggaaaaccatgtatttgtatcttactataaataagtttccttatgatttttttgtcgcatgagttggattagttaatgtgttatttatttttatgaaatggaatttatgtattattgtgtttcatgaatttatttgttctctattaataaattgtctcgcgcgctttgttaaaaataatcacgggccatcatttcacaagaatttttaatcaaatagagatgctttaatttagagtaatttgtagtaatttgtggcataaatatttaagtttaagtctcataattgtagataaatatataagtttaatttttgacagtaataatacttaaattatatatattttcagaattttcataactacctaaccgttaagtgctaaattattattcacatgtcgttttttaattagtatattttaattaattttttaaataaaaaacaaaaatataatgaactgaatcataattaaggattgtttcatgaccattgacttagtactttacggtcagatacccatagaagtttgaaaatataacttacgtattattatcgtaaaaaattaaacttagatatttatatatttgcaattgggagtgaaacttagatatttatgccacagattactctttaatttaactgtttgtgttttttgttaaggtaaataaaatttttcattaataggtaaatcgaacataatccattagagagagagagggtggctccattagtgctatgatggagagacgacgatatgaagccaaagagaggagagagagagaggtcagagagagagaggagagaaagagagtagacagaaatatggaaggaaagggggctcgcattaggtttgttatttgacttataaaacttttattggcccaattaataccgccagtaaaacttaaaaagtaaccataaaatgaaacgattaagtgaaacttttaccatcgcaattcatagcgccgataaaaaaattccccctaaaaatgcttgcgcaccttttcagagcgtgggaattattctgccaaaaactttgacagttttgccggtgcaaaaggtcgccgataaaaggtgaaaacccctgcgaacaaacttccgccttttggcggttctcatcaagactttcactgtctagctcattaggaacttgcaccggtaaaacagactattactggtgattgccagcaaaaatatttcatagtgccaaatgaaatagacatagatttcgatattggacaaaagtacctatatatagtttatgtagcaaataggatttttttggtttaatgcgaattatatgtataatttaccacaaaagtgtaggactttgccatataatttagattctatatgaatatagatgcaattaataatctgctatcacatgaaatttaatataactaaattgtattttactataagaagttgatacaattgaaattaaatgtcctatttttctaatcattgtcaattgtctttttatttgtttgttatcgtagctatcaattacaatcaccattcagttttggtagctaaatagaattaaaaaatcaattaattagtaattaactataattcttgtgagatcgacttcactattgtgagcgatacatattgtacgtgcatgttaagattttttacaacagtacgtaacc

SEQ ID NO: 188261 - DNA, 6554 bp, Cannabis indica
tttttttgagttgaataatcatcctttcaataggatttggaaagtgattttaactttgtgtggtgtattcaagtgaattgtagtgtatgcactcttagttttgatctcctctgatacaattaattttgtgtgattgcagttatccgttaaatcatcacgaacagcagcagacaatgctgatcaaggtttgtctgctagtaaaattatagaatcaaatatgaaatattctttcaatatctttatacttcattgctttttgtctttgaatatttgtaatggcattcgttgatgatacagtaattcatttggtgataatttctatgctaggaagattataatatgtaactttaacattcaaaatttatttgtaggtgaaagtcacatctacctttctaaatttagatgttttgctgtcaagagtttctgattatgttcattttgtttctctcactcgtagattatgatgagaaggctgaagatgcagttgattacgaagactttgatgagcaatatgaaggaccggaggttcaagcggccactgaggaggactatcttttgtccaaaaaggcatacatttctaactcactggctattttgaagcctacaccgtctgtatttgacgatgaaaattatgatgaagaaattgaagaggaacaagaggtggttgataatgatacaaaggttcagaataccactcttttgggtaggcttggtttcgtacttttttttttttaaaaaaaaaaactttctgctatatctttcttcatttggttgctatcatgcatgtataattttgttttgtttttgaatgtttttttttttcatacacattccagcttaaattgttttcaaatgactgcattttttcgtgcttaacacatgcaaatatatatatatatatatttatatattaccctgaaagtctggaacagacctgattttggttttaacgaaacaaaaacaatgcctggatactatgaatttcagcttataagaaagggaaaaactatgcttaggagccttccaagaataagaaaaacaaaacaccactactatggatagaagatgttgttttcaacttcttgaaaagaaaaacagttatagatgttgcatcaaacacctttcgaaatgtgctataaatgtatagtattttgtgggtatatgttttcaacatgagtctatatatgcatgtttccagcaatatgtattttagcaacgaacaagcctacctagggcacaaacacaccatttattgatcagcttgggcagtttcgatgtctactgctaattggtatgctaattatagcaagtttaggtgtttatgttgagaactgaactagaatttgttgctgaattaaaagtcagtcatttttgctgactgatgacaatggtaactataatatgtatttgtatttgacaaaggaacttatcatggcttatgtaatattcttaaattctatttctgttttatggctgctctgttgttgagtgtatgccattagatatttattagttgtttttttaataagaaacaagattgtattacaaagagatgatgggaaatcatctgtagtacaatctagacaaccacatagaggttgttaattctaagatacatgggagtagcagatgcatgctatttattagaatggattctcttgaagaatgaaaaggtaatattatgcttttaatgatatgtactggcatagtactggggcattatagaaccaaaagtttaatccaccaaacaaagtgccattgtagcatatgccaggatggttcactgtcactatatagctgttgttcatatcaaaacaaaaacattagtttacctcacttgggaaccccatcaatctggtctacatacatggtagttttaaactgttcaaagagtttaatgttggtatttacttttttttcccctccctatagctttgtcttttgacattggacttatctcagcatgccactgtcaggtgaagaggttaaatctcctgaggtggattctatcaaagagaagtcttctgaggatgatcacgagactgactctcatgatacagaaacgttggcctctgacatagaagaatctcaggttgctatattgccttgattatattaatattttaaacagtgatatatacatcttaagaaccagcataaactactccaaaccatagcatcatatagtgctaactaacgtatacactaatcggcctaggccgattcaaagcaatagctgccgatcacatagcagcatcaagaaggagaagtcttaaattcttttctctaagtttatgattatttagcttcagagacatcatgttctggctggcttttatgcataactacggtgaaatacgaataatatagtgctaggtgcgatttattttaccctgcaagcgtctaacttataatacattactgagaacttcttatccagaaataaaagctgaatgtgtatttcaagaaaagttttatgtgttgaaggttcattagcattgtttagtgtgtattagttaatttagattcagatttttggatcctatacagaataaataagagttgaaatgactactttgcatttggtgatccctaactgtattaaaggtgacagtacatgcatttttcctctcttaaaaaaaaaccagccctttgatgatgtcatgtgggtactactgggtagttatttgtatcagtttgttcaattacgattttcattgatgattgttttgtgtaattatgcatgagcaagcaggaggagctatcagaaaaagaccccacaccattgccagttttatgtatagaagatggaaaagttattttacagttctctgaaatctttggaattcatgagcccgttaagaaaagggataagagagatcataagtattttgttcctaaaggtatgtggcgtatttaagattttcccgctacaaatatctcagcccgtattcttttttcactaattattgtgttgctattctagaatttatgtttgggtctgtagatgttctcacatgtatagattttaatactattgttgtcatcttcttgtgtgtatagtttactttttctttttttgggtagtttgttgattctcattcatcttttcagataggtttaaatccattgatgtttctaatattgttgaagaagatgaagaagagtttttgagaggttctggtcagagttttatgtctcttaaacaagaggaattttataaggatgaccatgatgacattgagtcagaatcccaaaattccggttctttgcaaggggttgccttagctggttcacagtatgatgggtcaagaaaaggttcctttctctctgcagagccaatgaaggaagagacagtcacatgccctgctggtaggcattcaccgtcaagtgctacattttatcctcttgatcaactagactgggaggttgggattgtctgggataattctcccgttgttagtgaaaattctgttggaagcactgaactccattttgaagctacagtaactgatagtgaaacagaatctgaggctaggctgcaaaatcacaaactaaatacagtagtagtagctgatgagaaaactcacaagaatttagtacatagttccccaattatattggagcagtttggcacaagaacatcaggatcttcaagccttccattctcagaaggtagatatcatccacaacttttgagactggaatctcgatctgaagtgaatgactctaatcaggatgatgagggaatggagaaagttgttgagaagcagcctcatcgaactggtgctgcaaaacaatttagcaaacttatatcgttaaacaaagacatgctagaaggatcttggttggacagtataatatgggagcaaggaagacctattagaaagccaaagcttattcttgatcttcaggatgagcagatgctttttgaaattttggatagcaaggatggtaaggatctgaggcttcatgctggggctatgattgttacccgctctgtaaagtcaggccacggtgattctcttgagttgccaggtcatggaggacaatctgtttggcgactagtcgctaatgacaaacactattcaaacaaaaaaacatctcagcaaatgaaatcaaactcaaaaaagcgaacagctcagggtgtcaaactttatcactcacaacctgcagttacactacagacgatgaagctgaagttgagcaagtaagaataaaataattggaatacttgacattctgtttggttatggtgacttatttctgtgaattaagaaaaaaaatcacttctgctgaacatgtttctcaaaaatatttcacttctctaaaaattaaaactaaactacataattttttttttaaaaaaaggaagaagaaaaattagtgttaccaagctcatccttagctcgtttagggtaccacattttagttgatttagcaagtagagttgtatattttagaaaccaaaactttattataatcagaaaagataattgagaaagacaaagttaccattcctacatgagaaacaaaagttagcaaggaatcattaattagaaactaattagatttttaaagccttccgactaatcataatgaaaatttaatcaagaggaatgtctttaaaatgtttgttctttttataattttgccttatacagaagaatgcatttctatcctcggtcaaaattcatatttgcttctgattgtaatttttgctttgtatacacacccaaaaagatgcatattttgcatcttaaacgctttttatgctggcaatctttgagaaacgcttttattgataactgcaccaacataatggaaaatagtgtcaattagtttgaaatttctattagtgataattataacttgggagttctttgcattattgatttggaatggggctggactgcttggttaggtgcaatatgtgtcgagtatgattgagtatgctgctatatatcctagttcatgccgtgttaaatatttatgaaacatgttttgtaatgtttgaaatcttacttgtgttttgcagtaaggacatagctaattttcatcgacctaaagctttgtggtatccccatgacaatgaagtggctctaaaggaacaagggaagctgcctactcaaggacctatgaaacttattgtaaagagcttgggtgggaaaggaagtaaactccatgtggacgctgaggaaaccatctcctctgttaaggctaaagcttcaaaaaagctaggttgtcttctttgaatgagttaatccttaatagtgataaaaaatcttgataacctattgccaatttatctatacactacatgccataaacagtttatgtttccaaatatttatgatatgatttcttgaaagattatattattgttattatctaaactgtggtaactaaccaggaactttgattgtagatttcaagtccactgagacagtgaagctgttttatcgagggaaagagcttgaagacgataaatctcttgttacccaaaatgtgccaccaaactctttgcttcatcttgttcgtacaaaaatacatttgttgccaagagcacagaagctgcctggtgaaaataagtctttacgccctcctggagcatttaagaagaaatctgatctttctgtgaaagatggccatgttttcctaatggagtaagtggcttggaagaaattatatatacttatgcataatggtaaaactagctatttttcttttttcctttcttagaaaaggcttctcttaatagcaataataatgataacgttgctaacttaaaagccttattcaaaaaatgtcaactcgctccttacacgaggaaaaaaataatacaattttagtctgaatctttcttaacctggattaaatttctatttcttaatcttcatttattgaccttttttttcgctttttcactttttctcttccctctctatccagtgttcccttttgtgaagtaaaaaaagcgtctagctggtctaacgatctttggtttttaatcttctcatctctcttgagaaatttcaccctttctttgagtccttaaccttctctatctctctggatctatattcaaattttatcttttgctgaaagatcccattggtgcttttcgtccttcattgcgtatctttaccgctgttaagtggtgaaaaattagaagaaactgttggtttcctttattttgtagatctcaaaagatagagctagatatttttattaaaatttatcgagaagtaacaagataaaattggaaaggaattaggtattccaatacaacaaagaattatagatttagaggctgaaacataatatagaaactaattatagagccaactaagaatatcttcaagctcctttgaagtagaagcctaagccaatacaatatttagtatcacaagtagtttggacaagattaaggtgtgtaagttttttttattccttattatacattacatatactgttcaagaagattggtttaaaacttgtacttttgacaacaacatcttgcatttacatccttacacactgtttttgcttg

SEQ ID NO: 188262 - DNA, 1391 bp, Cannabis indica
acgaaccacgatacaaaaacgaaagaacgagagacacgaggaaaactttttttagttaaaaaaaaaaaaaaaaaaacgtaacccacttatagctctgaagattcactaagaagaatcaggttatgtctaaagaagttttctttggtttctatcaaacaaatgaagaggatgccgggtggtaagcttaagcctctccctttatatgcgcgtatacatacataaaatataggcacatacaccgaagagatctttaacctcacagtgtttacccttctcgttcttgatctgtctctcactaaaactcggccagaaaatataaatatatatataaagaaagagaccaaaaattacaataatatatttctaaaagaccccctcctccaatatcagagtcactccccgacacgatactccaaaaacctgcaagtttagaaagtaccccaaacactcacaaaccccaccctttcccttctttctctctctaccatgcaactttttatatattaccaccctctcttctctctctctctcgtgtaaatatataaaaatatttatatgtgtggcttctttcgccgtatctttcacagtactcaaaaaatataagaaatggaaataataaaaggtagagaaagagaggtaagcacaccaaaacagggggagaagagagagaaaggggttaggagactctacctcttaaaactaccacggcgtactttagcaacgacccgaaaggtcggcgaatgaaaaagggtgtacactaatgtgcgccgacagtagggttggatgatttcattttacacactggtccaatgtttgtggaattaaccaatgggtactgtcaacggtttttacctttggatttaataattaaaataaataaatagaaagctcatgcccttaccctgtgcggcctagacagttaacaactttctgtttgggtgaattcttttttaccttacctttttcttagccctactactttctatatacatgaccactttctaaatatatataatatactgtatttaattttgttattatataatatgtttctctttcttgttgagtaataagtttcatattttcttatttaatatggtaatgtttcatagtttcttaatttaacatcagttttaactttacttcaaaaaaaaaaaaacatcagttttaactttcttttttttttgtttgtaaaaggtatttaacacattcaaaacgtcttttctgatatagaaatattctataaaaaaaaaaatacagatacatatagaaataaattgttattctatatattaggtaagttaagattgttttggttagaggtaatgtaattggaatagaattgaaatgtatcaattttattaatatttttttttagttcattgtatttt

SEQ ID NO: 188263 - DNA, 2515 bp, Cannabis indica
ataaagtataggtagttttgctactaaaagaattattcaaacacaaaataataaataaaatatgtagaatagtcaattttaaagaaactccaaaatgaaagagtttagagcatttgatgtaatgtgtttttagtttgatttttcaaatattttaaagcatttgatttgacgtgagtactcttagataaagaatatgataatacaaaacttgtaaaagtatataatgtatttttcataaatatctaaaatcaattagtaatgattgtactctaaaagtgctctgctagggctcacaataatgactctatttcgaagctatggcaggttgaggacgccctaaaaaaagtggttcttaaggaatttgaaattcagggaaagcaagtttaagggttacaggggaaagaaaggcttcagtcagtacagggaaaaggaaggcaactgggaatatggggaagaaaaggggaccaatgtcgtctgatttagtcctcaaaactaagtcaatggcggaggtaattggtgtcttggaattggatctaaatcagatgaggaagaactagagaagaacactccccagactatcgaagatgtagctcagatgctttctccgagagcttcactagaatttctgtagaaagataaagaggtttggttagattttgctagcttcctagaagcaaataagagatgtgaagctaatctgaaatcgggtaagagactctcaccaccaatcctacatactaaaacgataattcagaatttgagtgcaaaatttaatggatcaaaaggggaaagccttaaacaaaagccactggttcaaattaacatggctggtgttgaggaggaaattttgtattggcaatctgcaatggtttactatgttcttgaggccaatccccctttagggccttttgaaggctttgcaagaagggtttggaaggataaaggggtagacaaggttgaaattcttaaactaagagtgttcactgtaagatttcaggcactcaatacaagggatgaaattgttgatggggttttttgtttctattcaaactatacaaaggaagatataacttaagctccaacttggaaccaacttcatggtttggaattgagttattgggagaaagagctctttttaagatagtggaacaaattggcactccaattatgttggatgagataactaagaacaaagagagattgaactttccaagaattatgattgaagtgcgtatgtgtcaagattttcatgaggtaatatcctttcaaaatgagatacaataggagattgaacttactgtcaaatacgaatggttgtcaatagtttatggtaactattcgagtatggggcattcaattgatgtttgtaaaagaaagcaggaaacaaagacagtatgggttccaaagaagatagaaaataacaaggctactagttttaaacttgtagcggatgaggatggtttctaaaaactttagacaaagggaagcaggtcaaaacagggatggacaatcctggtatagatatcaggggagatgtctcaagcaaaacaggaagggagaccatggtaacatcaaattcttttgagattttggtagaaccaatacgattactgaatgagaatgaaaataggaaagagctcaatatagacaacacaggaggaaggggagtacctcctgttccacatggatagaattatgagttagaacgttaggggactcaacagccacaataaatagatagaagtcaagaaaatgatttccaaataccaagtggaactttttggcctcctagaaactagagtgaaagctcaaaatatgggtaacatgtacactactttgttctatggttggtgtttcaaaaataaatgctatatgtagatcttttttgtggaaaggatcggctaaatctaattgtcgtagttatgtatcttgggataactttgcaagtcaaaaatagagagaggccttggcttgaggaatacaatgttatggaatgaagcagctttaggaaaatatgtttgggacatagctacgaagcaagaaaacttgtgggtgagatgggtgcatgttgtatacttaaaaaattcaaacttatagatgacagttggtattggagacagagaagattaacaaaacacataaacaccactttattttgcaacaacagcttatgttaagtaagtacaatatccattaagtgtacaaacttctctttgatgaacatggaagagtcacatggtatagggaagtctggagcaggtataatataccaaatcacagggttattttgtggtgggctgtgcagaaccgattgcaaactagaagcaggttgttgaatatgcagatctgtcaagatggaacctgcctcctttgcggtcctgatctagaaacagttgaacatcttttgtttgattatccttttagtaacaggtgttttaaaggtgttaaagcctggctaggatggcaaggagtagaccggtctttagtagcttctttgagatggatctctcgagca

SEQ ID NO: 188264 - DNA, 3466 bp, Cannabis indica
ttcattgtatttctattccaattcttatttccattcttatttttatattttcactcctcccaaccaaagccgttcttactaaatctcatacacaaagttaagagagtataagaaaatacataactaactaatcctatcagagcagcagaacagaacctgaacccagaaatggtttgtcatagctgacaaacaagtaagcattttttttgtataataccataatgactacgaaatctaacctctattgttacaaaaataatgcagaataccatttgggcaatttcttattcctactaacaagtgagttaaaatagctaaaaggtattaatttagctaaaaatgtttgaaatagcactacaagtgaggtataatacctcaaacttttagctctaaacatattctaataaatgtttccattctttttccactttgcaaaatataaaaagtgaaatttttgtgagttattattcaactaattatgagcttgttaccatccaaatcactaatatctcccaaaacagaaagtttatcatatctagattggcttaatgtggttctctgaatattgatttgatctaatagattgattgctaaccatcaaccaacacacatgaacaataatacgaagaaaaaggaaaagatttcctggcaaattaaaattgaaaattctttaaaagtcaatcactacaaattacaattcgtagtacatagctcccaaaaacaggtatcaagactaatttcgaatcagattcttacagaagattaaaaaaaaaagattgatgggtaaaagagtagagcatgtaccttgaagaagtgagattggaggtggaggaaaagaaggatacagaagcccagtcgtgcttggatcgaatttgatactctcttagctgctctgcaagatttgatcgagttatcatggctatcgtcctcgtcctggtgttttctgaaaatgggtaatttaggaggaagacgaagcagatcccatcgaatcgaacaaagaaaaagaaaaagaatcaaacgttcttctgtatagcgttgcctttctttccgtggacctcccacactctaactttcccctttatattgatttctcttctggttcaccagctaacattgagtgaggttacagcggttcaatttattgttattagagtaacatggcacataaatacattatagaaaaaacaggtaatttctggtataaataattaagtttaaaaaataattttttaaagttatatttttaaaatttttattagtatatttcattaaatatcaagtcattatttacgtgttattcttttattagaatatataaataaaaaaaatacaaatttaatgacgtggaacaatcaaggattgttatgtggcaatttcttgatactttaagtacttacaaaagttctaaaattataatttaggtattactagtgctaaaaattaaacttaagtatttatttgcaacttggagttaaactttaaggtatttatgccgcaaattactttataaataaataactaagtttaatttttggcagtaataatatttaagttgtacttctgaaacttttgtaaatgtctgctgttaagtgttaagtaaattgtcacatggcaatctttgattgatctaggtcattaaaattttatttaaaaaatatttaaatataccaataagaaaataacacgtggataatcacttgatatttaacggtcaggtacttacggagtttcaaaaatataactaaggtattgttatcatcaaaaaataagcttagctatttatttacaactaagaattaaatttgggtatttatgctacatattaaatttattattattattattattattattatgaaagatttcaattttagtttcaaaatattttatttacatttgaaaggaattggatgttatttatctaaaagaagaaaagtattgagcttctcgtgctaaatttagttggttgaagcttagttataagaatactttctattttcataagtgtacctcaggtagaaagaagaaaaatgggatcgctatgattatgggcagatccacataaaggcgggacaaagaagcagtcgcccttgaaaaaaaaaatcaaaaaaaatatatatgtattttagttagttacaacatatatttataattaaaggtaaaaaaatataaacataatattggttttggcatgatggttaagttatcttagtcaaatgctcaaatcctagcaaaacatctttattttttaaatatttagtttatttttttgaccttccccccacaaaaaaaaagtatgcccctcccctcaactttagttctgggtccaccattggctatgattcctaattaagatgatgggatatatgtttcttctccaaatgacatgggggatattttcgtagagtacttttctagcttgtttacttcggccaacccctctagttgtgatcttaatcgagttttagatgttgttcctattaagattttgtcatccatgaatagtcaactaacttgtcctttctttggtgagatgtaaagcatgctctctttcaaatgaacccttcaaaaagtctcgataatgatggtatgatggcatgtttttattagaagaactgggataaagttggtgacgatattactacagatgctttggcctttctgaatggtaattcgactctcaaaggtattagcaagattctcatttgtcttattcctaaagttaattctccttctaatcctgctgatttttatcatattagtttttgtaatgtcatttataaaattatcactaagacaataactaataagatacgagaagtattatctagtgtaatttctgaggaacaaagtgcattcttgtctggtcgtctgattaatgatgatgctcttattagttttgagtgcattaataatgctttgaaaaaaaaaagttggtgctcaagagttttgtgttatcaagttggatatgtcaaaagcttataatcaggtggaatggtcattctctacaaagattgtggagaagttggggtttcatgttgagtattagaaaaattattgattgtatctcagttgtggagtattctattttgttaaatgggggtagtttcgtttttttttttttttttggcttcttttcaacttgagagaggccttagacagagtgaccccatgtctccttatcttttcttgttgtgtgttgaaggcctgactgcttttgttagcttactccttgggatttcttgtggtactttggggccgactccctcatttactgtttgttgatgattcttttttctttttggaagcctcagtgattggtgtgtgatcgatttaaattgttattgacttggcatggttctgtcttctaatcaaagtattaattttgagaagtctgttgttataaagaagatatgatagctatccttggtgtgattggtgtagagtgtcatgaaaaatatttggg

SEQ ID NO: 188265 - DNA, 5301 bp, Cannabis indica
aggtttttttttttttttaccaaatatgaagctatttttttttcttcggaatttttatttttggtggtcgaagaatgtagttgatttaggaattttattttttgaatggcaaataaatgtagggaaaaaattagtatgctatactatattgtttgttaagagttgaaaatttaaactcaggttgttcgctagccccaatccattttcttttatttctttgatcttgaggataacaaacggttcttctaagagtttgattagcattacgtgtccatttcgataaatttttgtaaatgttgaaatcagtacgtgttgttgggtttaatatctcaatttagattagtgtaactgtaccggggattatccatggttcgataccatatcctatttattttgctatgtactttattaagtatttatgctttatttaggtatttttgtatgcatatttggaagtacctaagagtatatgtaactatgtatttttttgtatttatacaggtagcaccttttcttttaaccacatttaaatatctataaggcattgcagtttctctttggaacacatgtatgatgtaccaaaaatcatggaaaacaattaagtttattacttatttttcaattagcatcattttaggtttcgtttactgtatagtcaagttcgtttttttttatttccttctttctttgcttgggtgtgcagatgtctttggcttatgtgttaaataaattccaaaagtgaaatgatttttctggaccttaattaatatgttcatggcttgtgtgcgataataaacaatatttttttctatgtttttggaaattaagagaaatataggcacatatgcatctttatgcctatttctgttgcttacaatattattatcagtctattattcgatgttctgtaatcataaagtgattgagatgtacatggatttatgtttaaatctttaattatgattttacctcatcgaatgtagatttttgaccaccaatatcaaatgggtcttcttatattggaaaagaaagaattgtcttccaactatgaacaaattaaagcctctgctgaaacagctgaaatattgtctaagcgagatcaagcttcacacatgtccgcattagctgaggcacgaaagcgagaggataaactcaagaaggcgataggagtaaaggaagagtgcataacaagtgtaagcttttttgtcatttttttaagcgttgatttgcatagttgcattgttaatcatatctgttagttctgtacataatgctatatatatgtgaatgttggtagattgaaaaggcattgcatgaaatgcgtgctgaatctgcggaaacaaaagttgcggctgagtgcaaattagctgaagcaaagaggatgatggaagatgctcatagtaaatttactgatgccgaggcaaagctgcaagcagcagagtctttacagctagaagctagtcgataccgcagtgttgctgaaagaaaactgcaggaagttgaagcccgtgaagatgaccttaggaggcgtattgaaacattcaaattagagtatggatttcattctttttgtttaagtttttcttccttgatttattaatatcatatattattattacttgaatcgcccaccattgttttcatttatctttcaatttggaagtattttaatttattcatttattttttatttccttccatataacagttgcgatgaaaaagaaaggggaatcagtcttgagaggcttgctttatgtgaaaggaaaaagtctcttcagcaagaacaagatagattgtttgaagcacaaactttgttaagtcagagagaagattatattttcagtcgatctgagaagctagatcaacttgagaaagagttagagaacacaaaaagagatataaaggagcagcgtagagccttaattaatgagaaatcaaacttagaactaactgaagtttccttaaagaaaagagaagaggttcattcactctttattcttttaatttttattagtgtttattgtagggttacaaatttatttgtattacattttgagctttccaagaatatcaatggaacatatttttgactgttttcaggctctaagcaagcggcaagctttgttaagtaatagagagcaagagttaactcttttacaggaaaaacttgcgagcaaagaatctgtgagtttgctattttcctcatgctttaaccttaagatttagaaccattcaggttatcaacatatatacttcctgcattaacctatcatttattaccattgaatgaggggagttgggtaaggtgggggaagaggaagagttaaactactattattacttcatcacctgtcaattagcattaaattgattatctaatggattttgcagaatgaaattcaaaaggttattgcgagccatgaagttgatttaagagcaagaaagtctgcttttgatgctgagctggagatcaaatgcaaaatagttgaagatgaacttgaggcaaaaaggcgtgcttgggagttgagggaggtagatcttaatcagcgtgaggaccttgtccgagaaagggaacatgacttggaagtgcagtcaaggacattggtggatagggagaaagaggttgcagagatgtcaaaatgtcttgatgagaaagaaaaaagcttgtctgttgaagagaaggaggttgagttgagcaaacttcttttacaaagagaaagagaagagattatcaagatgaagttagagctgaacaactctttgaattcacttgaagacagaaagaaacaacttgattgtgccaaggaaaagtttgagaatctgaaaacggaaacaagtgaactatcaactctagagacgaacctaaaggaagaaatagattcaatccgtgctcagaaactagaactaatggctgaagcagataagttgactgcagagaaggcaaagtttgaagcagagtgggaattaattgatgagaagagagaagaactacggaaggaagctgagcgagtggctgaagagagaatgaccttgtccaagtttattaaggaggaacgtgataatctcaggcatgagaaggatgaaatgagggatcaatgcaaacgtgatgtagagtcactttggcgtgagcgagaggatttcatgaataagatggtacttgagcgatctgaatggtacaacaagatgcagcaagaacgtgcagatttcttacttgacattgagatgcgacggagggacttggagaactgtatcgataagaagcatgaagaattagaaagttctttgagagagaaagagatggtctttgagttggaaaagaagaatgaacttcagcatgttaactctctcaaggataaagtggcgaaagagttggaacacgttgccttagaaatgaaaaggcttgaagcagaaagaatagagataaatttggaacgggaacaaaggaaccaggaatggactgagctaaataatgctattgatgaacttaaggtgcaaagggaaaaattgaaaaaccagagggagatgttgcatgttgacagagaagagattcaggctcaaattgaagagttgaagaaactagagagtattaaagctgccctggataatatggccatgcttgagatagcaacgatctgattcaatatccaatcgcaaaaagactttactcgaaagaaaaaactaaggcagtcaacagttgctcaagatggtgatatcaaatttcaaaatgaaaataatattgctaaccatagcaatggatctgattcaccatctagttttaaattagatgtattttctccatctaggtctgctcggttctcatggatcaaaaaatgctctgatttgattttcaggcagtcctcttctgagaagccttctttgaagtatgatgagagtgccttgatttctcactataaagatggcaggtctatgagaaaagaaaagacccagagtattgtcaacgaaaggcaattgcatggatattcttttggagaacctaaggagatagttgaagtgcctgcagtaggtgagattgctgaaggtatcaatgattctgaagctgaacttagtgaagctgttgttgaaaagtgtgaccccatgattgctcaccaagatttgcagccaaggaggaaacgaagagctaacaaatcttctgacaataattttgatctaccagttgagaaaagaaggcaaaatactaagaaaaggaagcaacaatatgatggcgatgaaattccatccaaacaaatcactatgaagaggtaaaaataattcatttgaatttaaattcttgtatttttcaaaagaatatttcagtttgaatactagtcagttttatggtgggtttgtcacagtatttatatttatatttttttggtgtagtgctacatcagagcagcaaacgtttaaacaaacttgtgaaggtgctgaggagacaactgtattaattgtagataaaatcattaatgtttctgaagtgacttgtgaaattgttgaagctgatcgtatccatgaggacaaattagagctccataagtttgttgaagaatctaaccaggattttccctcagacaatggaaaacaggtaatctaagatgaatgcatgtcataatctttttattcacatagtatcactgcaatgtgattcatgctatatatactttctttcattctgttcttcagtatattattagacccataatcaggaccaatatcactatatacatcatctcttaagtttgaaacagttcatttacagcttatgggattttttgcttggaatctgctttctctattttcttctcatctctcccttttattcaaaataaattgttattaaaaaatataatgctgattgagccattgaagtaaatagtgtgagtgaaatgctgggttataacttaggaatttccttgtacaaagcgttttcttgtttccctgctgatacttttttttatcttctcatctctctattatcttctcatctctcccttttattcaatataaattgttttttatattgctatcctatattaaaaatataatgcttattgagccattagagtatatagtgagtgaaatgcagggtatagcttaggaatttccttgtttccttgctgatacttgttctagaactaatcgattgtgttttatttgcagccccaggaagaagatatcccagaacaatgtacaaaagcttagtgagcatatggtatagacaaatcaatgaagtcttaagaggcgtatattgcttgaacttgtgaaaattatggaaaaagaaagttatattactacaaatacttt

SEQ ID NO: 188266 - DNA, 3563 bp, Cannabis indica
cctcgagtctgtgtggattgcagctgttatttcgtgaactgacatgttttcctacaaaaaggacatgtttagtgctcggttgattggaattaggaacgacatgccgtccctgtttaatcacaagaatggaacacttgaatctgtgtacctgataaaatgcatgtatatgatccaacacctgcaagcaagtgaagccatcatcactgaaaaatgttcttgaagacggccccatctcagaaaatcgatcaacgggaaacaacacggtgagaaaattgttcttgaatatcacttcagatttctcactgcaaaacaacaaaaagtacataaatggatgttgtgatatggacaacttgcttgtaaaagtaagataagaacctttcggtgagaggcctagtcaaatttgcaaaggaagcttcggaatctttgccatctccttttgcatcaaagaattgaggtgtatgttgttcgctgccatctccagcgctgaaagaatcggtgtaaatagaaactgtagaagttggctcagatattgaccaggaaatcgaatcgagaagagttgtaggagttattggacgcatcggggtttgacaagtctgaaagatttgaatgttttgtatatcatatcataacatggaataaatgaaaatccattcaagccaaaacaaacaaacctgcattcgacgaccacggcgatttctgactccatttttagcagaatttgcaatctgttgcctttctacaaaacttggtttacttgcaaaagttggaacatcttcagggatattaatcgttttcgatacctattaaaacccacccgaaagatgaatttcgaaaagttctaacaagtatttcacttcatggcaaaacagaaaaacaaggctatgataaaatttcaaaaagttttagttggttgaagaaatttacctcctttgcaatgccattgtgaaaatcttcaagcattagattgacttgcctggccaaatcagttgacatgtgcacaagcctttgctcatacttttccttggctgttttcagaacccaaagtggctgagacatgaaacatgggattttcaaataaatttcaatataacaaagaagttttaaagatcactctatgctcgttgagtaaccagtgagtttcagcttttaactctaaaaaactctgagtgcctttctcgggaaaagcttcctgagaagctaaaagcgccaagtagggtcgaaaaataagaaatgatgtcctttcaaaataatttggataaactaaatcgaaaaatatatataataaaaactaaaatcttgctgaagaactcacagtaacaagattggtagtgtggccaagatatctccggagtgaagatccttcacacacaacatgactggcatggcaaccggcgaaccacttatctacaaatgtggcaccttctctactagcagcctcgataacctttaagagatgctcaaaggaacaggaatcactctactaagatctatgagtaacaagaaattcataaaaagcttagagaatttggcttcaccttattcctaagctcggttgaaatatccaaatcgatatacaaggagtgaccggatagagcgtagtcatcatttctctcggaggctctcccagaaaaccgtccatgttgttcttcactagtctcggagtgcaatgttccacgaactccagcaggtaggcaagagttctcagcaccggtgaagccattaagccgattccaatcatccaaagccttatttgccccaatgcttttgatcctataaagcgattcactaagcctaactgcaacataacaaggcaaactcaattatatagaaccgaaaaaacaaacaaacttgacataacaacacaaatgcgagtcactcttaccgttcttccttacgctatctacaaaccatccaagtgtaacaataaagagaccattccttgatccatgtttcgaagcatgctcaaacttgcgtccaccaaaactgtaaacacttattaaggagagctaattcaacccttcatactatttagtaccattttacatagtccaatctatcttcttatacttatataaaataaagaaagatttacagcatgattactcaatgttttgggtttgtaaccgacacaaacccattaacagaaaaactactcaatttcgccccaaaaagttctgtttgtgagtttgtctgcacaattattgatactaaattaaacaagtattaatcgtgtcattacatgcgtgcatccaaactcacaaatggaacctgattgacgggacaaaaatagacgaaattacacttttaggagcattaggtagttttgccactaaaaaattcaatggatccctaccaattacaaacccaaaacattaggtagttatgctgcaaatatctcataaaagagcaaatccaattcaagccatttactttgataaaaaaaggatatttgaaccaccaaatgagtacattgtggatgcaaattaggactgtactgcccacctaatctttcagttgcttcctttacttgatttcttgcttctgccaaaaacaatgaaagcaaatatgaacaaagttccaaaacctcaatagcttccaaaacaacctccttcttcctaatccacttagccataataaacacacaaaaatttgtatcaacagaaagcttatatgccatgataatgcagatttttgagaccccatttgaattttttttcaaactaaccaaattaaatcatttaaccaatattctattatctcactcaaacctaatcaacccttaagaaaccattcattaaaaccattaccaaccaaaaattcatgaacatatatacatacaaaatcccaaaaaccaagtagaattgagagctttgaacaaacctttggaaagtccagtaacacatataacaagaccattaaaaggtccaggtgatctgagaacaactcgttcagacccaacagaggaggaagcaggggacattggtggctcaactggttgaagacctttaaaagaattcaatggagaagaaatcccaacaaatagtcttgaacaacccttgctcttaatcacttcaacaacaccaccacccatagccactgctcaaaaaaaaatcattacaagataaaaatacccattaagaaaaagcaacaaactttaatcaaaacaatggctgaactgaaaatctgagcatgatccaaaactagaacaagaaaaaaaaattggaaaaagtgaaaaatgggaatgtttcagacaaaatggaggaatcgaataagcatcttactgaaaagagcagagagagaaaagggagaagagttgtagtgaagaagacaaagtgtgaatttttgaagattgcatagtcaaacagtttagtgatactaaaaaaatatgtataaatcttcacaattccattacagtgccaaaaaaaaaaggcttttttaaggagaaaaggaaaaagatagaattttttgaatgaagtgctattttttattgttatttatgttaaattgtgtgtgtatgaaaatggggtttcgagaaaaattaaagaaaaagagagaggagagag

SEQ ID NO: 188267 - DNA, 3300 bp, Cannabis indica
tatatatatatgtataaattatgataagttttacttataaaagtaattaaaatatatattaggtagtcatgatcggacagcttgtcataatagatatagctacttgttttttagaagttataacatgttacgtatttgtcaagaaaagacaacgcaccttaatttatttcatgaacaacaattattaagtactttatacatatttggttattgtttgctttcattttttatttcccttagaaatttgggaactcctttttttttagaaaaagaaaaaatgtgaactaataaaaactcagaggttctatgtttttttttttttcttaattaccaggcttggtgtcggtgaggagtgacttgaaaagttagtagtacaaattgatttttctccttaacaatgaattttggataattctaatctcgattatcttttatcgatggcaactcgaatatttaactatatttattgttatatgctgtcaagttcttactgatttagtagatatggatattctaacaagtatcaacttataatatatatgtatattattaaatatatatatggttgtgatattgactgctttaaatgatgtttgaagtatatatattataaaagttttcttttttcaaaaggcaatataattggtggcatatcaatggcatttccaatatataaatccaagtgaaatatattatttctttgttatagtaacacgtcacaaatttggtaccaatgcatatatatgatataaatattataatataatgagtgtggtcctggagttgtttaattagtttgtgtttttgaaacttggattataataaagagatcgattattttcctgtaaataaaaaagaagataaaagaagagaaaagaaaagaaagagatcgatggttctcatgaaactgattgggtcgaacagagtactctcgaagtccaaaactgcaaagctcacttctacagttctcctggcccatatcataatttgaagagtgctgggtccactacatattatatcatatacatcgatctcttttgctagctgcttttgtttgatgaggaaacataatgacccactcgaaaataaatatatataaaatgacaaaaaagaaattatggatctttatactatttttgtttgtgtaacttaatgtaattatgtaaatttataattattattttaacaaataattaattacatgtatgtttataggtttattatatacatattcaactgggatgaggcaacacttgtatatcaaccagccagagctagtgaaggaaatgaatcaaagtcttacattggaattgggtaagcctacttacgtaaccaagaggcttgcgcccatgctcggcaacggcattttgagatccaatggccatttatgggcacaacaaaggaagattgttgcacccgagtttttcatggacaaagtcaaggtatgtacttaataatgataatataatattaatcagtataattataatgacttgtatttaacaccttaacagtacaaaagtatcatttactgtgacaatttttttatccacaacatatatagttaaacaaagaattattggtgtgactaaaaagtagtatttaagtttgccacaacaaaagaattatgatgaataacacacaacactttccatattattagtaccattgcttttaattaagaatgtatattcactaaacgtgatgtacttgggatcgctcgctaaattaaattctcatttttttaacgaatattcgattcttatactttcctatatagtcccactctgtttttaaaaatcatattttgtgtattatatattttaactcttatgtagtcgggtcccttgtcttttaagataataaaataaaatattaatttaagttttttttttttttttggaaagttaaataatacacatatgtagatcttgaaacttctaggaaaagcgtagaataataatgaatgttgggaccaaataattatctgatagtatagtagtagggctattgttattgtttcaaaaaataataatataatggggttgatcccatttttggaccattatgcatgcatgttatcatataatatgtatatataaatacaaaataaataattaattatatatatacgatgtgagggggcgcaggaaatggtgggtctaatgctggagtcagctgagccaatgctcaaaaaatgggaagagtgtattgaatcacaaggtggatcgacggctgagattaaagtagatgaggatttgagaggcgtctccgctgacgttatctctagagtctgttttggaagctcttacgccaaaggccgtgaggttttttctaagcttagaagccttcagaaaaccatttctcaccaaggctttctctttggagttactaattttgggtatgtaaaatcacatttaatttattctccctattaatttatattattttcagttatatttgtatatagaatctaataattatacactttactttctgtatcctaacatatatatttaatttgttgatcaaattattaaattatttacaacaacaaggaatacatagtaaataatactgttattagtggtgttcaatattttttgtaaataattttttatattggttaacaatattttttaaaaattataatattgcgtatacttaattatattaataacgatatattacttaaaaaaaaaagtattagacagtaatttttataacaattctctatataatgaatactatgtacaatacatattgagacataattaattactgtatcattttgttaaaaagaaaaaattagtttgtaaccatagaatattctcattaacaattttttgtttgaaagttttagtaacattttttattcaatgtgttttatttcccctttctttttgatatattgtaaaaaaatagctatatgctttttctttgttcttttatttcttcttttttttttttgaagttttttttttttttttgctcttattcttttttggaagtttttaatgatcgacgatgatagatgagatatatttatgtacttctttttttcatcaggtggaaggaagtggaagtctttttcgttatttatttattcatttttaactatattctcatttgggccacgcaataaaattgaaagagaaaaatatttgaaacgtgttgcaattgcaaagagaaattcaacgatatataaggcatcattatttggaacatatatttttaattattgaaagtgaagatttttaatgccactcatatttttcgtcttaagatagtatttttaaa

SEQ ID NO: 188268 - DNA, 1968 bp, Cannabis indica
ccgtatttttgttgtttttgtgcatttgtgaaattaaccctaaaaaaaatgaaaaagttaagcaaaaattagagcctaaactaaaaagtggcctagcttatttaaaaataaaaatagaatagtacgaattcaagaatgatacaatgggaaatttacatcccatattttatttttgtcaatgttacatttattttgtataccgctataaataatatttatactgaatttttttaaaaaatttcttttacattgacttgccacttctagcacggttttttattttttttctttatcataatgatcacacgttaccatcatttggtatttcttcatttcatttttcttatattttttcatcatcaccttcattcttaaactcttcatctctccccctgttcattttcttcttcgtgttcttttttattttctttttaattttttttgtgtttacaaatctatacagttgtttggactttagctctaaagaagttcttgatgagagagagagaggtagaaagcttaatctttatttattaatcccaccttatatctcatacttaatttttatttatttaaaaatttacttttttttattgatatacatatactagaagaaagctacgtgcgaaacacgtataattagttttatgttagatactttctactttatttaaaaataatacaatagataattgaagaaaaaatattattagttattgttgaaattatttttgatatatattcaattaatgtaaataatggtgttgcaaattaaaaataaatattgaatgcaatattatacagtgtatatcacaccattatcaattaagacttgcctttttgaaaagattaataaaattgtattgaaatattgatgcaggctctcacacatagaccatgttccataatgggataaaatagataaggacagttcttccattctctatccattcatatgtataacaaaaattgggagaaggaaacaaaatccttattctttgtttactctttctcaatcatttttagttacgattattttcattacaattaataaatattaaacgtaccaacatacaagggatataataataattttgaacaagataagttgtaaaaccataaaatgactaaaattaagccacgtctcaaaaacccaattctaatactacaatcacattaaaatccacctgcaattgaaaaaaaaaagcattgccaattcagaaatgaatttacacaaaagcttaaaaataataattaaatgcaaattaacacttgtttagagcttaatcccctaatcattacttcaaacaattagatatgcctccatttagaaagacaaaaataaaaaaaaatctgtaataatattcaactaaattacttgatcatacaaaagtgaattttagtcgcggccttatttataacttggtaagaaattatgatcatttgaaaaggaaaaaagacgaacaatacatacaccataatttcatgccttaacacagcgtaaactacaatgaatctgaatcagaaatcaacgccattaaaagttacagatagtgaactcaaggagagagagaaaatgagacttgtgtgtaaaaatatgaatcagaagagaaaatgaagcaaagttcatcttcttcccgcctgtttaatttcaatgtacaaaatagaaacggaaaaggaaatgttaattgggcctgttgattttagataactaatctgttggtaagcaagtcagttattaattaaaattaatgattagaagagaactgagaataagttcccataataatgaaattcgttagattcatctcagaaaaggaaatgttaatgaaattcatgttgaaataagagagctaggaagtataaacagacttacactaataaagatctaacttgatctataagaaaggaagcctgaaatcgaatcaagtacagatctcgtgcagattttcatagcctgaaatacat

SEQ ID NO: 188269 - DNA, 2524 bp, Cannabis indica
cagaagaactaataatcgtaatatggtatcagagctggatttcccccctttgagtgcgaacatggcgacagtaggagctcaaaacaatggcgattcatcgaacctgggaaatacagcaaccgttaatcctgctactcgtggaaatcgcaatcgtgcgacagatgagttctcccctgtgcatttctcacataatctttcagttaagcttaacgatcacaatttcttgctttggaaacagcaggttctagcagcgattcgtggaaatcgtctgctaaaattcatccaagatgttccccctcctccacagttcttgaccgatgcagatcgtgcctcaaacacatacaatcccgagattcttgactgggatgttcaagaccagctgctggtgtcgtggattttgtcctcaatgtctgaaagtttgctcacacgaatggtgggatgtcaaacagctcgccagatctggtctactcttgagaagcactttactttgcaagtatcatccaagatacttgaattcagaaccaaattgcaaaatctcaagaaaggtactcaatctctcaatgattatttgcttaaagtaaagcagcatgtggatttgctggcatctgttggagaagtcttgagtgatagagatcacatagcagccatttttaaggggcttccgagtgcttatgacacctttgtcatatccaccaatactcggattgaggggtacacagttggagagattgaagcattacttcttgcctcggagtcacgaatagagaagacggatcaagaacctgaactaaatgctaatcttgttgtttctgatgcggaccagcaacccgaagcaaatgttgcttttcaaaatcggtcaagaaatggctttccttccagaaattcttttcagtttggcacctatgtaccaaattttcccaatcacagaggcatctctccctctcgaggagctcaacacttttatccaaacaactttagtccaaggggatttcactaccaaatgccccagtacaacccatctcagcctcctcaatttaatcgaagcagtaccaataccagtaccaatagaggaggcaaattcgtccctgcttcaggtcgccccacatgtcaactttgtcataaaattggccacacagtagtggactgcttctaccggttcgacagaagctttactggtgctcaatcgaacaatactgcagctcctcaagcaaatctgatgcaaactttcagccacagtgacagtaattggtaccccgactcaggagccacaaatcattgtacaccagatgctcaaaatcttgcttcaagttccacttatgagggttctgaacagctctttgttggcgacggtacaggtttgtctatcaagcacattggccattcatttctgtccaatccatctatcccctctcctcttttattgagcaatttacttcatgttcctgcattaaccaaaaatctattaagtgtatctaaatttgctagggataataatgtgttttttgaatttcaccctgatgtttgttttgtcaaagatcaggttcatcacaaggtattattgactgggacttaccagaatggcctgtattcctttgattcctcacaactaaaattgatggactctcccatttcatcaactgatccaagcagctcccttccctcccaacatgagcagccccaaactcttactgccactgcctctatttcatcttcacatactgatttcagacatttacaaacaacaacacatatgtctcattttgatatttggcacaatagacttggtcatccttctgaaaaggttgtcaagtctgtgcttcatgcttgtaatctttcaaatatcaataaaagtaccaattctatatgttcagcttgttgtttaggtaaaatccacaaatttcccttcccaaaaagcatctcaaaccatgtacacaactcctcttgaattggttgtttcggatttgtggggaccctcctatatcccctcccaaaatggatatagatattatattcattttgtagatgcttattctaggtttacctagatctacatgcttaaaaccaaagatgaggcactaaaaacctttcaccactttaaggcagaagcagagttacaacttggcaccaaaaatgaaagcccttcaaactgattggggtggggagtataggtcatttaccaacactcttagagaagcaggaatcattcatagacatccatgtcccaccacacatgaacaaaatggcctagctgagcgcaaacatagacatatacttgaaaatggccttaaccttgcttgctcaggcctctatgcctttaaagctttgggatgaggcttttcggacagcagtgtatatccacaataggctgcctacacccgtgcttaaaggaaaaatcccccaaattcgacactcttttttcacatagcaaccagattacacctcatttaaaacgtttggttgtgcttgctatcctaacatacgaccttacaataagcataaacttcagtttcgatcttccccttgt

SEQ ID NO: 188270 - DNA, 2628 bp, Cannabis indica
attttatttgtggttattgtagtttaaaaattgagcaagaagaataaagatatattattttagattaagtaaattttgatttttgtaattttataaacagtcatcctgttagtgtcgtttctataccgacactaaaggaactttaagtgtcgatcgattataaaacaacacaaaaactcaatagtactggttctaaactgacactaaaggaaaaagacatatatgtatacttgaagtgttggtttagaactgacaccaaaactcaatagtgtctgtttataatcgacaccgaaactttaatcttttatctcaatggaataggtgtcgcttcataggactgacattaaaagtgtaagtgtaagtttaaaaccgacaatagaagtgtagtttgtagtagtgtatgtctcattttttagtttatttagacctagggaaaacctagagtttccctttcttcattccccatgactcgggaaatttattatacaccttgattctctccttgaataacagtaattatttatattcaattgcatttgaagaaactatccaaaaatattctattcttggaaagaaacagatgtcttctagaaacatatcttcatgacatgtgtcagtgagcttctctttttggaggataatgaaaggggtgagcaatgaccatgagaagtggttactactaacatatggtgtatttgggggagtcttgccactagtgaagaggcacaactcatgtgtcaactctatgtagctcccttttggcggaactttgacgaaccttgaaattggaagcctaatcaggcagtcaatcttgtaacctaattttatgactaaaaatatcagagttgtcatatgactattaaacaaacttatatctgtcttgaaaagatcttttgaatgcaatttgaatcacgttatttggataataattaagtgagttatgactattttactgaagggttgcaagcagtgtttacaaattcttgttctatgcgcgcattaccatcttcttcactaaaaatatgacactgctcatgaatacttggttcttaacaccatgggtatattttaacaagtttctaatcgtgatacatattttcttggttttgggcctcaaaacattgtaaaactctaatatgggactagtggccaaaaagatggcattggttccctatagcacttatccactacttggttatgtgtcttgatgttgtaaaaacatatttgaccaacttcctctctctctttctctttaggggagcaatgtaattatttttgccaaaaaagaatggcactgcttgtgtgacatacatctccacctttgagtgacttctttcacatttttatgttttttgatgttggagaaacacactttgccagttttccttttgccactcttcttgggcaagcaatgcatgcatgcatctttttagtgaaaagatggcatagtacaagaaatgtcacttataccaacacagttcgctattgcgatggtaaaagttacttttactagcgcatttcgcaaacttccctggcaaagaggtcaaagttttaccagcgcacatttgcagtggctaaaatctaatttttaccaacgcatttacacgttaggaaagtcatttttgccaacgcttttcattttatactggcaaaaattctaataccaatattgatttgccaactctcttttgctagcacatcacaagtaaattctattttaccagcgcaataccaacttttttgtgctggtaaaagtgatattttttgtagtggcagttctcacgtagcattcttgggggatacttttgtgttttgactctatgttcaagttttggtctctttgtattttaaggtactcttagcttgtagactcttttaggggagtagctattttatttttttgccaaaattaagtataataacttcagtcaatcgatacacttaattcaaatccataagctcgcgatacactctgctatagaaatctggtgacaacgaagaaatcaaccctccccaaaggagtagactaaacctaagtttcttcaatagaaatgtaggatttttttggccgctaacactttcgagtttttaattaattactaaaatgaaagaaaaaaaaaacaaatagagattcggcaactctctcttttcttcaagtgtttgtaattaagaaaaaaaaatagagcatttaagtaagacttttgtaatttgttgtattcaatactaattttacaatcaaacatcacgtctttctagtttatagaacaaacaaaaaaagagaaactttattgatattattacaaggcttttgaatgtggagcatcctcaacaacatttcctttagttcttcccctttttttcttgtcatttttatttaataatacatatgatatagagtgtatttctcacatcatgggcagaaagtgataagatagttaggtccaccggagcaagtaaaagtgctggtcttatcatcataagcatagctgtaagcctgagggcattgttgctcgaagtagttagcggactcactaggagtacacgtgtctggagaatcataagctcctctacaacagtcttggtccatattatacttggcgcaagagctgaggcacccaacgacgtcgt

SEQ ID NO: 188271 - DNA, 1323 bp, Cannabis indica
ttaataagttggaaaattcacttcataaattttagatcaacttattaggagcttgatttcataggctcatgttcccaacattatctggaataatatcatcttgatgactcaatcaattgaattatttaatcaattaaaatttgaaaatttactatgtctaatttgagaattttcactaaggttgagaaaaaaaatattgagaatgaaagagaaataaagttttatttattaattatgatcctttatgggttaaattaataaatatatttaaattatattttatttgataattattaaattaaattggaaattaaatagtttagatttaattagtgataaaattagtaaaaaaaatatattttaatccaagtttgattgaaataaaatgacaaaaatctgatgtgaacttccataagtggatttcatccgtaggggtttaaatcaacccaattatcttttatttggttcctttaattaaacataaaacctaatgtgtgtagtatttaaggaaagagatgagaacctttaatatacaagtgatacaaagcttacactgacagaaaaagactttcctcttctctctctgtctttattttttgtgccacaacaagtaattgaataatcaacccactctaatgcctgaagaaaaaattcctttcccaattttcattgcttttgtttggcatatttggaatactcaaaactcaactctatttaataaatctggtgttcctaacaatgtggaagagtttgttattaattatttacagaattatattgctactcagtgtaactacaagggagatcagctggattctgaggctacacccatttctcgtactgctcagcaacaacaccctcctctcctgcatcctgatagtccttctctttttgttgatgcagcccttgaccataagaatggcttaacaggaacaggtttcatcttcaaattgggttttcagactgtattggcttctcactaccgtcatttgcctggtgttgttcctcccatatttgatgaaggccatgcgcttatccttagtcttaagtggtttttggattctcaattgtcccctaagtttgtcttttcggattgtttgaatttggtcttcaaagtgaatagtgcttggcaagataattctgctctttctggacttgtctctcggattcgctcgctcttctccaacttccctgatgcttctttgcaatgtctccctcgccagtttaatatggaagcccatgcacttgcaaaagaagcccttaggtcgagagaagatagctagaggggtctgttttgttccctcttttgctgcttgcggtttt

SEQ ID NO: 188272 - DNA, 5269 bp, Cannabis indica
ccgtgctcgtttggttgcaaccgtggaggttgtgggtggtcgtttgggcgagagagaaagagagaagctttggaattatttggttcaaatgtgaggggtattatgggaatataggaatggtataacatttaaatttagaaaaataatattagaatttattatgtatagaatttcaaatttcccatatgatattctaaattgaataattagaatttttgtctcttaaatattttatactatattaaattgtgcccttaagtttttattaaaaaaagttgtaccccataaattatggattattataaaaactgtactttctatattgtaaatcattttaaattctcaaaactttgtatgatatcattatttaataaaataattaaaattaaggagaattttcatttttatggtttttaaaatataagtttgtaaaaatataatttttctcaaaattttttatgaattttttaaaaaatagttaaaaaatatgtaaaaaataacataagatacacgattaccccatggtaactagttactcgtctagttatcataaaggttcttagttatccttacttcattttactatatttttcaacttttacttcaactttcccataaaatatcatttttgaaaaaaaaaaattatatttttgcaccaaattataaaaaattagagtaatttacggcgtaaatacccaagttagactctctgttgcagataaatacctaagttttattttttgacggtaatagtacctaaattatatttcaggagcttttatagatacatgaccatcaagtatgaagttattattcacgtatcattttcttattataatatatttaacataatttttaaataaaaataaaaatttaatgatatgaatcaattagagattgccacgtagtcatttacttgacacttgactgctaaatacttacaaattttttagaaatataagttaagtattattgtcgtaaaaaaaaaattgcaattaaaaattaaacttaagtatttatgcaaaatgtgttaaaatatggtatttttctaattttgaacagaacagagaaaaagaataaaagatctctgagtaactcacaacaacagttccaaagcttaacgatggcttcatcttcttcctcctccgccgtcaaagaacttcagcgagaattggagaacaaagctaacgatctaagcaaacttcaaaagggtaaaatcccattaccatactctcttcaaaatttcacctttagacctaatatatatatatatatatattgttcatgcatttcttcaagcacatggagatcattacgatcgaatattgatctgaaatgttattatttctttttttgaacagatatttcgaagaaccaccaagtgagaaagaagtacaccattcaactaggcgagaacgagcttgtcctcaaggttattttttcattttctttttcccccaatttctgtttggttttgtgtaaaaatcttttggggcccaagtgatttgtattgatttatataattataaattgaataccctttactgatttttaatctgaattttggtttttaggagttagacctattgaatgaagatgcaaatgtgtacaaattgattggtccagttcttgtgaagcaagatttggcagaggctaatgcaaatgtgaaaaagagaattgaatacatctctgctgaattgtatgtttctgcttctcttttcttgttttatgaatcattgtaaaactaaaactttggagctttcttttgatatatgaaaaaataaaataggatttttggcaaacagtttagtttcttaatgtaagattgattaatggttaatctactgtaattcgagagtctatgcaaaaaataatcgcataggtaatactctaaagagaaaatcagagactctttatcgtatttttagagttaatatttgaatgtttaagatcattatacttagttctagctagcttaagttagttaaataggcctaattactgtaataataagtgtagtttctggccacatcaatcctacatgtgtaatagttcagaggtaaagtttcgatttattctatattaagttcatagttatggaactaagatatgataactaagcaatcagaatggggtttttctttcgtttgtattgcattttaggcaattgcagttcataacataatgccatataacatgtacaattgctttcactgctttatattttgatctcttctagttgtcagagcaaattgttgagtgtaaatttatgtattgatgcaaaacaggaaacggcttgatggaactcttcaagatttagaagagaagcaaaatagcaaaaaagaagcggtttgttttctttctcacttcatatgtcttattagtatattgatttgtgaataggttgtgatgatatgtatctgtgtgtttcgagtatgtattattgtgaattgttatgttaactttgattgcattggttacttatttgttgattctcatcaaggtctatctttcatagctctgaagtagaatagatctaaggctttagtactcataaggtatgaggtgttgtagggatgggaatccggaatctaaaatgatcttgcagcttttagattcctcgaaatgatgtggaaagctagtcccgcctgccctttttgtatctccaaatattttaattataaggttaaaatcatcatttttttaagcttcatagttcatcatagtttaataggttgtaagaattttttcaacattgttatattatttatctcattatacagattattaggaaatcgtaggacccttttacatttcactttaatttacaaactcaaataccatgaattggacattttaatcacaaaacttgcagaagacatgaaagtcaacttcaattacatattgaaacctgagaccgagacgcaactagcgtttgaacctattccacaaatcaagtgaaggttcacctgaacttgagtattgatgtgtgagctttaaacttcagaaaaaaaaaatagccataacatataaccggtagcattgcatcggtaatttagactttcaaaaattgcttaagtatgattctataggaataaatgcattggcaacatgtctttatttgaagctccttattcatttctggtggctaaagctcatacttatataagcttttgttttctgattaattttgaattaattgaggctggaagaaagtttcatgtgcttgtataatttacatttgttattcttgaattactagtggatgaacatgcgtgtactctagtcgattttctgttatgtcctgctttcaaaagattactgtaatagaatctcgaaaatgcaagatgaatattaattagttacatcggttatgtcatcttgcagatcctaaagttgcaacagagaatccaatcagttcaggctggaaaagccaaggcctaacatgatgagtcaaatgctatcagatgtaacaatttctttggactttaattttaaagcttgaatgaagcattttttttccttcttgtttgtagtttcagctatggtgctttttacaaatctttattgtgattttagtattgtgttagattcaatcttatatatatatatatatgctaaatggctattttattttcatgtggtatatcaaactgttttagtgtttacacagttgggtagctggaatgcttataatgaattagtactgtcatttgtagacaatcgaagcatttgaacaaagaaatggtagcggttaggacaatcgtgcatgtctttttaacgtgcctcggtccaaatatagcttagaaaattctcttagaaggctctctcttcttcctatttgtagaaaagggtaaaatactatcttctttgttaaactaagtgcttgtgatcgagtgctctagtgtcttgtctttgtcccgagatgcttatcgtcgttgattaatgtcatactaggtttgttagtttgctaccatgtccaattttgctaactttgttaattgatgtgttttagtaacaataattttagttaatagtattgaaatcttagcaatcccacagtggaatatacgatcatgaaagtatcttggggttttgtaacacacaatagtatgtgtatgtgtaagaattaatcaagtacaagtagagggtgcaaagcttaagagacttttccctagatcgaattcccacaagtggttttgctgcatgatgttgccgatgatagatgtgcctggccaactagccgaaacaaatccaagacacctagtctccggtgcaacatcgaggatatagctcttcatcgggggttcaaacacagcaccatttgcaagcttgatttttagcgacggcaccaaagagtcttgaaacctagttgagttgtaacagaactcgaatggtcctccatcgtcaggcaatctttgcaatttcgacatgtacttgctgaatgcagctgtcacgggtttgtaagctggttctgctagaaacgttaagcttgttcccgaatcaagaaccgttccacctccacggttgacatcccaaacagccggtggtatgtttaccacttgacccccaactgagattcccacaatattcacgccatagagtggacccagagcgcctcccaaaacaagaggggtacgctgcacacggctcgagagcgcggttttaggcctggtggaaccgaacactatgtagtttgtcaagttttgggagctcaagtgatcgaccaagcaatacgagaacttggaaccgaaatcttgagctgcttttgatgtgaatgtgtgcttcccattgcctaagccaagtacaccatgagctcctttgaaaatgccttgctcatccttaatcgtttgagtacaaccaattaggacattgttcaatgttttcttcttgccattggtgaggtctactgatatagtttcattgccaaagaagcccaatgctgcagaaccttgtaggtacctaatagttggtaaaggaacaaaataagaaatcaaaaagggactaaatttaaattaatgaaggctttcaaactaaataaataaatccaaatgtttatatttttaacttctttcagtctttatttatttatttagtttatatcaattaatgacaatacattagaaaaaaaatgaaaaattatatattttatttttaataattttttacaatgtaattaaaaaaaaatgtaaaaaggaatttcctattttaggtataaaaaatgcaaattcatttatatgataatgtaaattatatttatattaggcat

SEQ ID NO: 188273 - DNA, 1321 bp, Cannabis indica
aataatttccaacacatacacctccatgtttcttccaaatgtcctttgaacatgcagtttacaattcgttgatatgtagcttctgtagttttaaacttgtgtgcccttgttagtttgaaaacttgtgtgttcctcgtcagatgtatggattttgatctgattatacccaaagtaggaatcaataaacgtgagaaacttgtacccagctgtggcatctactatttgattgattcacgcgagaaggttacaatcttttgggtaggccttttttaggtttgtaaagcctatgcacatcttccacatgccattgggttttgggactaaaacagggtttgcaagccaagctcgatacaatgactcctagaggaagtcattgcatgtaacttgttgacttctgctttcaccgcatctgctctaacaggatctaaaggtctccttttctgacggactgaaattgcatccccatggatattcaaagccttgaaaattgtatttaaattgatcctgatcctagtcttgttggagttactccaggccaacacatcttgattttcgctaatgctaatatttacatcctctcttacggctggagggaggttctttcccaccttgagagttcttgtgggattatcttcgttgatgctcacttcttctatctcttccattagctccaaattcttttcaagtccgactcttggacctaactcatcttcatatccctttggaacaacattcgtatcaattgggtcgtttagtttgagtgcctcaggcgcttcttccctaatcatgtatacaacttgggtcgatacattatagtagtttcttgtgctctgctgatctcctttaatggtgttgatacactcattctcacatgggaactttagggacaagtggctaatggaagtcactacaccaaagtccactagagtccgtcgactaagtatggcattataagttgtaggatagtcaactaccacaaagtttgaatgtttgaatgaactcgcctcgttatcccccttgagggtgatcagtaattagattttacccatgggcattagggtgtcgctattaaagccttgcaactgaactgggcatagagttaaatctgcttcagttagtccaatcgcttagaaggcaaacttgaagaaaacattaacaaaacttccattgtaacgccctaacaattaagcacgttacccaaggtgattaagaaaccttaatcccctaaacgggattactagaaagataaacacaggtaatttaaactttaattgagaacagattgaaaataataattataataaacttaactttacaatca

SEQ ID NO: 188274 - DNA, 6012 bp, Cannabis indica
gttctccctcctccatttcttcctcccctccctctttaataaacatataagtgttagtggtacaacatcatcatgccaacatacaaagttttccaataacttccccgaaatcgaaccctaatttcctcccccacaaagaatagctgtacaaacaaataattatacacaaatgaaaaaagggcaagttatcaacgaacagaatcctaaatcttgaattgtcaagaagaggaacattgttgttccccacactttaagatagccatcctctgtgatctcgaataaccttgcctgttattaagtatgtcaatgtaatttcggagcctataccggtctgaactcgtcagagagaaaggagggtttagaatgagggatggtgcttcgattagaaggaagactaacaaccgaacagctttcgagtaaaatactgctgcactttccatgtcacccattaactcatctacctgccaaatgtaaacaactttgtgaatacgaccacattgaagtgatttattatttcaaaattcatttcttatctaccattagcattctgttttgtaatttctcaatgtaagacgaccatatgcgacaagattgcatctcaaattaactggtgcaaatgagatttcaactaagctgaataaaatacaaccatgcattttacttctagaacttctggagcataagaagaaaaagattgtttcagttgcatttctaaataaggtatattttcttaactccacaacttagatgatacctaatcgtttaattcacttactacacagcatattttaacaaaatttacagttcagatgtggggaaagaaaataagctacttcttccataataagaaataaaaattaatactcacacccccgtgtttcccaaaagcaagagcagattgaaagattgtttccattggatctggcatctctatattccctgcaaccacgacaaacaaaggggtagaatcttatgagcaacttgcaattcgtggtaatggtttataaaatcagcaaagaaaatcaggcaatgatgcggacatctctgccatttgttcaggctacaaaaactagtaagaagatggtaatattaggtggacaacaaagagtaaacatgagaagatggaaatttgttgaaagcatagttgtgtaccaggcttgataatctttgcaagctcttcagcatgttcaacctctctcagaaattctctctcaatctgaggggaaatatcctcaggccctagagtgttaaccagaacattcctctgcatcagggctactgttcttcttgctggcactcttcaatctcgtagtctcttggcttggacttccttccatatccgaggcagcttgcgtgtggcatatatgcaatgcttgcttccaaattgcaagaattacaagctggattgagaatgcttcaagttgcttatcagcctcaatctgtttaaacagacatttgctgaaaacttagacaaaatattaaatatatttacacatatataaatagatttgtatatttttaaaaaaaggacttaacaaataaacatgtaattaagaatatatgataaattaatatattacatatatttaattctgtacacaatgcaaatgttaaaggcaaattaaagcttctaatgcaggtttgtgatcttgaagttaaggaagccgaacaaatcatgcctcagattgctttaagctcaaattatacttaaagcctatataaaattacactagtggtccacatttaaaagccaaactaacaaaagaacagtatgatggtcaagcttcagaaatacttgagcctaattgaacatgcagtactttggcacatgttagctaatggcacagaatggatggagccaggatgtcatggcgaacagcttaccttatcattaactaattctgttatagcagctgcacacttctgcaaagacttaagccttatcatgcagttcgttgatggctgctccaaagtatccatatccgttgatccttgggaagtacctggaccagagctctgactttccatgctttccatgcggcaaatattactattagtggcaccaatgattggcaagggggctgttgaaattgtagctgcagatgctttaggtggactctctaatttgtatggaaaagggcttggcttggttgtactgcctgacaatgatgacacatcaacaggtggtccagagacaagtacatagtcttgatcactaaactccagtgaatcaacaactgcaaacgaataagaaacaggaaaaagtgaaaactgatgctctattagaatatttcattgacagtaaaacaaaagtgaaaacatgatagattattggcacctcttgggcgggcatttattggtttttggcttgtgagtttaataggatcatgtagaattttaacagatgatttatggctgtccggcctaatattataagattctttggggcttgcagtcttgtattggaatataggatcaatgttgttagacgtagtaggtgtcgttgcaagcctatcaatttttgtatcaaaagatggaggttcacgtctctcatttttgtttcaagagaaaatccaatagtagacttcattgagggcctccttgagtaagaaggactcccctccggaccacttgaatcatcatctaagaagaaaggcaagcaatcctcctgagaatttgcatctgttttctttaccgggttgctatcagatagtggaaatcctgtaactattctcgttgttgagcccctactcctgcatccaatgaaagattgtttcatctaatacacactcacatcaatagatgaaaccatcagaatttttcttaaacccatatataccttaacgagtcatttggcagcttttgagatagaaacggatggttaaagaactcttcaaatgtcaaccgctccactgtaagtacaaatgaatcagagctacaaaatataattatatatatgattcacaactggaagcatcaagagataggacaaaaactatacgggttcctatctcattcctatgcttgcttttatgtgaaacaaacaaataattatcaaacatgtttttataagcaatctttgtttaatgtcaaattcaaaattataattagctgcgcatgtctatctaatattttcagggactattacttaatcaaaatgaaagactccgagcttcatgaggaatatataagtacaataatgtaattaaatttctatccacaaacagacattacctatagccacacattcgcaagagcatagcggaacatacctggattacgacgcaacaatttttggcacaagtctttgcactcggaactcaaaaagttattactatctggaggaaaatttaattcagttgatttcacaatgttttggagcaactgcacagcatatgaaggacaaattaaactaaaggtttagtaagacaaaatattgaagcatgtaaacatggtaacattccatttagagtgtccatgtagagggtgtaattacaagcttgaaatacagtgctcagaagcacaacctaaaaccaatttaaaatcatttatattttccagaaaaaggaaaaaaaagaaatacaagcaaaaaataaaaaagaacctggatttgattgtttccagtaaatggagtttttccggttacaaactgaaataaaattgccccaacactccatagatctgcctgtgaattcagttccaaggacagtagaaagacaatgtataagtctttcgtgagaatgagatttgcccattataaacacacaaaatagacacataaaaatagacgttatcaccttcgcatcatatttttgcagttgcattatctcaggagccatgtagagaggagacccacataaagtttctgcaaggcctcgaggttgcaaagatctaccatagaaaaataaaatagcataagacataacgttgaagaagtccgtgggggagtcactagtttgtacttagcagtaaaataagtgttgagaatactaataaggaaatttacaagtacatatgtgtgctcatgcacgtttgtgtgtgagaacagttttgagtggagagaaatttttctagtatgatccaataaattcacggtcgacatcaagttaaacattttgcatcagcatcttaacattaagcatgactactagggagaaaaagagaagttcatgaaagctatttgatctatagctcacaaaaactcataagaagactacaagggaatacctgaatgcgataaaagaatcactatacatttcttctacaaagtaatatgtaaaaaataatagtgaacaaaaaactacaacaaaaatggtaggcaagaagataatgaactataataccttgcaaatccaaaatcggcaatcttcaaaactgcactatcttcatgagtagaaagcaggagattctgttccaaaaatagtgggtgttatgatgggaaaattactacaaatcattctgcaaatgactattattagaggtgaaacattatcataagatactaatataagctagtttcatcaccctttcatgaacttgcccaacttacacagctagttaaaccattattccaccatgcaagttcaattctgtttggatcatcagcacaaagataatttagaaaataatacattttgtgaaagcagtgaacctaacctgtggctttagatcccggtgtataagattattgtcacgaagaatttgtagcccagccgctgcaaataatggaagtagttagtatcacatgcgacactacaagttaaatgaaatctggcaaaacaaagcaaacagggcggttcaagacaaacctagctgctgcataaaatgcttagcagttgtttctgggactcttccatgtcgttggatatacatggaaagatcaccacctttacagtattccagcacaagatgtatcttcccaggcgcctatattaagagaatgtaagccaaaacattgaagccgacatgaaaaccaaagcccaaacgcccaaacccagatgaccctttcttccactcttttacaagcttatctagtccatagtagcattcaaactagcatatttaaaactcatttaacgtaacaattcaattaaaccttgactctagttgatagatttttgaagacaacaaaacaaccaactccaacataattgtagaggtgtgattgaacattccttcagtgcacaaacaataagcattccaaatttattttcatattcctcgaaaataatgtaagttttcaaagttcaatgtacggttttcaatgcagcaccgccaacaacaacaacaacaaatccatacatattgtatacatgagcacttcaaagacttgactttgaataaacattccggtcaatacaataagaaattaagaattattgcagtcaagttcaaactctcaaaagaagtccaatcattttccttcactctaacagaacataattctaaaaaaataaaaacccataaaaacaagaccacgaacctcaataatatcgtgcaactgaattatattgggatggttaatcttcttcaagataaagatctcagacattaaactttcctgcaacttcttgttgagccggctcgtggcgatttccttgatagccacctcagttccatggacgcggtgcctcgcgtgccacaccaccgagaaagaacccgacccgatttgccggcccaccagataatctccgaccactcttcctctcccgttcgcctgagccattatccaaattccaataccaccaaaccaaagcaaccctagaatccgaacccgaaaccagctccgaatacccgaatctcaaagctccaataacaacttacaaaatcgccgagctcttgttaccggatcttccgtatattcgacccagattttacagaaaaaaaaaaaaaaactaaatttttgatcgaatcgtatttttctttttaaatttttttttttaaaaaaaaaaaataagatgagagagttattagagagagagtgaaagaaataaattattaaggaatttatgc

SEQ ID NO: 188275 - DNA, 2692 bp, Cannabis indica
gagcatttgttagagtaaaaaaacaacttaacaaagaacgagagttacaagcaaattaaaataatgagcaactctattcgtagatcgagaaacaaaataacaggaaacattaaaaagagagtttaataaatatttacaatcatccacaattaagccgaaagtagaaaacatttgaagggagttgaacaacacttgtattgcaataagactatcgattttaatgaggatattactccaattcttaactcaatttagagccttcttaatacccataatttcagagcttttttttttcatgaagtgtgtaaatattgtttttgtatagtactaattataccccataaaaaacgttgttatgcacaattatagtttattgagatttcttttcatgaagggtaactaaggatgtacatttttttataggaatggtccagtgaagatttgctcttaatagggcgagaatttttcatctaattggaaaatgaagaggggacgataatcaatttttgttcccgaatattaaactgagcggggacgagaatgacacccccaccctgacaagaacctgcttaatattttaaatattttttattaatattttatattttataatatgtgttcgtattttttttaagtatataagtatcatttttataattttttaaattatattttgtataataattagtatattgaataataaataatgtgtgatattttaatttttatgtaatttaaaatttttatacaagtaaaatttaaaaataaaacttattatatattatgggatttctcaccttgaggatttcctccaatccctgataagaaataagcgagaatatgaattaaaattcttaatggagatgaggacgagggatcactctctgccaattctccgttctctatgcatccctcgcaactagtggtggagcgagctactcatcttaggagaggaaaaaaggggcattaataaaaaatattgtttaaataaaaaaaatatatattttgattatgtgtggaaaaaaataaaataaaatttataaatcgtcattttaatatgccatgaccaaatctaatatattatagtacaaaaaactattatgctaccgaagttaaactaatataacatagccaattttaatataccatagaaaaaaagttatattatgttaaataatataatatatgaattaaatctgtgttacatattagtaagtgattatgaaaaattatcataattctataatataaaaaatgttacagatttgaaatgaatttctaacatatgattcacatttgataaggctacaattaagctagtaattgtatatgggagttataaaattaaatggagatatttctaagaatttaaaactgtcaaaatattcctttacatcacttaaacaaattttgggtgtgacgggtgttcatcaaactatccacaccatataaactgtccacatcacacgaaacaaaaatgtaatttaaaatcttttgccgtgcggttgcaatttgcatttttgccaaatcgcgtagtgcagtttggtttacattttaaaatttaataatcgcgattcaaactgcaccgcattatatattacaaaaatactaatttttacgttatgatttctcttttgacatatgggcaattcatatgcttacaaagtccaagccatacaattaaatttaagaaacatttatttttattttttatttttttctaatttcttattgctaacatattattattgatatatataatatgtaatacatatatatgtatattatatgattttttttttagagataattgaatataataatttgattagtatataagttatgatgataaaagtttaataacatagtttttttcttgtataattgttgaaattttattagataattttttttttaataaatttataacaaaaccggtactgatcaaaatagaaaaaaattacaattttacaaatattaagtacttatgccactaaaaaaaatcattatcttacataatcaaaactttaggtattatccgctatgtacccaacttatacttacaccacagattaatctattcattattatagttcaaggaaccaatcacgcaaagacacgtatcaagaaatataatgggaagaaagaaactcgttttcaatttcccgccaaatttgaaaatgaaaaaaaaaaaaagaatttcagagctgatgagagagaggtttcatccactttcgtagtactctttcaccgattttcttgcaataaaccctaattgcatcgggaaatgtcgacgtggaagatattctccggcgccggaaacactttccggtgggaaatcaccggccgatacctcgaaccacgacctgttggcggagccagggatactgatgccccaccttctgtggaaagaggacacaacccaagctcgcgtctcccttccatgacagacattttgtttcaaggtaattctttttccttctctggttcagagttgttgtgtgcgtctttctcaatttaggttggcgattctaatttacttgattcagaatgttcaaagcttctggaggataatgtcgaagaatttgacggaggttcgatgttcaaaactggatcggggagatctgttccggtgaaacaagcttcgattactaaagcactagctgttcttggccaagttgattcaaatgat

SEQ ID NO: 188276 - DNA, 867 bp, Cannabis indica
ttattattattattatgtaaatattgctgtctatatattagtttagtattgttttagaatagacaataaacttataatctttttacttttattttttggcatttttttctagtctaaaacgttacctctaaaaaatatatatatccaaattaatacgtgtgtgaaatttgaattctaataaataatatattgttattaggcatgttaggattgattaatgatatcctttaaatattgttatcttaagttattatagagattgaataattaattacatcaatagcaatataatattaacaattattactagtacttttaaacatttcccttttataagaaaagatggcttagtcaaaattgttaaactaagtaaagctttggctggttttaattagtacactgtttataaactttatatatgatatgatagcatatgtaaacattaaagcaatttaattaaggaaatagactagctattatatatatagtcaccactacatactagctactcaattttagtctaggcttttatttaatttactttattctttttgtttttttagtgtgtattttgttttatatttgaaagttaattaaggaacattattagctagtgcactttttatgtgggattacatattataatttatagttgttgagttgaaaataaaattattggttcactggcgccctcaccatcttgttcacatatgtacggactagctagtttaatttggatcccatgtacgcatagttcatagataaattgtacttgtttagtttgattttacatatttagagcaacttgtgccaacaaactccttaatactaaaatcttagcgcaaataattaactttaaaattcatt

SEQ ID NO: 188277 - DNA, 2737 bp, Cannabis indica
acacataacattaacctagtataagtaaatatgatatgatatcgacatcttgaaaaaagtaactattattttaaaactgttagtaagaaaataatataaaaagtaacagtagctaatttttattttgctttttcagaaaaaaaaaaaaaagataatgtgaatatatagaattatagatgatgatattatatatgagactagggtactaagccgcgcttcgcgcgggttcagccctattttagtatattttttaaataattaagtgatgtagcttaaaatgtaatattttaatgtgaaatttataccttaaattgtaatattaaaaagtaaagtaagaatattttaacttttgagtttcataaattttgaaaatgttttctgttacaaatatttaaaatcttagattaattattattttaaatattttacatttgtatctgtaactattattattaatgtaatattttttaaacttttgagtatctaagtgttgaaaatattttcacttataaatatttaagatctcaataaatattagaattgaaatatcttaaatatcacaattttattattattttataaataattaaaaattatttacattttaacatcttatttcatttactgctttaattatatatacatataataatttctaaaaaataattttgagttggtaaatgttaaaattcaaaatcccattaattattatgtttaaaatattctttattttttagatccacagttttttattattatatatttatgatttattttaaaaaaaaataaaagaaaaatatattttagaataattgataattccaaaaatttcatttcaattcgagtaatatttatatatatatattatatacatatatatataaattgagccttaatttattaataataagagcttgattaaatatattactttcataaaatctaagagaatgatttacccgttatattaattttataataaattaatctcaatttaattttagtttaaattcaaaacaaaccacacaattctaaaattcgaaacaaaccttttataagattttaaaatatattttctttctgcttttttcttattaagaatttggcttcttctttttatattttctctatagttagtaatcattatatttatttagtagctaaattagactcccgagtacatttagttaacttggaaaaaaattcattcaatagaatcgaataaaacgaaaatccttgaggaaaaaagtatttttacttaacgaaattaatttgttcataaagttgtagtatagaacctcaaagaaataaaaactaactaaacataattggtataattagtcgatgatgataaagtcctgtaactacaatataaaaggactgaatataaaaaaaaaataaaacaacgacctaaaaagtaaagacctaagaagtctaatatcttagtccaaaattaaattgtcgtgaaattgttttgcacccaaattaagtcaagccgcataaaacaataatttgacttcatcaaaataaacttcataggagaaacataatatgctaacaaacttaattattgatcaatacacacataaatctataaaagaatgctacttttattatacaaaactatttttgtatcaataaaaaggtatagatttctttaaatatatatatataaataagccatatgtgagaaataaaaaataaaaaaagaataatcacttataagaattaatcaaataaaaaaatatcatcattgatcaagccatcaagataaagaaaacataattaataaaaaagaacataacagttgacaaaggcttaatgattaaatttataatgtaatagttttttagatttggtttataagttaatgtattttgattccccaacaaatatgacaaaaaatgccatcatatatttctattacaaataccaacacaaaattggatctttaatcattgaggaagaagaaagttaaaaaaaagtataaatttgttaccatgttatttacctctcatctctctattattgtgagaccttgctatatctctaaaactcttcttgatgaacaattctataaaaataaaatcaatgtttatgctgatttttttctaaaataaataaattaagagaaaaaataactctatcaaaatttctaatagtgattgacaaaaaaaaaactttcttcgtctatatatatagaatatcaaagaattttataccaaaaaaaaaaaaaaaatccctttttttcttcttctatttcatgataatgatcatgaccattacaaatttttttaatatatttccccacaatctcatgactcataatgaccagaaaaccttcagctcctagaaaccaacgtaaaacctcattaacatgttgtagtcttactccatatttagatttagaatatcccaaaaaactttagtcttgaaatcactggatcgtaacatttcgatgtattttttctttcatttcgcataagacctgtaattattgttattggttttaatttatttaacctctaattgaattgttattgtctaaactatttttttttttttttttgtagggagttatataacacttttcttcttcttcttcttcttttttataatgtacttttctcaaataggtaaacttttctcactaaatcaaagccacacccattgccaaagctttcatttcaaacctaaaaagataataatataaacgaattcctaataacaaaaaaga

SEQ ID NO: 188278 - DNA, 2070 bp, Cannabis indica
ctaaggagcaggaaatggagatctccgagcttaagttggtgcttagaaaaagaaaaatacagaagtcagtctctacttatatatatatatatatacatatatatatatatgtctgtatatatatcttttatttttaatgcaacaagtttgcgaccgtttctgttttagtcaatctttaattcatggttcccttttttgctatatccgtggggtgtgtgtatacaatctttatgtcttcatatatggtagtggtctaattgtttgattgaaatgcataggtggagaaattgaaggacttgtgtttaaaacaaagggaagaaatcaaatcattgaaaaatgcaatactattcccagatgctattaattcacaacttcaagacattttagagaaacaggactcagagctgaagcaagcaaaacacttaatccctacactgcagaggcaagtgacttctcttacaggccagctccaatgcatagctgatgatcttgccgaggtatatatattgtctattaatttatgaatagtgtcactattaatcattctagtaaagcaagttaagggcaatcccattacactttcgactatagtcattttgaagttatacctccaataaattgttttgatctctactagccaacaatgatacagttttagtagaaaataaggtacaaagggtttatggtgtccttttgtgtaatgagaccatctgcaattaagagcaaagcaaacgcttcttgtgctttcaccattgttgatttgttgtgttagattgctgatatttattgctttgagcaggtgaaggctgataaatattctgggagaactggttttcagaatcacaatagttccccgagaacaccaacatttaatcatgatgatgcttccaattctttggtaagcaggaccatagagtacacttagtgtctagtgatgacaattaaaaagtttgggagttttgcagttacatgactgttgataatcttatattaggaggcaacatggttttcctgtataatattcttcccaatatggctttaaatatcttcctaaaaatgtttactgaatgaattcaggagtttagctctgaagatcaagccagcccctgtagtccggatgacatgttactcaaagatttaaatccttgtttgacaccgtactacgctaaaacaagatccaaggtatccgtctttaggtctcggttttcaaatgtgcctcttatagagttcatgatttttttccttccccaaacatccatcactacgatgggtttttaattgagaagtttcatcttttacaggaatttgagggaatgggatatgattctcctcaaccacaaaatgaaagcttatctgaaaacaaaatggaatttggattcaattcctttagcaagaagttttccagaagttctgattattgccaaagttccaaaacagaaaacacaataaatcgagctgctcgtcgatcggatgaaactaaactcacatatggaaaacaaaagcaccataaacttttttgaattgtgtaatttttgctgttgatctcacctgttgggtttttacattagatttctcaagttttgcctgtaattcagtcagcatgtggtatcatgcactattataagatgaacaatagaaaattccaagtctataccataattgaaagggcttgtatgttcttaaaagcacttgctggttgtacatgctgagctatgaataagtccaatttttttctctttagtgaaaaagattgcatcattgttccctaatgaattttcgctctttaggattttttaataattattattataatacaggatgaaaacatggatattcaacactaatgttactctcgttaacaagtgagtagataaatttgactattgattaacatttgttactaagttttcattctttttgaacttatccttttatttcacaaggggagcaaaatattcccaaaaaaagaggcatcgccatttatttattacacaagatagctacaacttttaactggagtttataacatggtatttaactatgcttaacgcatagtatagtacaacaaac

SEQ ID NO: 188279 - DNA, 1168 bp, Cannabis indica
cgggtataattgccatccctattggtagagtttgtagaggaagattcagtattggttagaggaggcgagtggggaatggttccaatggctaagtgtttgttggaaatcaggggtggaatagcttgtccaatagctttcttagagagcctagtaaggaatgggtaagcattagccttggaaaatcaaatcggtatctatcataacctgaatttgggagtttatcacccatcatttctggtccataagggagataaggatcaacaccattgttaataagttcaagaatctctcaaaagggtgtctaatgagaccacaccgatagcagaaaatatgaaggttttcataccaaaactcaagccaatgttcatcacgaaccttcagaagattgaccattttccccctcatcaatggttggttaacatcaatccaaacatgaatcccgataaaagggccccgactttcatgaagagagtcttcatgaacatcaatatactcgccaacccattcaccaactttcttagcaagagctcgtgacttactgaggaacgaaaggcgatgagtctgaacccaaaattgaactctgtttaaatcagatttggtaacattgtgcaacactgttggacagtggagtaaaaccaaattgttgttaaaatgccatggctccccaaaaagaactctatgaacatcccctgcacatccaagagtaagtaaaaagagatcagaatgcatctgtgaaacaacaactgcaaacctgtatttattagaccagaaatctcccattcgcttaatgaaagtcttaggattgaaagaagtagataggcaacagactacaaggaagaattttagtgtttggtgaggatcatggagattagcctcagtgaaagtatgagcagaccgttctttttcagacagagctaaagtggtattcatatctttaatgatagaatccataaagtgtatagaatcagaaaaagagaagagaaatcgtaggtatagcgcaaagaggctataaaattgagtatatatagaccagtcattgataggttaagccatttgagagtggagatcgtcgaagttggcctgagaagcgtggcagttggccagagaaacgagcagttgcaggcgattatagaaaaacagagtaaaaaagaaaaacagagaacgaaaa

SEQ ID NO: 188280 - DNA, 3994 bp, Cannabis indica
aaacattagacaaaagtgcctcacccattatagcctcacgactttctcaaactctttttctctacaccaccttcccacgatggcagagcaccacttcactcgctatcaccctcattaacattgtcctggcctttgatgccaccacctcccatcaccgttgaagcaccctatcaaaacaccaatatgtttgtttttgtttttaatcaatcaaaatcaaatccaaaacttaaaccttaagaaaaatattcacttaaaacaccattttaaaggtttcgaacacatctcctttattggtgttgttggcattattagtattttttttttcagatttgaagctttgaaaacctgtagaattttgaacaaaacgatgcttgtgcaatggtcttgaaatgcccgcgcaatgctcccatttttcatgatttttgaggtaaaaaatgatgcactagcaatgctctcatttttcaccatctttgaggtgaaaattatgctctagtgatgctcccatgaaaacctgatgggagctttgcaaaaaccaatgtttaaacttgcgtttttgaggcgcgtctcgttgcgcgcaatagattgaggcagaagaaaatcgctttattgcgtgcatctcagccatgtgaggccgttagatattgcctgaggcggtacaaacagtgaggcgcacgcctcatttaaaaaacctgaattctagggttttgtttaacccaaattcattcagcaactaaaaaatagcccaaaacatttaattagaaaggcccaataaaacacaataagaagcccaagaaaattcaaataaacttaaaaaaagctcaattaaacatacaacatttaaaaaaaaaaaagaaaacactattttttttttctgaaggttagaatagaatagccaacacaaatcagaaaagaagagaaaaataaaggaaaaaatgacagaagcttcctcctccttctagactagaagaaatttgttcttagaatagtagaatatgattctagttcttaaaacaaaaattatatttattaagttttgagttttattttattagacatttgctgccatgcttttgttttatgagacattttattgtataattggttttataagccattatttatccttggtatttttagttactctaaaaatattattttaaataaataaataagcttacgccacaatgcgccttaaggctgcctcgcctcacaaaaaaaaaaaaaaaaacgaaatagcattgaggcttaaatccacaattttaaacattggaaaaacattgtttttacctgaagatcgttaaaaattggagcatcgctgatgcatcgttttttacctcaaaaatatcgaaagtggtagtatcgcacaaacgtcattttgtccaaaattctgcacaattttagagctcaataaataatatatagatgtgtttaaaactttcatatttagtgttttaagtaatatacttgaggttgttttggatttgattttgattaattaaaacatcaaaaataataataataatataaaagattggcgcttcaattgtcatgggagatgggacgatgttgatgacagtggcagcgttgaagtggtgctctgccacctagggagtagatgtaagaggtgctgggctgatgcctttgttttcagttgtccaatgtttagaacaatgtctatttcttcaataattatcatggtttgtatgttttttaaaaaggctagaaagaattgaaggtcaaattattattcgtttactttaaatgcctggtttgagcagtagatgtaagatgtactgggctgataccttggtttttagttgaatttaaatggaaaagtttgttcatcttggaaaataatcgggccaaatggtgttcaactggaccttggtgccagagatttcgaagcaaatagttacacctttctttacctcataaaacatagcttgatgatattgactcgaagtttcagattggttccagtttcagattggttaagagtttgcaattgatatttcagcggtctgagaaggacgagtactaacaagtcccaggaccaattgctaaggttttatataccctacttagcattgtagaggtcatatatgttaataaatgagccaggtgtaaacaagaatcacatgtttgctgtcttcaaggagcttataggtttggtggggtccctcaacaaatttagttgaagtgttaaacacaactcataatatgtgatttattagtagtgtttttggcagcaaatatcagtactcagtcggagcggaatctcattgttatgcattgaatgttgtctagacacttagttttagggtcattttaatttggtggctttagtctgtttctctcatttactgtttgatgattataaaataacatgtcatgtattgttatattgataatttggtacaggtgttgaagcaagaggttttatattcggcccacctattgctttggctataggagcaaaatttgtacctatgaggaagccacataagttgccaggtacatctacaccacctttttatattagcaatcccacttggcggtgttctttctgtctttgagagtattgttctgggtaacatgcaatccatcacaatttactggtgaaaagtcctgtacaatgtgaatatgagttaataccagttgagacatgtacgagtaaaagggacttggggtttgagacaaagacatcattaatgttgtaggggtggggtataaattttgtgtactgtcatttgcaggcttcgttttatttatatgtattgatgcatggttatttgttttcttaggggaatttgagacagagacaccattaatgttgtagcttgtaggggtataaattttgggtactgttatttgcaggcttcgttatatatatgtactgatattgatacatggttatttgttttcttaggggaggttatttcagaagaatattctttggagtacggaactgacaagatcgagatgcatgttggagctgtagaagcaggagagcgtgcactgatcatagatgatcttattgcaactggaggaaccttgtgtgctgcaatcaggctacttggtactatacatagaaatgaacattactctcccttttatatttcataggctgctgcttttaattttattttactttatgggagtaagaatgattgctccatagtggatatccatttatgaacatgctatttggcttaccaattccagggattatttcgtggaagaactttaatattgatgttaaaatgattataattcaaaacttgtttttaagtcgtcgtgctggttaattgaatttttataatatctacttagttttggtgagacaatttaaatattataatatttttcttgctacattataagctttaagggataccatgtgatggctttttaattaactctcaggcttacatcttgttggtattttctcttgtagaacgtgttggagtggatgtggttgagtgtgcttgtgttattgaactgcccgagctgaaggtaggacacatcgtacctctggatctctattgtgaatgtttgtcagaaatagttgtaaactcgttgctgctttttccaagccacctacttactcttcacttgcttccttatttgtcttaacaaatctaggtgagtcttttgatatgcttttattgccatttcagggtcgagcccgactaggtgggaaaccattgtttgtgctagttgatgcagcagcctgatgatcaacactcttgttttaatttctgcttgttggtgaagctagtctgaaaattctggaacttgttgtgaggtggcagatttgagaaaaccgcttattattaaggggaggaattggtcgataataaagggtttgtaacatttgggatggtttatttttatttttatgaaaaataattgttggcgatgctaaggtataatttgttatttcattgttgttgaagatagagttcaattgccaaagtgtatgttacagcag

SEQ ID NO: 188281 - DNA, 2947 bp, Cannabis indica
attcatatttatggcatgacacttatttagagcactaaattccacaatgcaatgtaggcttacaatgaaaaggaaaaaagtactatgtaggtagataatgcagaacacaatagaacaatttggagcacattcatacacccattatttaaaaattatagactattattagttgggaaagtaaacagaatatcatgggtaaacaatatcagttgggttgtcgtcaaaactcaaaattaccaactgagccaaatagagttctttcccaatatcccctgattcagtcccaaagttgcacataaatcttatgtatgaaagaaaaaaaaaacagttactattgactctataagaaacattccccttttactcatttctgatcaccaccggcttttactggctcaacaacctcagcctccaaggtttctgtcttgctctggttgactatgggatgttgaacatttgcagctgttgaccattttccagaaagggccattcccatcatctcatatatcttaccacccaattgtgctggattgtcaggctgcattaccaccaacaaatttatcaataagaaaaccagtatatgagttatatctgttcacaactcattctaattagctgcgctttcaattataatttatcatccttaacagaaaaataaagatggattatgatatcaatacaagagaactgctgagatctaatttaaaagcccgaatgcatctataaatggaaaaggccgcacttagaaatagtgtaaccacttacagtgtaaccgctagaaaccaaagctgtatcatacaagagatcaatagctcttagagcctcttcatcatttggattactcctgcttgcagcctgcaaatacagagtgaaattgtcagtatataacatataaaaggtgccactgaaaaattatataacaaagaaatccttgttcaccctacattcaagcttttaataattgggtgttcaggatttatctcaaacacccttctgcctctcatgtactccaaactagaattatcacccatagtttgcgacttcatcaacctgcaagaagatcaagttagctcttacaataataatttaataaaagcatctgaaaggtcgttatcatcagcaacaggtgagtccctacctttccatattcgctgaccaaccaaacttcccagatacaagaacacaaggtgatgcgctcagacgattagagatttgaacactagcaactttatcccccaaatgcttcttaatccaatcacatgtttggccaaattcctgtttaatttccttttctttctcttcattcttttcacctggagtaattgattgttccagttagattttctttgccaaatgccaatgataaatgaaagaagcacatcacaaacaaaattaaaaagaattagaagtatattaaaaagaaagtactaaataaactaacctaagtccaagtcttccttgctaatatcaacaaaatttttgtccttgtatgatttcaggttctggactgcaacctcatcaataggatcaaccaagaatagcacctacaaaaaattgaatcacaatataagcatgagctgacatgaaaacaacagcactaccagcatcacaaaatgttaaggccaaaacatacttcaagatccttctcaagaagtttttctaggaaaggcgtatttttagcacttgtcaaactgtcagaagcaatgtaatagatgttcttctgctcaggcttcatgttttcaacatattcatctaaactgatcaactcttcgtcactttgggaagagaaaaatctgagcaagggagcaatacgcttgtggttttcacgatcttcaatacaaccgagcttcaaaaatttgccaaagttttcccaaaacttctcatagtcctgtggcaaccataaggaattcaggtgaaacaaaactctaagagagagaaagagagaccaatcatgaatattccaaatctaatcaattgtattttgtaagtacattggaaaatgtctttcacaaaaaaattggtggatgaagacggtaaagaaagatatacctctctattctcactcagtgatattcccaaaatcatgtcaaaggccttacgcactaaacgtttcctcataatccgtaccttcaagcagacagtagagatgaattataaaacaaacatagatactaaaaactaacatttaaacaaccatagaagtgaaaatagagataaatttgtagaaggtatcaatgtaagtacttacaatgcgactttcttgaagaatttcacgggatacattaagtgggagatcatttgagtccacaacacctttgacaaagcttagatatcgtgggaactattcaatgattgtagactgttagtaccatatgcatgatttccattttacaacacataaataacattaatcaactaaaaatctatagtattttcctaccagttctccatcaaagtcatctgaaataaacacccttttcacatgaagcctaatattttttgtctttggattcaccaagtcatctttccctgtgggagaaatggctggtacaaaaagtatagatcggaactctacttcaccctgtaataacaactcatcagataagagaccaatgtgagaaggttgtgcaacataacacacttacacctggtcctacggaacaaatgttgcttctttctctataaataaatttggataacacagtgaatcaaaaaactttatgtcatcaacttttcaatcaatataagtttttgatataaaatgtttataaacttggccaactgcaaccaaacccaaaaaaaaaaaaacagattttgaggtttgcttggtaagacatttcaaatcttgtttcctatttcaaatgtgaaaagaaaccatgaaagataaaagatctaattcaatggtaccttataagacaaaataagaaatgcatggcgtaatattgtg

SEQ ID NO: 188282 - DNA, 1289 bp, Cannabis indica
tttactaaccaaaaggtccaaagaggatgaccttttctccggttccttctgtatgctgcaaattcattagaagatgtaataagataaactaacattattgcaaatatcagaataagaagtaagttggatgtcaagactaacaatggaacttcaataaactgattataacatgcaagcaaaagattaccaagctgacacaaatgaacagaattctggggagaactgatctgatggagcagttggtggcgggttttccacaatagcttccaaaagttcataaaagcttggccagctttgctgatcttcagattgcatgtaagggaagcgtcctatagcgcactcgagaacaaccatgcctaaactccaaacgtcgctgctatagtcgtatgcacttccactaattcgctctggctatagaaagaaattaaaacagcctttctttatgtttcattcgagtttgtaagatcaataagaaatcaagataaagtgttgtatttcaagcccaaacaggaaagacagatgtaaaccaactcaaaattcatcataagggattaacgatagaagaaaagtagtaaattacataccgacatgtagttgtaagtacccacaaatgtgtccctttgacccatagagctggctagtgttgcactcacaccaaaatcagtaatctttacttcccctttgtgatttacaagtagattggatggtttaatatctctatgtattacatgtctttcgttatgcaagtacacaagaccttgtaaaacctgaaatacaagcacaaatcttcagcaagtaatatatacattaaggaaaggaaaagaagccaagaaaagcaaaaatatagcaacagatcattaaatttaagttcaaaagggggaaaaaatagacctgtttacaaaggactgcaagatatggttcaagaattgtattaacttgtttgatcacatctactagagatccacgatccatgtattctaatacaagagaaatggctccattgtgatagaaagagtggtaacatacaaccacatgtgggcattgtgctgcctggtttattttcagctcctgtacaatctgtttacgaaattcttcttggatgttcatctggataacctgtaggaagaataataattctaagttatacaccaacagctgacttcttaactgagatcagcaattttctctgaagctagagcttatagaagaagatacaagttgaattcaagccaaaacaatagaatatactattgattattgttttagtttccaaaaatttggtcatctag

SEQ ID NO: 188283 - DNA, 2789 bp, Cannabis indica
tttattggtttgtaggtgtgcaaagccaaatatgaagatttgcaacatcgttatagaggatgcacgtgagtatagacttgcatggcattttgtcgtgttttaaatccaaacgaacggtttcataacttcatttgaagacaaaattattatgtactacttgggattgtgcacttcctttcctttctcctgatttgactttaaagtggttttggttgagctttatgtgttttgtctatcaggcatatgattatagtggaattttaattttttagcaaaatgaatcccttgttttatgttcattttgtttgcaattttgcttcagggcttggtttgaggagctacgaaagaagcgaatggcagagctgaggcaggctttggaccattcagaagactcaatagggttagtccttttcgttttgctaactttctatttcaaccttgttaaaaatttaaaatacaaaaaagatgcaatgtgtatattgggccaaacttttttaacatctccttaatggttggaagatgaaaaagagtagttcacagctctcaaactgattatccttttagctatattttcaaaatcagcataagtggtaataatgagatctaattaagcctaaatagaaatataaattcttaatttccatattggaggatgtggaattagttttagttggaaacagaaagacaattccatatacagcacacttgaattcttagcacgaattgtatgacttttcggtgaatttccataagaaagaaaaagaaatcttcactgttttctgaagaaatattcagcagcctctaaaaatgaccacatcaaaccgtgatacattccatttgggattattagcatttttgaaatagaaaacattgtcaggtccaagtcccttactttacattcctctaactttgagttataatataatataagtgtgttaaaatatatgaaattggtttttagaaggtgagctgctatgttagaacatgttattgtctcttgccacagatctcttgaaacaaaacttgaaactctgaaggctgaaaaaggcgtctctcgagtcaactatgcctccagccaaactgaatcaccttcaactttgcaaaagttagaaggagttgattccttcagtaaagagtccaaggatggtctttctgctggtagttttactctggaaacaagaacaagctggtcggctgaatgtctaaatccgtgcactgtctcagccgaagagacagagacaaagcttaaagatttacactctttcaagacagcagaagcgtgtaatactgagaagttagcagaccatgtacatgaaagacaaggaagtatacttaagaaaaggagagggaaaagaaagagaaaagattgtagcagggacatcaaagaaagcagtgttggagaaagtggatttttagattcagctgaggctgtaactgcttttcggtctaaagaaaatacaaccagcgattgtggtgaggtttctagatcttctggtttagataatcagagtaaagggacaaagaaggatagcattgatgatctgttgaagattttcaactccattgtggaacataaatgtgcctctacctttcgtcgtcggcttgacagccaggtatggaaatgacataatgatttttgctgtatatgctttgccacaactgaaaagttatgttagctcactttattgtctatattaatttctacattgaatgtatgcagaagagaggaagatacaagaaaatgattaggaagcacatggattttgacactttaagatcaagaatcaccagccgatcggtgatgtcagttaaagagctctttcgagatcttctgctgcttgcgaataattccttagttttctactccaagaacacacgtgaacacaagtctgctttgcttctaagagacctcaccaccaaaacattgctccagcatttcaaagactctacaagcatcaaggctgcctcagccaacatctctgtcataacaacaattcaaagtagtcctcctcctcttcctcctcaagttaaacccagaagcaatcattctggcaataacaaaaactcggctgttaaaccaacccatccgaagattaatgatgctgcgaagagtcccaagaaaggctctagtcaggcaagaagagttggacgtaaaagtaatactcaacaacaaccaaccgttgctcctgcaaagggaaggaaaagaggccgggtaaggtgaaagtagtacaaatttaaattggttcaactagtactagcctatgttaaaccaggtagagcttcagggtttagattctgcagatatggtagcctagggatgtctttcttgtacaaatttttagtctttttcatctggtaatgtaagacttgacaagttatgatctttcaatgtaatatacttagctgaaaagaaagacaagaatatggttttgttagagcagttacctgttgttcttcctctattttgtgcctatatttgtaaaacatgcagctcgagttttgttatcatgtgatgacttctgttcagtacatacatataacgaaaatatgaaggaaagtgaggtgcatattcatattcatataattttaaatgtgttaaaacttaaagaagtacatagaaaaagtataatcaaatcaaaacattaataataaactaataaaatccctctatgcttatataccttactatttacctaacatcttttttaaagaagaattaaggctatttttaacgaacagaattcattgcaagtttacaccaacatggtatttttaaaatgaaatggcat

SEQ ID NO: 188284 - DNA, 5859 bp, Cannabis indica
taaaagcatatgaaatgtgtattgctcaggtgacattgctaccatgaactgatagctgatatattgaaagttgaaatctcgttatcttacatcactattccttaatttctaatttgattttatcaattgagggatatttatatgaattgtggtgggattgcaaattttattttgctgcaaggtatgacctgttctgttttattcttgcagaggtccttgtgctccttgccccgtaatggtgacaatatcatgtgcatgtggtgaaacacactttgaggtgtgatttttgttattatattgccttttttatgatgtaaaattgctatcaaactagtgtattaggtaatacgaaatggtatgacttttatagccagtcacggctgaacaacggtgtgtcttgtggtggtcctttttgtgatttctcagaaatatctgtgcttgtatactattttgcttatacgttcaacttaaaaattgatttgctaaatttcttattttggatcttattttaggttccttgtggtactgagaaggatcaaaagcctcctaggtgtcctaagcaatgcactattatgcctttatgcaggcatgcaaccaaagttaaggtactattggcggttttctgaatctaatgttctcacaaaactcatttttcatgttttggatcagaagttgtttcatataaatataaatatatatccttatacccttatacctcagtacatgaagctgtttggatgagtacattctggataattcatggttttttctttttttatttcacatatatgctttgtcttttccaacttaaagtacagttattaactcttaatcagaactttagattacattagttttggtccaaacattagtcctaattatgttgatatgttttaactattaactatattagtaatttatttaagttagtattaagaaattttgctattcacaaagatgagaagaatgctattcttatttgcctcttttcctcttttctgtttctttgtgggtgaaatttgactcactttacagcctcataaatgccattacggagcttgccctccatgtaggctgctttgtgaagaggaatatccatgtggtcatatgtgcaagctaaggtattttatttcacgttcagttacatattctgtattttcttgtgtaacactagtaaccacttcttttcttttgcatgtttaggtgtcatggacctaaacctcctcctaatccagaatttacattgaaaccaaagaaaaagaagcatgttcatcagagtgaatgtacccctggttctccatgccctccttgtccagaacttgtttggagatcatgtgttggccaacatattggagctgataggatggttggtttgtgcatagaatatacgacatgtatcattctagctttgatttctactttctaaatcttttttcttattgtgctcctcttttcagatggtatgctcaaataaaatgcagttttcttgtgaaaacttgtgtggaaattttctaccttgtggtaatcattattgcacaaactcttgccatgctctgaagacccaaccttgtgaagagtgtaatctttcttgtgagaaggtataaaacttctttcttgtggtcagtttccttgtacgtcgaatatgtttgctgagaataactgggttacctatctgttacttatcgtgaatttcatgtactggtttcaggagaggacacctctatgttcacatccatgctccttaccatgtcatcccggagactgtctcccatgcaaggctctgttaaaagatcatgtcattgtggttcaatggtccatgtttttgagtgcatgtattacaacagcttgtctgagaaggggcaaatgactgctcgctcatgtggtgggccttgccacaggtaatccaaatatgtgatcccttgtttgttttcagttcataacagcttaaatatactacattactaacacagcatcaaataattgacctgtaataagatcttttctccgcataggattgtaattttacctcagttattttcttctgtattaacacaagaaccaaattgtggcttagaaacagttctgtttgtgcagaaaattgccaaattgtacgcatttatgccctgagacatgtcatcctggacagtgcccctcccctgagaaatgctccaaaaaggtctaattatattgatggataaataactttgtaactagattagatatgcatatgccatttttggttttaagttctcgtaatattgatttatcaaatttgtttcgttctctgttgttgttgcaaggttaatgttcgttgtagatgtcagaccttgaaaaaggagtggcaatgctacgaagttcaagcagcccatcgccatgctggttctgatcccaaagacattattaaaagtcaatacggacttggacttcttccttgtaattctgattgcaaaattaaactacaggctattgattcagaattacagcagcgcaaatctaaagctgtggaggtaatataggtcattagtgacccttgtctgtctcatcattttgcctgcataaccattatgccaatagactccataactctagaccacatacaaacacattaagaaatgaaaactttgaaaataagtcatgtgattaatttacattatcgaccgaaatacatgcccaaataaactacacaacagattagatttatcaagataaacctaatgcatatgtattctaataggtaaaggtaccggacactgaaaagcatgtcccgaaacgtaaaagaagacgggaacgagtacaagaaacaaagcaaatctcaagacttcaagtaagtttctttctttaatagaagtaggtagtgaagatttattcttattttcagtgcttactaacaatattttgttctttatgagcagaaagtagcgtccacaataaagtggctacttctatttgctattattttggtggctttgattgcatcactatactgtggctacaagggtatcctatggctcaacgactggatgaacgaaattgaggatcaaagactaagaagaagacaccatcaccaccggatctaatttccccagtagctatatcctaatgcgacttttgcactatacttaggtcagtataaattaaattactcacattatttatatatatacattatatatgtataaatatacatattctttttcctggagagaagaaattcactcttggcaaatggattctttggtgaataaattaaaataaaaaaaaatgaatatttttggtcttataattaatcattactttgacttgtgtatgtttacttacattatatgtttacacatttgaatgttatgtagcataacatattctttgtttgtaatgttaatgtataatgattgacaatctaataattgtgttactgggaaaaacttttatgattgtcagtgttgttgtaatgaaatgttgttttttcttatcatatttacttcagaatcaaaccatattgattgataatatatcattaaaataatattattagattggaaaagagactgattaaagaaacaaacttttattgggccaacaaaccttctatttcgaaagtcatgacttggtgtttagtggggttgtaaagacttggaagacttggctcgcttaaactcgacggcgccgtctcaacgctcaaaatagagattgacccagatttcaactgcttcccaagtcctcaacctaaaaatgagttcaataaatttatcttattagctagatttcttggtaacctcccttttaagatttttagattttcatatcttatctaaactttacattgctacacatgctggttggtactgctttttgtttcattattttttttttaaaaaaaaattaaataaatagatccaatttgtcaaacttttctttcataacacaatcgtccatcttgattttcaactataccaactcctccacctctctttctttatgttcatttatttggtgctattctttattgtattttccttttattagtctgtgttttgtaatgacttgttgaaacagtgaagagtgtgaccttgtcagtctagaattttcagaattccttggatgattctaaaccctataaaatataaatattgaataatttggatgtaacccaaagcttccttagctattattattaatcggaataagaatagtcaataatgatttcccaaataatagaaccattcatataattatatgttgttaggtattgttagactaaactctcataattctaagcattatgtatcatttttgacacttcttggtcttgcaacccaacaaaaaaagttttgaagggttttggatttactttctcttaatgaaactaattatatactctctaaacatttatataattattatataaaacatcttttcagcttcactgtcgtagaaaaggtttgagttcggtcgtacttacattaattttcacaatacatagcaaactcttccattttgtaaattgaaattgaagagtgttttaaaagtcaaacttggaatttgggttcacctaaacaaagtataaacatttttaataaattattgaaatttaaaaaggagtggtcacttgctaccctccttcaactcattcattgaaaaccccactccctcccctaacaagatttaatgcccataaattcatacaatattaattggttctattatacaattagatatacaaaaataaacattttaagaaataattggcaaaatactttctttattgaagtaattttgcattttggcttagttttattaattctttgcaaaataacatcaatctaaaatgactttaaaaaagatagtaccaaattctgttttttaaaattttattgattattggattcaaaaatttccgtacaattttactaacagacaactaacgtgtactaaattatactccctaaatttttatctacttcaagcatctattagtaaattaaaggaaagtcattgaatcagaaaatctcaatatagttcaaaaaaaatttaacagcttaaaaagttcgtgaacaaagtttagtatttagtatcttaattattgaacttaatgttttattgtttttttttttttttactttatactacattttaatactaaaatatttatatcaaatttttaacatgttatacaatgtaaaaaaaagacgcccctcacttacgaaaaaaagtattgccgcccttaattgaaatttcgtgtcacacattctcataatttatgatcaaactattatttatatatttattttttatctggattcttaaattggactaaattagcattatattagtgatatatctaacaaattatttaaataaatgatcaaaatgcaacttcaagcatcatagttcaaacatcatagttcagagaataaatcttacaaaacttaatttgagatttgttgaaagaaaatttaaaaaataacttatactacatattcccatacaaacccaataattttaaatttgggttttacatgtttctagtattgagtactttattagctaacaaaatcgttaaaagtttatataccattacaaactcaaaacgttaactaatatatatcccttactacaacatcatagcaataagtcgtggcactgtaactcgttactatttcgcagtcctatcattgggttgcaaatcaccaccaaattgttgcttttctgtctcattcgacttggtctaagaacaaatctagtgtttttagaaaggttgtgttttttttcttaatataacgacctctactgtagagcatataatccttttaattttctattatcaaccttaaataagtaattatttatccaaccaaataa

SEQ ID NO: 188285 - DNA, 2263 bp, Cannabis indica
ttggggagaatgcatcatgacagatgcatttttaatcaatcgcataccatccccaaatttacaaaacaagtcaccatatgaattattattcaagaaggaacctgactatcaacatttaaagacattcggatgtcttgtttttgcatcaactctttcagctcatagaacaaaattcgatcatagagcacgtacttgtgttttcattggatatcctcaagaagtaaaaggataccgtctttatgacattaataacaaacagatttttatctctagaaatgttatatttcatgaacatatatttcctttcttaaaactaaatgaagatactgctaacattgatccttttctcactactgttttgccctctagtgatgtttctaagacgcctattgatgattaccaacaagcagttctcgatccaccagcttcatctcatgatcccagcaccagtacacacaattctttcgacaacatgactgatgcaccaaacatacctgctgctacagaagaattacaggatacaacaactgaccaacgtgaagttgttactcggaaaaccagcaggatcactcgagcaccagcctatctcaaagactttgaatgctattccactatacaagacaaatcctctactcctcacactttaaataaatacctttcatatgctagattagctgaatcttacaaagcatttatttttgcagttacttctctcaaggaaccccaaacatacaaacaagctatccaatttcagcaatggcttgatgctatgaatgctgaattaactgctcttcgtaacaacaagacatggagtgttgttccccttccacctaataggcgggttatcggttgtcgttgggtttataaaataaaacttaatagcgatggttcggttgaaagatttaaggcaagacttgttgctcaagggtatacgcaacaagagggtctagatttctttgacactttctcccctgtggccaaaatggtcaccctaaaacttcttcttaccatttctaacatcaaacaatggcataccttacaaattgacataaataatgcttttctaaacggggacctcaatgaagaggtctatatggcattacctcctggactaactgattctgatcatgattctacaggtaccaaactcgtgtgtaaactccacaagtcaatctacagcctacgtcaatcctcacgacaatggtacaagaagcttactgcagccctcatacaagaaggattcaaacaatccaaagcagattatactctattcactcgtggaactaatgacacctacatagctctccttgtttacgttgatgacattgtcatcactggtcctaatattaacattctacaccagctacaaaatactctcaatcaacaatttaaacttaaggcactcggtcaactcaagtactttcttggattcgaaattgcccgagcttctactagacttttcttatctcagcgacaatacacgctttagttactcgaagatcatggctacattggttgcaagccagcaaaagcaccaatggatcctagaaccaagttggatgatcaacaaggcgagcctttaacaaatccttcagaatataggcaactcattggcaagcttctctatcttactctatcaagaccgaatattacctttgcagtcaactcattgaggcaatttatgtccgctcctcgaacaccacatatgcaggctgtgtcacatcttctccgatatctcaaaggtagcccagggcaaggattactataccctgccaactcctctctgcatctccgaggtttttcagactcggattgggcttccaatccagttacacgacgatccactaccggtttttgcatcttcctcggtgattgtctcatttcttggaagaccaaaaagcaacccactatttccaagagttctgctgaggccgaatatcgagctcttgctgccacaactagtgagattacatggcttcaatatctactccaagacttccaagttccacaacacacacctgcctttatctactgtgacaatcaatcggccatccacattgcaaacaaccccaccttccacgagcgcaccaagcatatcgagctcgattgtcacttcattcgcgataaaataaaaaactccaccattcggttgatactagtttccagcactttacagttagccgatgccttcaccaagccttttaccatccactactctcaatgctcacactaccaagatatctgtatatgacatatacagtcc

SEQ ID NO: 188286 - DNA, 1749 bp, Cannabis indica
aacaacaacaacaacaacggtaggtttgatgttgatgatgatcgtacggtgatgacgctgcaacttttgccagagaagattgatctgaaccgttcagatctcatcagtaataataacagtagtagttattttgtggagaatcatgaggacctacccatgtggaaaagatcagatcaaagctacggtgagtcagatcgaagcaggggtactaatggtttggtggttcacacttgggtgacggttgagtgcgtgacaggcacatgcatggtcgacgataatcgtgattttgggagcagttatagtggtacggacatggagagtgtgaagaggaatctggagaaggacacgtgtcctggttttatatcggacggttcaaacagcgtgttgtgggtgaacgcagcttttaaaaggatggttgtgagggaagaaggtgagaataataataatgacgggctgttaccggagataagggtagttttggtaattaaggagaagttaccgtccttttattcgagtctgactggacacgttaagctgcattattattattattatgagaatgagaagaacaagtactcacgagtaatagttccttgtgatttgtggagaatggacggtggaggatttgcatggaggctcgacgttgaagctgccctcactttgggccgttgatcttttataatatcttttaattataaagatcttccatctcttaagttttatctacaatgagaacgaaattcaggtatatatataatgaaatactaattaacagtaattataattaaacacttgcttattggcgcattttttcttaattttgtacttgttaacttgtgaacaagaaaaaaaaacatagatatatatggaatataagaagagattttacttagtactatatatattagtgagtgtgttcatggcattacctcatttgtggatgtggaatatagaaccgtgtttaattggtgtttctacttgggtgagtactatgatttgcttttattttttttttttataactagcttaggtgtacactttatcgatagaagcgattgatataagtgatgagaaaagtttactattactgatgatgataacaattcgacttcgactatgaaagttacctaaaccttttgaaaatagttacatatatatgcataaattgattacaatactataaatatacacttttgtctttctacttttatattatttataggcatggaatgttgatatatatgcttactgatggagtgtttttctggtatttgttttctttgttggcaggtacgtacattattggatacttattttgaagcaaaaaatttgggtggcccatgtattattattatttggataatatatatatcacatggtgtcatgtcattggttcatgatatggtctattaacttatgaacccatatggcattaaattttctgatacataatgcacaatacaactcataacataaaactaaagataaatataacaacaatatattattgaaaatttttatagagtaaattaaattcatattatataacaaaagaataaatgaaaatagtacttttcaaacaaaacacacaccaggcataaatgaagatattatttataaacaagggttgggtagtttagtcttatgtatttaagagtctcggtttgttaattagtaaatgaacttaaaagatttacctcatttcagagttactatatatatagtgtactagtacttagatttttatat

SEQ ID NO: 188287 - DNA, 3122 bp, Cannabis indica
ttttctatttgttgttttttcaacctgtcggtggtacatatcaatgtgatgtgtatgctttgctcattttctttgactctcagcttaattattttaatagtacatgaatgaatgaagcttttttagcaattaatttagactggaaagatgtagtggtaattgaggtcgatatgataaccaagatgaatctgcatttcagaattttttggtgaacctgaaagttccccgtactatccgaaaatgtggattagttaggggtggaaatgcactaatcaaacacttcaaggaagctagtgcgaattttataactgaattgctgaaagttgatggaagtctataactgaaatgttcagtgacaattgaaacgcatattttattgtttagtttttaatattgtttataaaagggtcggaataatgttcatgcatacataataattctacatcaacctgattcccttgctcttgagaatgctgcaggatgggcaactagtttgtctgcaggtgaaggggatgggtcatttgagtttgctttctttaaagtagggattgaacttactgatgctggtcaaggttcgttctctttctagtattttttttcttttttgtggctgtgaaagatccatccttttcattttacagtggttgactttgtacatttttgtattctggaccttcttgactgaattgcagagcacactcaagatatcataggtttgcttttcaaatatattgctctagtgcagcagtctggtgtttgcagttgggtatttgatgaggtatgcatttgcagttctacagtataatttgaattttttatccattttcttttgtatagagctggtataaattgtggttgctttctgtttttaaattcacattcaaagttgctcttgttattgaaagattctgagttttttgttatataatgcagcttgcagctgtttctgagacaaagttccattatcaggataagactcctcctattgattatgtcgtcaatatttcaaccaatatggaggtattactgttatcaggcatactttaatctatttctagttctgtccaaaaaaaaatgtgtggggggaggggaatgggagagatggtaatgcttgaaaatccaaactccgaggtatcaatttgaaaatgtgcattattagagctccaaactcatatttttatcaaattgtttaacactatgaactccttggtggttttcagtttgtaactgtattgtagttttgttaaaattagaaggtcattcgaaagaataacttcgaagggtaggaatactagtatctttattctagataaaacatattgcttgcttgctgctttcttatatgatggttttacatgatttacagttatatccccccaaagattggcttgtgggttcatcattgccatctatattcagtccaagcattattcaaaaagtgctggatgatctttctccaaacaatgtgcggtaagattatcactgtttgtagctttaaattgatcattatgaatcttataccagtcattataccagattgattatgcctttatttacttgccttttattttattgcaagcttaagaatgatatgcttggcttagcttattagggaattagttacatagttagaattagtttggaaacttgagatgatgatttttttctggacttgtaatgcgagtatagtattttttctggtaactaaaactctggctgatgttgtaacatgggatccattctgcagaattttctgggaatcaaataactttgaaaaccatactgatttggttgagccatggtattcaactgcctattccattgagaaaatcactagctccatgattcaggtttgtttttggatcttaatgcaatttagtattggttaagttgacatgtcactgtagagatctgcatattcatagaaaaataaattttgttttgatgcttcctcttctaacttaaataggtaattcaggcttttaatttcttaaaaatcttcaaaatcctgttgcaggaatggatgctttctgctcctaatggagaactgcatctaccagcccctaatgtcttcatcccaactgatttgtcaattaaaaatgtgcatgaagaggtaattaacatatgagtatatatattaaaattgaccacaatgtgattataatctcatgaagtggccttttgaacaggtcaaatatccagttctcttaagaaagtcaccatattccacattatggcacaaacctgatacggtgttccttactcctaaagcttttgttaaaatagactttagctgtccccatgctaatgactccccagaagcggaagttctaagcaatatttttacagagttgttgatggactacttgaatgaatttggtaaagatgaggaagtttttttggtttgaacttatctttaaaagaagtatttccatggcctcaactgaccacatcttttgttcgtattcattaatctcttttaaaaaaaagtcttatttgagcacacacttctatttcagcttattatgcccgcgttgctggtctttattatggaataagccacacagatagtggattccaggtatcttcttgtttatgtcttctaaagctataaatgcatagttaaatgatctgtgcattttattttcttgtaaatgtgtatcacatgtataggtaactctagttggttataatcacaaattgcgaatcttactggaaactgtgattgggaaaattgcaagcttcaaagtgaaacccgacaggttctctgtgattaaggtacagccttctttttttttggttaaaagcttttattttgaatgctacttatattatgttgctacattctaacttttgagcatcaggatgaatttgtgttatggtgatagtcaaattcgacattatgatcataatataaatgaaacaacagaaatgctgaatcattttagaatgttgtaacaataattaaatttcttccttatcaggaaatggtaacaaaagagtaccaaaatttgaagtttcaacagccatatcagcaagctatgtactattgctcattaatctacagatcgtacatggccgtggatggagaacttgaattctctcatctgcagctgatgatc

SEQ ID NO: 188288 - DNA, 6003 bp, Cannabis indica
tagtataaaaggtcataataaagattgttgctacttgctagtggtatcaactacatgagatggttgctagtggtatcaactacatgagagcataataacactaagggaaacgtaaaaagaaaaaaaaaaaatgaagcctttatttagacaaaaataaatgtaaaaaaaaaaaaaataaggctcttaggttaggtggactttaggcacaacctagcacacttatgcccagtgtcgggcctaatcagtgctatcttcatacataaaaatatatataggataattctatgatacgtacattacttttattgctattagtagagatgtctctatttttttgagcttagagaaattaggattataattttttatatgaatgtatatagtagatatttcaattattttcaaaaaaataaaataaaataatttataatgtcagaaacaaaattcaaacatctagttgtaaagaaacaaacacgcaattaaatttttgaactttgttttcgttttcattgttataaattatttagaatttttcaaaaatgaataagacacctaccgtaactataatgtaactataatgtaggccgtcatataaataatttatatgcatatttttattggtagagacaaaataatgtcccttttatagtattgtcaggaccggccctaaagtatgatgagccaggcatgtgcctcaataccccaatattgtaagaaaaaaaatacaacaaaatagtattttgtgtagtaatagagagtgttattttaaacaaagaggctttttttaaacatatttaatatgtaactataaaaaattgaacctttaaacgagttttaaaattgtttaccattacactaaaatattaaaattttaattttaataataattaaaatatttattaaagaccccaaaatttaattttatcttaaccctatataccttaagaccagtattgtactatggccgccaccaataaaatttaattgtaatgaaagttgaattattatgatgataatttatatgaaaagattctttggccttttcaaaacaatttaaatcaaaagtttgtttgtttttactctgtacttaaaattattagaatctctctagactattttgaataaaactagatattgtgatataaaacaaggccaataattccagtaaccacctgaaaatgacattattttgaagaagcaaaaaatgtagggtcagaagaagttaacatggctggaaaatgtttagctatgtgttattagaccaaatttagtaagaaactaagaaagttaagagttatataggtagagattttcattctccatctgttaaatcttgcccagatattgaatctaaatccaagggtacctgaccattgtactgttgtacaaccaacactgatgctgctgtagagaaatctggtgaagttaagagactaccaacaggtcctaattcagggcactcactcctcttgttcaaagctaaggctacttcaccaactggactcctacccaccaaaaatagattacagttaccgatttcgcggatggtagaaataacttgttcactgttttcaactggtttctcttcatatttgatggtgttgttgttagccttagtcttcttaaagttggtcaagacatcgtcgtcgagtgaactcgaattggtggtgcttgagccactttccacgttaacaatagcattgtccccagcaatgttgggttccactagaaatcggatgaccattacactaatgccggggtggtcagccatccgggagccataagcaagggcctctctgtcatcttgaccgccgaagaagagaactgtaacgaaacaagacacgttacttgcagcaacatggctattcccaccaagtccccggtcaacaaagattccaacagagcaagttgcatgctcaagtacccttttgttaacccaacggaagtcacttcttgtaacttctaatgagccatctaatctttggtgcttgtggaatggaaggataatgattgcagccctttttgactcggctgtggaacagacatcctcatgcatatcggacattgaagagattgatgtcattggcttaatggatactcggcctagttgcccataagtctcaaatgccacaacaatattgctagagtctgaccgatggcccttgtgccaaaaaggcaagccgtttcttcgtgccttgtgtaccattagaatagctgatgacctctcggaaagctccatgagatgcagtgcgtaaacagatagttcttctcgtttttcggttcctcttgaggcctcaagcaggtttagcaatgatgcaatgtttcttgtactgtggaaacaagccaagatcctaagttgggtgtctggattttccctttcaactgttctatacttgtaattagctaatattgccctttttgctggcttatacactgcaatgacaacaggtgtggtgatgaatgtagtaaacacagccattagtaccatgatcgaaaatgtttgatcattcaaaacctgtgaaaataagaaacatagtatcaatatttagttagaaatagtatcgatattcggaagacaaagaattcacaacttacatttctatctttaccaatgttaagaacaatgagttccaccaaccctttagtgttcatcaggaacccgagcgttacagcttcacggaaaggaactttgcagaaaagggataccaaaacagtgcctactatcttcccaaaacaagctgttaccgtcactagaacaaaaagaccccatgattggagcccccgaatggtggctatattggtctttaatccacttgaaacaaaatatagaggtagaaagagaccagatacaagatcctctactttttccacgagagcacctgcgagtggaccatcctttgggacaagtattccaatgacaaaggcaccgaacatggcatgaattcctatcgtatcggtaacaaatccagcagccaggacagcagctagtgttgcacatatgtacacctcatctaccggctcaccttcatgacatctcagagccatccatttgaagattggagggacaatgagaatacagcaaattacaaaaatgcacccagatagaaagacccataatgagataagaggagattgaccagttccagatagagcaacggcgagagcaagtagaatccatgcagctacatcattgactgctgcagctgacatagccatcctaccaatatcagtggttaagagtttcagctcagctagaatacgagctaagacagggaaggcagttattgaaagggctactcccatgaatactagaaatgcagcactatttacatctttagatatggtttgtcggagtacaaaagatgaaccaattcctaatgcaaatgggaagctaattcctgccatggcaatcatcagggctttcttcccagtccgacgaatggatttaggatctaactctaggcctgccaggaagaggaaaaacagaagaccaagatttgctagagtttctaacacagtaagacttttgggtggaaaaatcttgctaatgtacatttggttccttcctagagctgatggccccagtaatattcctccctgaaaatatgagaacatatcaggtaaagcagttacattaccctttctagcagacaataatatgtacgaaacttaagaataaaagactttaaaacaaaaatataggcataattgcttctttatcagctatcaacaactttaatattcaactaactttgaaccacacaatcaagaacaaaaaccagaaacttacgataatctcagcaatcacacgcggttgtcttaatggcttcataaggaatgctagaagtcgagtgacaacaagcaccaaacatatctgtaaaatagcaagaggaagggcaaaatgaagaggatcatctccctggaatgcaccgtttgaagtagccttcataggacccggacaaatgtgtcctaccccatcagtaatgttggtcgccattttaggagaccaagtttttatgtctataccaacttcagatcattctccacaagggtggctatctgaacagacttcagtcctacaattgattcatactttaattgttaggccattagcaaaacaatatgcaacacagatgattaattacaaaggtttaaacgaaacaaaatcaacaatcccaaatgcaaatcattctaaaatttaagggctttatctgggacaaattttgaaatcggtcacattttttattaaaaccaaagagacatttttctttttagtgtcaataggttttaaatgaccaaacaaaatcaacaatatttgtgtttcaaatcaaaaccacttttctaaagaacaacttcaccatgataagtccacttctttatatgtgaagaggaacccatatctgcacatgtgagcctgaaccttcccggttttggctcatgcaatccaccttttatcatttgcttacttttataaatggatttggttagttaattaattaaattctgaccattctacagttttaatgtgtgtgttccctaatccaacttttagtgaattcatacaaaacaatattatcactaagaacatctccaatggtgccaaccgcaaagattacccaaaatgtccacataattcaaaaatataatatattttattttatctcacatccacatcattttttagcaatttttgttctcactactggtcccgcttattatttaaatgtttaaattttgttactttattaaacaaaaaaatgaagctatcaaaaaaacaagcactcccttcactccaatggtaagcaactattcaaagttgcaaaattttgtgcataaaatatcttagtgctcttaaattgcatggatctatattttatcacatcataattgttagttattttcgtttgagttataaattcactttataattatactcttattagggaggataatgattctatttggttagcagatattcctgcccctatttatactattgttgtaaatgaactatctcactacataccttctctcacaaaaatatatgtataaatatatatatatatatatattttatttgatagttatatttgttttaacttgcaaatacaagcatacagtcccaaaatccagaataaacacaatagtttatcaaactacaaaaacgacatgtacacacacgaattcacaaacatactgaaacagaacagaagcatacaaaaagtcacacactaaattattcaagtgttgctatcagacacatcaaacaatttatttagacttaaaatatgtaaatatattatgaaatgggatatttgcgacataaaagtacctaatattagtaaaacattagcgtcttaaatttgtaaccaagactaagaaactaacaccagatatttccgtccatacacagtgatttagaatctgagtcttacttgtgttctatttaaaagactaaaagaatctgtaactatgaaactagacaaaacttcattaagattatgttaattacaaagtaataatgccgcaaatatatcttatcaaagctcatgaaaaccatcttccattcataatctcagaaatcctctgttttcacaatcataataacaatatctaattctagatgtctaaagctaaatgatatcgaactgaatgagtccaataagtcgaacaaatctttatgtcagtaacataatctgtcaatatcatactctaatgcagcgaatgaaatgtcggtgtcgataatcgaaaagatatgaaaactttatatatgaattcacattctacattttattcaaaacttacaatctgtttctggcgtgagtggtttagggttcagatctgcgacgagttgagttccacacgagataggaggagctgccctccggcttccgcgagttagggtcagatgtgcggcgagttgaggtcaacgccggagacgagagaagagaaatacgccgagaaaatgacttgagagatcaccaatccttttttaaaaaaaaa

SEQ ID NO: 188289 - DNA, 847 bp, Cannabis indica
atacatatacatatataaatatagtagtgataagattgatttatcttttttaatttgtttaaatcttcttttaggtaacttatttcaagtgtggtggagtatcagtgggcattgctattcaccattttattgtagatggaatttcagcttttcactttattgaatcatggtctagagaattgctcgtggtcttgaaattaccatcccaccatttttagatcgaactctacttaaacctgatcatgatcaaaacccaatattggatcagtcatgtaagccagctgatcataataataataataatcttgatggtcaacaacaaaacaataatagcaaaaataatgagacaaaagttgccatttttaatatcaacaaggagcaattaaacaccttaaaagccaaagccaaagaagacaataacaataataagaatttcagctcatttgagagcttagcatcacatatttggagatgtatttgccaagcacgtgagcagtccgatgatgaagagtcaactctatactttccagtgaatggaagattctccaacagattgacaccccaacttccacttggttattttggtaatgtgatttttgcagctacaccaatgattaaggtaggtgatctcaaaacaaaatcactatcttatgttgtgagttatgttcatagagaattggaaaaaatggacaatgattacttaagatcaaatattgagtgtttggagcttcaacaagctaatgtgtcctctattaggcgtaagacaaacacttatgtgtgcccaaatcttgggattacaagttgggttaggttgattaactatgatgaagttgattttggatggggt

SEQ ID NO: 188290 - DNA, 1126 bp, Cannabis indica
aaaaaaaaaacgaaagaaaaaacacacatacataaggtaaacacttcgacctataacaacgaaaaaggaaagtcaaatagaaggaaaagtttaatatttcaagtggagaaagccaatagatacatgaataaacacaagaaaaatttgtcagataacattcatttgacttcaattttcttgttttaaatattaagatgtaatttataacttgctttcaccatcatcagcttcaccattttttattacaagtacagtctctctttctctctctctctctgactttttgaccttaaaaagaaactcatgtactttgattcagtagctaatataaatcacaaaataaaaatattaataatactatacacaaaaacgtacctatactgaactcaaagacgacgacgacagtgagaatagcccaaacagagtaacggctcaaatccttaaaaggttctctgagataaatcagcaacgatatgagcgagagagccagacccatcttcgctgagaagatgatctttctcggatcggacaaacccatctgccaggccttagctgaaacttcttgtacctttctaacccaactaacaaacctatcggaaagcaatcggaaagagcagcaacgagaagacgcatactggctttcttcatcgtcttcaatggggacgaaggaacccagctccgaatatcccttattcgtcgatagcaatctctctcgtttctctgcgaaattgtatctaaacgaaccaaacttggctgccatggctaatgaacccccagaaatcaatctaaaaggaaaagaaaatcccagataacagagactcgggaaaagggaaaattcagaaatggttttttttccctgtggcgattgggaaaattctgaaaaaggatttaagttagagataaatgaagaggagaaaaaaaaaccaaaaattcagaaaagaaatttcattagagagaatactagaaggttgcagtcggcatctgaggagtgatggcgatggtggggggagattgagattgaaacgacgtcgtttacatgatggaagatattagagttgttggatcaggagtgagcttgtacggtatatatatgtttcatgctactatcatacgattaggagtagga

SEQ ID NO: 188291 - DNA, 1009 bp, Cannabis indica
aaagaaaaaacacatcacatttcacatacccaatttccaaaaaccccattacctgaggcggtggacattatcaaagagaaaaaaaaagaactatatccactattcattcaatattgatgacgaccctataatggccaaaaaagtcagaggtgtggacctccccacctcgtgagagaggagagaaggctgtttggtggttgttgtgtattggctgtgcgcaggttaccatgggccgggcgcattttagcacacgcacctcaatcgcccacccccacctaaccggtggcctcattcatcccattcatcatccaaaagaagatctcaaaatcagccgcacactcctcccttgctcctccactcactcactttgcctttttaactttttaacccaaacacggcccaaacccccaaaaacatgtcaccaaacgcctctatctctctctctctcccctccatccaccaccactttttctctcactctctttctctctcttctttatcctactctcaaccttatccctccaccacaccaacaaccaccatcctccccctactattgtgcgccgcctcccttatccttcaccaccccccctccttaacctaccatttacctaagaccaaatccccactacacctcgccgccacccaccattctctctctctctctcgctctcttttttttatttctctcttttcttttacatctttttctctttcgatctaacgtgagccggctcttctcttaaaatacgcctttcttttataactgagatccggtcatggcctccccatcgtcgccaccggaatcccctcttccattgggccctcctcaagccattccactggcgttacccgctccgccgccgtcttcctcgacggttcagacccaaccgacgcctctagctcaggtccagccaactccgccgtcttcctcgcggcggcttcctccgccgtgctggtctcacgacgagacggtggctctgatcgattcgtaccgtgataagtggta

SEQ ID NO: 188292 - DNA, 2343 bp, Cannabis indica
aaactgtgtagtctcatacctacgcagtttcagaatcatcacacttaaccttccccaggcaatgtaaatttcacagtacccggtctttccccttgcggatcacaactctctcacaatcaccccttttgggagtctgacgtcctcgacgaccacacttccgactggggcaaggctctgatactatttgtaaaatcctcacttctagccttcattgggccttctcccatagactaatgactcttatacacgggtacgtcactcttgactgcttcatggaatgacgattagccctgcagactaacacgagttttttcaacatgttttgtccttactcgcctgcttcttaagaaaactttcaagaaggtcactcatcctgaaattaccccaggtcaagcatgcataactttagatctctttcatgatgagctactgaaaagaagatacatttttttgatacaggtagtaccaatcaatccatttaaactatttttaactgtgtagtctcatacatacacagtcttaaaatcatcacagttaacctttcgatgtgggattgaacaactcctagtctttctccttgtagatcacaggactctgactgtcacagaaaaggtatattctaaaactgtgataagttaggttcagaaaattctgtcaatcttgcataagatacattctgagggaatgattcttagggagaccttccaaatagctgttatggttaagaagttgccttgcctggaaggaatacaaaagttatcttaagcacaagtaaaaacagatgattattgtagatttaattgttagacttcgtatcgaagaagacaacaaaagttctaataagaaaaattataatcaagatatggtgaaggacaatttaacagagcaaggtttaatctttaaaggaaagaacaactttaaacctaataataaaagggtaaaattgggaccaaaaggtgatgtcaccaaaaagtagttccaatcacttggtaagtacttaaacttcaataagccaggtcacaagccagtggattgtagactgccaaagagaatatataattttgaagccagtatggtaaatgacatgtccaaagatgttggtaatatacatctattgacattggtttcaaagataaacttagttaaatctaatcaaagagaagggctcattgaaattgattttatttgatatatatgtcctgaaaagagtatgtttaaatcttttgaagaaatagataatagagagaaaatatttatgaaaattttgctacgtttgagatagtggattaaggtaaagtgatcataaaaataaattctgaaaaggagttcactctcaacaatgtgttgtatgtaccggagatctgtaagaaccttgtaactagttcactgttgagtaaacatgaatttttcctagtatatgagtcagacaaggttgtgttgtccaaaagtgaaatatatgtgggaagaaattatataacaaatgggttgtttaatttcaatgtaatggttttttaaaccaattatcaatgaagttaataacgcttctatttattcggttgaatttttcaatgtatgaaatggaagactaggacatgttaattgtgatactatgtgtacattaattaatttgaatcacatacctaaatctcgcattgatataaatcataattgtatgacctgtgttgaggcaaaactaactagatcattcttcaaaaatattaaaaggaataatgaacccctagatttaatacgttgtgatatatgtaacttgaaatttattcaaagaaaaatgggaggaaataaatattttattacttttgtcgaagatagtacaaaatatttttgctaaaaagcaaaaagaaggttatagataaatttataatctataaaagtgaagttgagaatcaactcaacaaaaaggtcaatgtgttaataaatgaccaatgtagtgagtatggattaccgtttggtgaattttttgctataaaactacgacactttatttgcctcaaaaaaatagagttgttgaacagaagatttgcatgttaaaagaaacgatgaatgcaatgttaatcagttatggcgctgcttagaacaagtgggggaagttatcgtgtcagctaatcatattttaaataaattactaaaaaaaagagaaaagaccccttatgaattatgaaaaggacaacaaagtcttccttcaaatacttaagagtgtagggtgtcttgccaaagtggttgtaactttacctaaaatggtgaagataattcttaaaattattgattgtattttcactggttatacacataataatactatcaatttttttgtgtatgagtcgt

SEQ ID NO: 188293 - DNA, 2186 bp, Cannabis indica
atgtggctaagaaatttatgaggttgcttcttttcttgttggtcctgtggatgatgctgacatggtttttgactttctatcataaaattcttgcaatctctgtagctgtaaattaaacacaagtttgtatcttgttgtttggctgtccttaattcgtttattgtaaatttgtagattgacatggatactatagaagtcagtaatctcaacaggcaatttcttttccgacaatcacatgttgggttatcaaaagcaagagtgagtacattcacatgcctttgatatgaattaaatgtgcactttatgtgaggaggtgacaaattttctcaacaggttgcacgggaggctgtcctaaaatttaggcctcaaataagtattacaccatatcatgcaaatgtcaaggattctaactttgatctggacttcttcaagcaatttaatgttgttctgaatggtctcgacaacttagatgcaaggagacatgttaatcgtctctgcttggctgctgaagttcctttggttgaaagtgggaccactgggttccttggacaggtaaagtacttaaattgactaagtagtatttgctacacagtagggtttggattaaacttaacctcactaaaatgttaatgtagttactggttagtactattgacgaaactcttcaaaattttgcatgtaaagcataaggactgtttataaatatacaacatgtgaataaattgagtcatcaatgtgcatactgacatacaatgatgtgtatgaagatttcttttcatcattgtttcgatgtcttacaactttttgaagggcaagtgtttaaatatgcatcaatcttaacatgtaagcctgtatgttcatagtaaataaaaaataatgaaaaccaattgttctgtttctgtgtagacataaaattttgatacttggtggttcgtgtactgcagcttaagagtaatttcttattgtttcaagcttgaacgtaaaaaagattatacaaattcaagtcaatatggccgttcttcgcaacatattggcttactatacatttattaaatttgatctaattatacttctctctctcttttaccaatctccttgggatatgatacaggtcactgtgcatgttaaggggaagacagagtgctatgaatgccaacctaaacctgcccccaaaacatatcctgtgtgtaccattacaagtactccatcaaaggtattgatatagaacttagtcattctgtatgcttttgaaagtttacttctttgcaacttctataagtgaatacaaagttatttcttggtagtgacttgctgctaattataacaagctttatactttcgtagtttgttcattgtattgtatgggcaaaggagcttctatttacgaagttgtttggggataagaaccaggagaatgatttaaatgtgcgttcaggtgatgctgctagctcatctaatcatgtagaagatgtatttgagcgccgaaatgatgaagacattgatcagtatgggaagagaatatatgatcatgtatttggttataacattgaaatggccttatctaacgaggagacatggaaaaaccgtaatagaccaaagcctgtatacattagggatagcctgcctgatgcgccaactcaacagaatggaaatgtggagaaaaatgggacaaccaatgatccatcattagtgtctgctatggcatctctgggcatgaaaaacccacaggatatatggagcctgaaggaaaactcaagaatctttctcgaggctctaaagctatttttcttgaaaagagaaaaggtcagtttggactcttctattgttgcttcctttgaatatctttttttattattattaatttctgtctcttagttctaccgtgtggagatttgaatatcattttggtgtggatgtttggcaggacattgggaatttgacatttgacaaggatgatcaactagctgtagaatttgttactgctgctgctaacattcgagcttcttcttttggaattcctttgcacagtctgtttgaagctaaaggtattgctggaaatattgttcatgctgttgcaacaaccaatgctattattgctggattgattgttattgaggccatcaaggtactgcaaaatgatcaaaaaagatataggtgtgtgaagtttcctttctactgcctatttg

SEQ ID NO: 188294 - DNA, 1751 bp, Cannabis indica
aaggaaagtttaatatttattaaagtttagggagtatgatttggtacgtcaaagtttgaggggcataattgaatagatatcaaagtttggaaaacataatttagtacatggataattaccgaattagtaaaattgaatgaaattgggcaaaaaattttaaatctaacaatttcaataattgagggagaatttttaatgtgatatatgtcaaaatttaaggtaaaaattataattagtctatttgaaaattttacacttcatatttgattttaaaacagtataagatataaggtaattggttaatcacttttaaggtaattagttctattcattgattaatccattttaaggtaattagttctgttctttctatattttcttaaatttctttccattaaattttttttttttttttaaagaaaaaaaaaacattgaacaaaggataggaaaatctataaaatttataatttccttaatttaatttaacgaaggaaaataatttatttatttatttatattttatatgtattatttatctctcttacaaatttactctaataaaatttatttacccaatcagctataatactataatataaaattttaacaaatcacaaataaatttatatgtaatctattaatatcaccactacatattatataaatttacatgctcaagtttcttgatgttagattgtttttgtttttatgatttgttcataagaaaaaaaaatgaaaatgtatattcactaatcggaatgagtcatttgtgtgtgttgtatttgaaaagaaactatcaagtttttaatttggttcaataaaatttatttttaagagattatgatgtttgtcttttgattataattcaaaaataatttatgaatttattttctatttgaataataaaaaatcactaatattcacatgtaaattacatgaccaaaaaaaagtatagtataacttttcttgtttgtagttattaggtaatataagtgtaaccaaaagtaaattttgcagtcaattgcatgcatttttctaatatattttaaaccaacaaaaaaaatagtgtgagtgcatttttatttaaattattgaaatggaattagtgtgagtacttttgtaaagggatgaaactcattttatcatttatgttgtaaagagaaatgtgaaggtagattagccgttatcatattattattagtataatttaatattaaagtcttacatgttttagtttaataaatagcgtaaaaaaatctataaccacacacatgtgacattttgatggtgtaaaaatggtcctaatctaggaaagatcacattacccaaacccccttttcacaaagatttcaacaacacaagaaagaatagcttacacacaaagacactacttgcttggcttggctctttcactatcacattcttattttctcactttctattttctaatctaaaatggtaaaagacacaaacaaacaaacaaaccacactcatatatgttccactatattacaaaatatatctctaaccataacccaaaagcaaacaattatggtagggcaagggcaccacactaaagttgtgacgctcaaaatggttgttttcttgctctttttgtagtggtcatgactcatgatgatagctttggtggtgggaccaatttctttttcaaactcaatctcctcctaccatttttcttgggctattggcccatttgctcaatagtgggatttagaggaaattacactcta

SEQ ID NO: 188295 - DNA, 3157 bp, Cannabis indica
tgaatggaaggagtcattattatcctcctgccatcaatgtaaggatttcttaatctcttatgtgtttattttatcgtattagaaaattcatatttagggtattagattatagaattataatcaacatacatgccagaaaatctagatcatagtaaaatactttccaacaatatcatcatttgatttacctttatttcggatacaacattaagtacccgaataatgggttttcgatacattggatcctgtttgagtttttggaggatgaaattggaccattaatcttggcttaacatcaccttttaccacttttactcgaactttcaaattttctttcttcaaacccagaacttttaagagcaaaaatcgtgaattaaaaaatttggagcacaaaattgattattacaatcaccttcttcttcaaattaaggctcaagaatacccaaacgttccacccccagtgattaaaacttcgtcactagaagaaattaaaaattttgataccataactgagatcgattccctcatcgaccatgccaacgccattgaagaaaagctcgatcgtcttgaagaaccttctgttatggaaatttctctacaatcattatttgaagttagcgtgtgctctcccaggccatatttctactcaagtctagagctatcacctaggtcatcactaagtaaacttttcttctttttttgatttcttcaaccttgttgcatgtttaagattagtgctcaatatagaaaatatgtgtgatttatttgctgtttgagaattaggatttaggcttgttactggaatattgttgtagatagaagtagaatagtctgaatattatcttgaatagctttaagaaccagtagaagccaggttcctctattttattgttctcggtaatgtctattttgttgtaaaaatgctggaattttttttactcctttgtttgaagaccttattgttctagatagtgtatgagctttcttgtattttacttcttattgttccccgttcaactatctagaacaattattctgtttagaatattgtctcttgatagtgaatccggtggggacctctccaagaagttatgggggaggattcctttgtgcccttatgttcatagttagtctacgtaactaactcctttgtatttttttcagaatccattatgtttaagaaagttcagtaagaggaagttgaagaaaaaaatgtcgtggtagaatatgctactactcaaaagctagtattgaatttatcttcatgggagatggatcaatacgttaataagtttgaacttatggcaacctccaccaatacgagacacagagcgggcttgaaagcgtcctggactgtgctggagttatgtggaaatgggtgcccatctttctttgaggtgctgcttcccagagttctgcgtagtatctggagtggctttatacaactttattccacaagtgtactgtctacttgtgagatggtacatcttctgcttttagaagaagaaagctgctcttaccccaaaagagatttttggtaggtttcatgtcttgaaaagcctgtaaattttttttttctgatttttaataagagttggctattttgatatatgcatgaatgttaaattattaatattttaatattgaataaaatatataaatatcaaaaaattccatttttatatagaaggctatgactttgttaggttatttttagtattatttgttaggttgtttaattcacttggacatccatggccgctatggccataatggatcttgtagccactgacaacggtgagccgaggtggtccatctcatacctgactcaactattatatatatgtatatattttggtatatatatatatgtatacaatttatattatgtgtatatatattatattatgtattgtatataacatatactatatacatggtgcatatacaatataaacttgtttactgagatttttgaaaactaaatatttgagaactaaagaaataagaaaatgcataaataaatgagaaggagagtcttatgtggtttaggtgttaattaaccttagtccacaagccggtctctaagagcgtgtttgatgtgtttacaatattttacaggaaactctaactctatagtcttagtttctcttgaagaagaggaaagcttagaataatattagcagagttttggccttttaggttgtgatcccccttcgtatgggaatagaaggatatttataggctaagggcgggtatggacatgcccatgacccgcctagggtttatgcagaaaacccactaacagggtaaaatacatgcaaaaagagagctgactattgggacccttggaaagacttgtgctcgtgcgttgcagcagctggacaattaggaatcattatacactatggacacgtgtcactaaggtttaacctttaaaagtagaggtccaaaataaccgtgtgataaaaagttatatgaggtgcgcgcactaccatattcttgcacagggtaaaagatctgattctgtatcaaaaaaaagtgtaactattgctaggctatctggattgcatcaaaggtaaacatccgcgacactcttgggcgatcattgtctgtgttaggcccttcaagtacccatgcgggtatcagttgagcagactctacatttagaccacttcaggtcctagagagacaatatgtctttcgtagcaccaattgtgcttcactttctttaatgcaacgtaggagaagagtgttaaaacctctcttgtataaaactccatcaatcaagacatatttggtttcctaatacacaatcatttgtgcctcttttttatccgaaggcaatgttccttcttggatatatttgatgtaaggcgtcatcctagaggtttcttcattccctattgtgatattttgcacacgcaagtgtacgtgtcctgacaagtgaaaaactcaccaagagtgaggtcgatcgcatgaggattgtagttaagtacgttaaaattaaactatttcttctatttggttgaaataaaaattaagaaaaaaactagaaataaaaacaatgaaagataagcaaataactataaggaatacaatataaaataggcttcgatttcaattgtttatattatatggcctaatatgattatct

SEQ ID NO: 188296 - DNA, 1583 bp, Cannabis indica
gtcgcacaaacccttataggaagagtaagatgaatcaaaccttaagaggaggggcaaggtccaacacgtgggcagaaaatttaactactcatgtaagcaataaaaatatatacaaaatgaaaaattcattgaaaatatatttgaatttgctcaaaataagatcatttctgatgatcgcgaggtggaatcgatgatggctcgcacattgaggaacgggcatataagatgctcgcacgtaaagcaggaaattaactacttaacgtcagaagaaaggacaagtaatggaaatccctaataaactttatccatgtgataatttatattgtgaacaaaacacaagcaaacatctgcatattaaagtatatagttaaaaatgcgaggcgttaaaaaacaaagttggccatccaaccttacaaatttgtctttacaaaaaaaaataacaggggttaaaaagcaaagttggccatccaaccttgcaaatttgtatttacaaaaaagacattgtctcggccaaatggccatttttttaaaaaaaaacggagataataaaaatcaggtctacatgctcggagacgtagacaggtcttccacttgttcttcctgatcctggacacgttcttcctcaacgtcgagaccttcttcctcaaactcggcaccttcctccatcttggtcttccagcacttggctaaagtttcctcttccccctcggccaagaatctagttctcatgttacggttccaatgccaggccttataaacagtgcgaaaacaaaccttgttcaatcgttctttggtctgcttttcttcttccttaagaatttcagcaagcttgttcttgaactcattggcttggtcttcaatgtctttctcggctttggcttttgcattctcggccacctcttttgccttctcggcttcctgtttctcgttcaaggcatgttgttacgccttctcagcttcctctttttccttcacagcctcttctctcgccttcttggcttcctcttttgccttcacgacctcctctttttccttctcagcttccttctttgtgttctgggcttcctccttcactctctcggtttcttgcttgaggtgagtattctcctgttgggcgctatctcattgctcactcacaaccttgcattgtgattctaacttatgaaactcgccctccaagtattcaagccgctcattgagtaatcggttggtagcaaaaccaccaaaagaagactggagaaatgcaaacggatggatatgaaagaggtagtaaaaaaaaagaataatattttgtcaaaaaaaagaataatataattataataacaaagccaacgtaccaatatgtgatactcaaagctcttttgagagcatatcgtttgggctcttacgtttgagaaaatcccattcagtggaaaaaagaggttgatgttgacgccaggcgactccaaatgcttccaaaaattgagacccggggtcctttgctgcgaccgtcagggtcccaatggcttggcttgaggaagcattaccaggggtcgcctcggggtgaggagcattggcctcaggaatgttgggttttgtgccct

SEQ ID NO: 188297 - DNA, 2549 bp, Cannabis indica
cctaactcatattcttatagattggggattaagagtttccgaacgggtgtgagcaattcataagtatttcttcttaccatcatatatctattctaaactcttgaaatttgtggagaatttatgcatctagaattgtttgtttggtccttgacttaaattttacgcttagagaatgtgttgagaaattacaacttctgaagacaccagaggaacgccagcgtagattagaagatataccagaaatacatgcagaccccaatatggatccaaattttgagtcggaagaagaggaggatgcagaaaataagagaaaaggtttctttctccatttcatataatatattgtatcatcggtatttttccatccgtttatttgtttagtcattaataacatgactttctattcatgcagaaaacttcatgagatctagaggttctggctttagcaggagaggcagggacccgatttctccacgaaaaggtggatcaagttcgggtgatacctggagtgggggcaggagctatttcagctcaaatcaagaaccaagtaggaacaggtccagtcgtgggttctctggcaaagctgaggatacaactgtagttggtgaaatagtaaatgacacatggaatcaaggaagagagagagaagcaccaaacagctgggaaaagaagagaatgtcaacttcagaaatgggttcgaggaattcgcacgctgcagaatctactgctgtccctgataacttggcgtcctctttgcctacaggggttacagaatctccacctaaaatcaatgaatcagaaaaaaattggtattacaaggatccatctggaaaagtccagggaccattttccattgcacagttgcgtaaatggagcggtactggctatttcccagttgaccttcgaatttggaaagccagcgataaagaagatgactccatgcttttgactgatgtattaactggaaagtttcagaaggagaaggttcaggttttgcacaatttacctccatcgcccacaccacctgggaagcctcaagttgcatccatgcaaagggctacagaaattcaagttagtggagaaagttggagatctcaaaatgaaattagtcctttgtcagcaggcaaggttgttccgatcccagttgacgtctccaaatattcttcagatacatggggttcaacaaacctcccgtctcctaccccaacgcaaactcctcttggtggagcaaagccgcaaacttacgaaaataaatggtcaggcaataccgttttatcaaataattcaatggtgggaatgaatcaattccccggtagtgctggaggtacacgagagggtgcgatgcgagttgctgaaaatgattcgagttcattttctgctatgacatccaagtcagaaaagaatatgactacaaatgatcttccaattcaccattttccaacaatctcagcacctacgttaaatcacgcttcattaaatacaaatgctgatatacaaaatgttgtatcgaatctgcagagtctagttcagtcagttgctaatcagatgtcgcccgtcccaaaacccgaaatgcttgcctcaggtccaataactggagctgaatctcagccctggagaggaactccatcccagaagttagaaccgaataaccctggtatcatgcatgcacaaccctctgctcatgctctttggagtgatgcttccgccatacacaatcctacctcatttaacgcaggaaatgcagttgggaactttccgacatctggcttcacagcagctgttcctcaatctgattcctggagacctaacattcaacctcagcctcaggctccacccaacatgccttatagcatgggcgttgtggacaaccaaactggcgcgccaagagtaccgcaagacaatcaaaatcaaggttgggcgcccccagtggctggaaatccaaacatgggatggagtggacaagtaccaggaaatgcaaacccgaattgggagttcctccaagtcaggttctaccacctggaaatacaaatccaggatggcacaatcaagttagacctcaagtctcgggttgggtcccatctggtcaaggaccagcaacacctataactgctaacacaaatcaaggttgggtaggtcacggtcaagtacaaggacaaggaaatacaaaccccggatggggtggcgttccaggtggaaattcaagcaactggggtagtgagcgtaatcataacacagatagattcgccaaccaaagagatatgggttctcaaggtgtagattcgggttatggtggtggtaaaccatggaacagacaatcgtcatttggtggcggtagcggaggaggaggcggtggaagtacctccaggactcctttcaaaggacagagagtctgtaagttccatgaaagtgggcattgcaagaagggagcttcttgtgattatctgcacaattgagtttagtgagaaatttaatagcagcccggcatttgatttttgtacagttgtttactattgaagaagagttttgttatattataaacatttttaggt

SEQ ID NO: 188298 - DNA, 3629 bp, Cannabis indica
gggttgtaacccaaccaacccataatgtgtgggttgggttatgcataaaacataatttgaatgggttagcattttttaggctgatcccatactttgacaaactgagggtagttcaaaacctaggggcagaccggagagtactctaacaaaggtgcacacaaatactccttgcgtccatcgccttgctccaacatggagataaagtcgctggtttatccgccaaatactcctccgctctcggtcattgctgccgctaaggttgccgggatctctctcaccattgacacttctgattcttctgattctcctccgttttttgagttcactgacgggtaattactctttcttctctatttaatttccaacttaatttaagctttagttgtaagaccaatgtataagttgggtttgtttcaaattgatcttttattatcatggtgtaagaccttgttggtgacaattacactaaacttatgcatgactaagtggtgggtatataggtgtaaggggttgattgttttaagaatttttttttatatatgaaaattgattaaacagtttgtgacaatgtgaaaaaaagtcattggggccctagtaaagtcatttgtttagaatccaaaaacttaaagtggaagtgttagtcaagctagctcatagtgtattgagttatacccaagaggggtagctcatctttctgttgatacttatgaacattctgtgtaagaaacaattttcaatctgacataaccttccgttaaactttaatgttttgtaggctaaaattacatggaacatatgtactacttcgatatgttgctcggatttccaccattcctaatttctgtgggcggaatgcatatgaatctggccaggtgactttccttatagataactcaattgcatgtttgtttagtgctccatttttaattactttgttagttacttggtctctttcctctctttttcagattgatgaatggctggaatatagtcctgttctttcatcaggttctgcatttgagaccgcatgcaaatatgtggatctttatttgaagagccgtacatttctggttggtcattgtttgtcaattgcagatatagcaatttggtcaggtcttgcaggtatatattttctaataaaaatgtagaacaattaactatttatcaagctgtgcttgaaagagatatgcttagtattattatgtatgcttcaggaactgggcctagatgggaaagtttgaggaaatcaaataagtatcagaatcttgtaagatggttcaattcaatcttggcggaacacagcgacgctttaacagaagttgttgctacgtatgttggcaaaaaaggaaagccagtgcctgttaaatcaaaagagcatcaaggagttagtcaatctacaaagagtgtaaatggggatgtttctaaagcaggaagcaggtctacatttgaagtagatcttccagatgctgagattggaaaagtgaaactgagatttgccccagaacccagtggttatcttcatattggacattcaaaggcggcactgttgaatcagtattttgctcaaagataccaaggagaagttattatacgatttgatgatacaaatcctgcaaaagaaagcaacgagtttgtcgacaatcttctaaaggatattgagaccttgggcatcaagtttgaaactgttacatatacttctgattacttccctcagttgatggaaatggctgaaaagttgattcgtgagggtaaagcatatgttgatgacaccccacgtgagcaaatgcagaaagaaaggatggatggaattgaatcaaaatgcagaaacaacagcatagaggagaatatgaaattatggaaggaaatgattgcaggatctgaaagaggtctgcagtgctgtgtgcgggggaaactggatatgcaggatcctaacaaatcacttcgggatcctgtatattaccgttgcaatccgatccctcatcataggattgggtcaaagtacaagatatatccaacttatgattttgcatgcccatttgttgattctattgagggtataacacatgctcttcgatctagtgagtaccatgatcgcaatgcgcaatattaccggattcaagaggatatgggtttgagaaaggtctttttgtatgaattcagccggttgaatatggtttatacactccttagcaagcgtaagcttctatggtttgttcaaaatggacaggttgatggatgggatgatcctcgttttccaactgtccaaggaattgtgcgtagaggtctgaaagttgaagcattgattcagttcattcttgagcaggtaagataactgtcagccatatatataatgatattaatattactgttgaaccttattatgttgttggatttctcatatttgactagtgtagtattatgtgctttttattgatgaaaccttcacactaggattaaggtgtctcgagttagaatcatttaatcatcagagtttcattgtgtataagttacttcctcttcctatatacgtgtcccttacatttgcacgagttatattttttttactgccccctgatccaactgaatctaaatgtcctatttttttttctccattacagggagcttcaaaaaatcttaatctcatggagtgggacaagctttggtccataaataagaagataattgatcctgtgtgtcctaggcatacagctatcattgaagagaggcgtgtgttgttgaccctaactaatggacctgaggaaccatttgtccgaattattcctaggcataagaaatacgaaggtgctggagacaaggctacaacatttacaaagaggatatggttagactatgccgatgctgagttaattacagcagaggaggaagttacgttaatggattgggggaatgccattattaagggaattgaaaaggaccaagaaggaaaggtaacacagttaacaggagttttacatctggaaggatctgtgaagactaccaaattgaagcttacctggttacctgaaataaatgagctggttaacctctcattgatggagtttgattatttgatcacaaagaagaaggtatgtgttaatcaattaattacatttaaaaatttcaaatatacttagcggatattcggactttgatgattggctatggtatatgaaaccttaactcaagtgattggtacttttgacttatcattgcagcttgaagaaggtgaggatttccttgatgttcttaatccgtgcactaaaaaggagaccgcagcccttggggactcgaacatgcgaaatctgaagaggggagatgtattgcagctggagaggaaaggatatttcaggtgtgatgctccctacattaggccctcaaaacctgtagtcctactttcaattccagatggcagacaacagactggtttcaagtaaaaagatttcgcctttcagccttgtgagcagtgagcacagcagttgttcttttcatttcccattatgttatcattgaggattgtttatctattgtatcatacaatattttaacatcataacttgtctgttctgcttgtgatttttgtcacttgtgttagtttgacacacaggcccatagtgaaaacacattgatca

SEQ ID NO: 188299 - DNA, 1862 bp, Cannabis indica
atatatatatatatattaacacagttgtactatatctatatgttcagatgagtaataaaagaaagcactatatactataccactactcactgtatgtaagccttttttcaaacaggctaaaagatctgactttgtattaatcttagcttagcttagcttagtttatataatatatataattaaattaagccaaaaaacaaataaagcttcatacctaacaaaagggttttaaagaaaaagataacctttagccgaaatacaaagaaaaaagctaacactatataatagtatagcaaagctcctatttttaaagactttgatctgtaattttctttttcttttcagattcaagtaaatttcattacaagccgccgatttaatcacctttgctggctgtttcagtccctaaaaatggcagacatatatacatatattacactcactcactgtcattatatatatttataaaaaaaatatttaaaaatatatatagaaatgacaaaccttgaacaatgtttggattaattagattctggggttacaggtgtcaaagtctctgggtagctaaacgttgactgtgattgtgtttataaaaaaaaaatcttctttttttttttcttggtgctgtaagctcacagatctgtgtattcaaaattcatgggatcagttccttattactgaaaaaaaccaataaccataaacaaaaacactaaattccacatattaatttattcattattcctcttgtatatatatctatatatatataatctttctcctcttattgagaccaatactgcaatatcatcaatcccattttagatttttacaaattaaatcaaaatcacaaaaaacaaacacttccctgttttgggttttcatcaaaatcataacttttcagttcatgattttaaagcaatgaattttacaaatctaaagcccatttcaaagttgtaattttttgctctaaaacccatcaaaatcttaacttttcagctcatgattttttttttctttcaatacatatatgtttccaatttccagaaatgatgaaataagatcaaaaacccaagaaccaaacttgaattcacaaaaaatctttgctcaaattggggcaaaaataagtagagagagggagatttaaaagaatgtagggagaaataaataaataaataaaaacttactgatttgacagtggagtagtttagggttgttttaagctagctatatatagctatatatatatatattagtacatgtttggcgggtgagaaaacgaaagaaagagaaagagaaaatcccaagcatgtgggaatttgagggacagtaaatctagagagagaaagagattgagtagagagagagagagagaggttgttcttcaaagtgccctacctaagataaaagaaggtataaaattaaatagattttaatattttgggtcatattcataattttaactaaatcactggacttattggcaaaaaaccaaaacatacagaacagacacagcgccgtaaccctcaaacctttaattccacttttgcccttcttattcttttttgtttctgttttgcccttttcaaatctttatatgtttgtttttattgatttttcttttataagaaaaagatataatgtgatttttcttgggatgtctgaaaccagataaattaaacaaatattattagtattattaatattgttattttgtattatatatgtatttttcttctcattttggacttttccccattgttgtattattggctttgataatttatttatttaattttcacattttttggctagtattaggtgattaacgattctttgttttttttttttttttgttaagaaag

SEQ ID NO: 188300 - DNA, 1322 bp, Cannabis indica
tttttaatctcatccattccacataagtgtaaatatgtacactttacaaattagattgaattagatcgtaggaattgtattgaattgtctattttatgaagacacctagtaaaaacgacataaacattagacaacaattaaaacgacaacaaacgtgcgctcctctcaaatttgacattagatgatctcgtaaaacaaaaccatttaaaacgacataatgataataaaaacgacaataaaatgcctcaaatgtcaaaggaggacataaacatttaaacaaccatttataaacgacgttaaaaaaaaaaccatttataaacgacaaagtatgaaaacaacgacaacataatggtataccaagaaacgacattagagtgtctcaaaagagcaatatataaacgacaatattatcgaataaacgacaatattctggaagaaaccagacgaaactcgaaagagttccctcgtttcggttcgcggcacttctctctctcaacaatggtggaaatcgacgattaccaagaaccagcggtagatatagaagacgatgaggagaaaagaatggaaagcggtttatttgagaagctaaaaccctactgcttagagcttcttgagcttctccaacgcccaaagaagcattccccagctataccttccttgcttcaattccttcgtcaatctccatccgatgctctccagccattcttcgagtgagtttattacttagtagtaactaaacactcatgctcaacctttatccctattgatacatatgcattttgttagtctctcatggtttgatgcgttgaacttcttgaatatcaacctacttctgtaaaatgttgttcagattcatttcattgctttgtacagactataatattctcactgcccattttgatggataaaatgaaatattttgaagttttttcgtgtgttggaagcgattttgggtatttgaagtttgtttagtttttcttggaaggtccagtagaaatatagtaaacttttgatgattttgttctggttcttcactctaaacccacttcaggatttattgatcgggctatttgaccaggataagacttttttaggctttaattattttgattttagtggaaaatggcaatgttcggcatgattttttgatgagcaatatgtatgcccctgtagctcagctcaggtacttctagaattgttgttgagagcaaccttaatcttaaactatcataaattttcatttcccaagttgcacatattgagaaattttatctattaattgagcttatctagtgaaaaagacttcaaaaagtgaatggaaa

SEQ ID NO: 188301 - DNA, 1879 bp, Cannabis indica
aaatttttagtctaatttttttagttgtgtatgttgtaattttaagacattatacaaaattttgagaaatttaaaataatttataatgtagaaaataatgtttaatttgttttagcacgcatataaaagtgtgttaaatttttttaatttcttaaaattttggaagatctctttaacaacttaaataactataatgtacaggaatactaaaactcataaaagtgaattggtgtaccatttttaggggtaaaattttccattgttatagtctagactaaaggaatttattagttttgctgaagtggcataatactattggttggttactcgattagcttagtagaaatataaggatgtacaccaaaccaaacagaatcctgttagtttctttctttacgaatctccaagtggcataagactacactacacatataataaaaaaaaagagatgtctatatatgtatcaatgtattttgtggaagagatatcgattttataattgaaaagttaataattttgatactgattttcaatagaatgtttctatgaatacaaaatggcttagaaataggaaacaaataaactaaatgacctaaacagaagcaataaactaataaaataaatgagtcatactaagactaattcaaagtaaaaccacattgcaatatcccatgaattcaatccaattttcctttaatcaaataccttcttatttctgattctctaagccctctcccccaacaatattatgtcttccaaagtaccatcattaacagtggaaaatctcttcaaaccaacccccttttttcacatcaaactatggattgtgattctactcattttctccttagtatttttgataaccatcttcatatttctctactttatcctatgtagtaggcacaaacgttacagagctagatatcgtatctcatctcccaacgttagccaaaatgcttacaacaacacttcatcccttgataggagactcctcactcgtaacctctccgagtgcgaaatgatgggctttagatatgggccggctatgtcagcccaatggtcaactcggactagcagtgttgccagtgatgctgattcgttggtggcccggcccagagatgcatggaggaaaatgtttagtatgaatgagattgatgtggcaacaaatgggttctcaagagcaaatgtcattggtagtggagaatatggaactgtttattgtggtgttttgtttgataatactcgtgttgcagtgaaaaagctacttataagcaggtactactagttgaatttttgcttttatttatgtgaaaataaaaaaatcacttgcattaactcatattttaggcttccaatttataagggtgtgtgagcttttttttttttaatatataaagtatatgattaaatataataaacctttgctgataagggaaaaaaaggtagaaactaatttgtcatgggacatctaaagaagaaaatagtaaaagtagagatgtatatacaattatatatatggtgcttattatgaaaacaagttgccaagccgaggaatttattgcacaaatggaagcaattggacatgttagacacaaaaacaatagtgaggctacttggttactgtgttgaaggagttcacaggtatcatataattatatatatatatatatatatatatatttcttattgtaatatcaaaattaactaaaccttagtgtgattatagcactacttgatcacaaaacagtttttatttattaaaatttactatgtgttattataggatacttgtgtacgaatatgtagacaataagaatttagtcagcattggcttcatcaatgccctcaacaaatcagacttagttggagcatgaggatg

SEQ ID NO: 188302 - DNA, 2548 bp, Cannabis indica
taatgaactacatatatgtagaacgttaaaattataatatacatatatataattattatgtgtgtaatgttggtagccatgcaaaatataaatacgaaattaaattctttccactatttagttaaaaagtgtaaagtgtaggtaatttccacagtcgtatatcttaaaaagtagttctaagtagtgttttcctattggcaaacatgcttttggtttcctcaaaagttaagttacaaaatttcaagggactcttttaattggacaattcacctcaaaaacgcgtgtgaccagaccatctattatagaatacaaaataaactttttcaataatgcactaaaaataaccccagaaagttcataatcaattctcttttagactttttttttctttcttctttaatgtcttgcaagaaactcttcctcaaaatcagattgcgtagttggtgacacccaagctagagccactttttcctctagacaagttcaatttttctttacataacataacagcatgacaaagaaaaagatatatgcatgtgtggctagaagtgtagactcgtctcctaaattctaattagttttttgtctcagccgaaaacagaatgtaggagttaattaatacttaacaatattaacgaatttttgaactcttaattaccctaataatatatataattcaaataataataataataataatctttttgactcttggtttctgacccacgttataacgcagcaaaagtactagtactgactacacccacccattattacaatctaatatcttccttaatatccgtctctcctgatatagtcatatggtttttttcttaattaatgtgatgaagtgaaaagacacaaatacccccatacatatatataggttaatatataaaatggtcggttgtgcttgcgagtcacaagtggatattatggaacagccggccgacgtcggtagcagcatgagccgttaatttcgccggcgtgttatatattacgtatgcaagaaaattaatatgcatacttaatttttagatttatatatgttcgtttcacacgtacacacatgtcaatttattacgatgttatactcgtactatatatatttttatatgaataatattgtactattgatttcatgatttacgataccacattaattttattggacaagttataaataattacattatccatttttgggaagaacttttataatattacagaatgatgaataattattcatacataataaatgtaataattcataactttgtacgagaatagtgtatatatattattaattactcaaacttttacacagaataataataatattgatttctaaattcacttctaatccacatggaggatagagtgcactacaatatatctaataataatgattttggtaattaaacttacaaaagaagaaataaatagggggattaactcaccacaccatatgaaccaatgtaatttttcttttttgttggcaaaaaaactaaagaaagaatatatatatagtaaataataataataataataacaaataatatatagtaatatataaaaaataataattaataatcatgtgatggatcgatcatcctcgtcctccttatcatcaagtggtgggatgatatgatcaattattggggtgttatgtagtgttgtaataattgatgatatacgatccataccaggctatcgttgttcaggttcccgttcggtaccgtcgaatgatagccggaaaacccacttggtgatcgactttcttctcgagtttttgataattgatgatgaattaagtgatgactgttgtttaatgagattgaactcactgacaaaagctttcaacctttgcaatgagagatccaatgtttcctcggacatgttggcaaaacaaactcggaaccaacctggctcagtacaatgacaagaggagccaggagagatattgagtttcacatcgtaaacaatcttcttccaaagatctatttcagcttcgaatgtgtttgacttgagaagatgtctcatgtcaacccaacaaaacaacccagcattactttttaaacaacttataccaatcttctcaagaccaacgacaatcttttcatgtcgtttcttgagtctcttttggttttctgaaatgtaagtttttgtgaattttttgtctgacaacatagccgaaagcaaatattgtgtctgtgaagagatcaaaccgaagctggacatttttgtggctgcagctacgaccattttgtcgttggagtaaattgctccaatgcgaaatcctgggagacccagatctttggataagctataaacgacatgaactcgttggctaagtatgtcgttttttgatgatctgttgttgagaacttccatcacgcttacgaagccagggttgttaaaaacggttcctgaatagatttcgtcactaatgaggtgaatttgtttctcttcaatgaagttaaggagaaggttcatctcttttagcgttgttgtggtgcctaagggattagatgggttggtaattaaa

SEQ ID NO: 188303 - DNA, 3520 bp, Cannabis indica
aaaataaataattaaatgttcattaaaattgactaatgactttccaagaaaatgaataacaataatctacgcggtgaagccacgctttagatttttttttggtttggaataaccaaaaggcggaatcaaaattgaaaaagaaggaaataaaatgattataataaaacttattacgtaagctaaataaacaacctcataaagaatagaacaacctggctcataaagccaaagcctaccactaaattaaattcttatttcttgacggcgatatatcatatcgcatatatacacataaaaatttacatacaaactatatatagaaacgcccctaaatttccattaatctcactctcatctttaactcttctcttcttcactattctagtaatcccctcataccttgttctcatctatcattgattttcattccaccaaacaaatatgattttgtcatcaaaaagaaaaaagctaatacccattttcttgattgttagtgttgagttttattcgcttctaattctgaaatagagattgttattattattattattacccacttttcatttttttgtggggttttctccattattgaagcatacccaaaataataatggttatttcgtatcttcttcttcttttggtggttgtggtttgtgcatttgtggtggttcgtgttcttttgtacagaactgggttggtttatattgtgaagaaatggtggggagctatggaggattgctttcatgtctatcaatcattcaaagtccccgaaatcaatgaagacaccatgcaagaaaatcacctctacagaaaagtttcagagtatttgaactccttgacctcaatcgaggactccgatttcaccaaccttatcaccgggaaaaagtccaacgagatcgtcctcaagctcgatccaaatcagaaaatcgaagaccgttttctcggggccaaacttgtttgggtgaacgaagaaaagggcgagaaaatcaatggtcgaaacttggtgctcaagattcgtaaagctgataagcgtagaattttaaggccgtatctacagcatatacacaccgttgccgacgaggttgagcagagaagaagagatttgaagctttatataaacatatattcaagtcatcaacagaatggacggtggaaatctatcccattcaatcatccctccaccttcgaaacaatcgccatggaagccgatctcaaagccaaggtaaaatccgacctcgaatcttttctcaaagcgaaacaatattaccacagattaggtcgtgtttggaaacggagctatctattatacggtccatccggcaccgggaaaacaagcttcgtcgccgcaatggccaatttcctcggctacgacgtctacgatctcgatctttcgaaagtctccgacgattccgatcttaaaatcctactgttgcagactactgcaaagtcggtgattgtgatagaggatctcgaccggttcttaatcgggaaatcgacggcggtgactctgtccggcgtgttgagtttcatggacgggttgttgagctcgtgcgttgcggaggagagaatcatggtgttcacgacgaacgggaaggagaatcttgatcaggcaatactccgtccgggtcgggtcgatgtccatatccatttccctttgtgtgatttcaccgcctttaagaatttagcaaatagttatttgggtctcaaggaacacaagctttttccccaagtggaagagattttccaaaacgggtcgagtttgagcgctgccgagatcggagaactcatgatttcgaacagaaactcgccgagtcgagccattaaaacggtcattacggcgttgcaaacggacggtgatgggagggggaacgggaagatcggacggaggagctacgtggaagaatcgggtcaacccgctggggttttttgcgaaggggttcattccgttaaggatattcggaaactgtacggattccttcggatgaaaagcggtgcaagatcctctcagtcgttcgattcgggttcacagaaggatggatgactcgggttgtggagctccacccgggttgttacacatgtcgttttcctattggttgcttaaaaaaatgaacgctcagttgttagttaaggggaaaaggaaggggcaaggtggaaaagggtcattataaatcactagcttaaaacggctgaatgggaaaacttgtggcttcaatcagaagttgatagtgttattcttcttatttttataattattattattattattttttgggttaatatagtttggtggttttgagtatagggatgtcatcagcctttttgtatattaaaagattaggttctattattaatggagaaaatgaaacaaacaatgcaaggaagcatatccacattggtattctttacagttttattatactataatgtctagtgagagaggtaacaaatatgaggaaaatggcaattattaaaggtttgaatcatatgaaacaaaaaatgaatatactcatctcttcaactttattttggagatattttttatttatttttttaaaaatgaacctgcaaaatcagatactgagttacttagttatgatggaactgaaaggaaagaactattttggagttattcccatgatagaaatgcatgtgacctgggttgggttctatatatcttcttccatcataataattacaaagattcattcaaaaataaataaaaataagtaagaatgacatgatggtactttgtttgaatttaaaggtcgtcctgtatttttctgctctcatcattggtgacgatatatgttggcctttttctataatagagttaaatcaagtttggaaagggcagatgctgctacgtgcgtttgcaatttgaatagaggaacacatactactgttcatcaataattgattctataagttgtcacacaccacgtatttagttatactttttggcttaaaaattgaatgaaaaaatatatatggaatgaaaaggaacccaattaaggaagattcttgctagggaaggctgagccctgtgcataaaaaagacctcgtaaaagcttatggtagagaaatgaaattgtcatttgttaatttgccaccaaaactttgatactttttggatggaatcgaatcttatattattcagtgtcaatagcctgtcattttccttatatatttcaactttgtgtatcaaaatactcctcattttttcattttttccctatcagtccattagaaacaaaataattgaccataaaaaataatattatttgttttttttatttctttttctgtgttgcaagtgtaatttggtattattattattagtattattcttaataaaatttattttcattaaaattatatatacaattaatattttaatataaaaatataatacaaaatatatatatatatatgatacgaaaatatttcaaaacttactaaatcaaaatatatatatatatttcattctcattttaaatgaaaaatataaactaaaataaaa

SEQ ID NO: 188304 - DNA, 2879 bp, Cannabis indica
aaacttaaaaaaaaaaggtcatatggaagacccctctcttataatgagcgtgaaccaatacctggtaacataatgttggagcaaccatgaaatatgctaaacttttgaggctaacgttgtaattgtaatccacattcaatgaactgggtagaacttctccctgtacactcaattattattttcttcaatcattcgtttctataatataagtaggaaaaattccttttagctcaaattttatggattgaataccttttcaattaatctggaaagtgctctcatatcataacttgaatgcgcataagagaccagcttcagccatacaatacaggccaacatcatcagcgcgtagccagaaagtacagctgaatcacacctgcatgtcattaattcaataaagcacattcaatattgtcagccttatcaaatgatgatgcaaaacatgtaactgaacaatgtattgagttattctttccagcaatccactagagatagtctccggaaagggtatattttacagagactaactataacagaaggtttagatactagggagcaaaaaatgtaatcacatttaacatacaagcaatgattaactgacctgagaataacaaaaacgggacacagaattgctgtggtgctaataatcacatgaagaaaaacaacaacctgaaatattaaaaaacacaattaaatttaaacatatcttggaaattaaaaagcagcgtgtggaaagcatgatagaaatggcactaacgttgaatatctactctcctttctttttctgttcctttcaaagcaaaattttaattattaaagtccagttggcaagatcaagaattgtgtgcagaaatcttatcaaagtagatagaacaggatcacttacaggctcatatatgtactttttttgaacgaacttctcaactgtaaatgccgcaagtgggaatagtggaagagtaagactgcataaaacagagaaatgcagaaaaacatctggtcaaatgatactgaactaaactaaaagccctgaggcattaacactaattatatcattctcaaccgtaaagatgaaggcaaaggtcatggaattagtaccaacacataaaaagaggccaatcccgccacgatgttgaactaaaccaaaagccagatttgattaaccaaccatactgcaacaacagttagaagacatgccacataaatgtaattaggcctaggtccacaagttttagcaaaaaaatcacagtccaaaatcaataaagttaatccaacattgagtaagcctgcataaacctttaccataacaggagtcgccttgacataatttagttgtcatatgtataactgtacatgttaaatttaaataccaaccttcattaaattctcaataatgagtctactgttgacagcaacaagtactactatacagaggttgaaaagaccagcatggctctgccacaaaaattaacataatatgtcagcaatccttctatcctaattcaatagaacgcaaactcatttcaatagaagcatcactgaactcgtcgaactttacacttctttatcgtaactcattatgaagaaaacattcacaaacaggagtctacatagaacatacattcgtgacactttggcaaaatcattccttcattcatgcattcatttgtacgaccatcaaaatataatcgttaattaataaaatcaactcaactatactcgactagtaataagtattccccctaaaccccaaggattcaaatcctcccccattcaattgaacctctatgaacttttagaattcaagtttgaaaaacttctactcaaataatagtttcgtcttcgggtaaaaaaataaatacaaagttaaacctgtctgaagattgcgtctgagctcaaaggactctccttcactctccgatgagcaggagctgacggcctgtaagaatatttcatagccgagaaatcatgtccttgatcctcaccattacgaaccttctccgggctctccttcgtatcaacagcgtccgtggcaaagtccacggcgggaatccgatctccatcgtgtcgctgacacggccaacggaagagacatcactagccgagtcggcaaccaaatctttaagagaattatcggcgtcaagaggaagaagaggagagctggtccctgaactagaatcagatgaagcttctgtaacgccagcgctaggtctcctccgaatcgaggagactttgagatctgaaacgtcgttgtgattagtatcgatggagttggtaacggtggtacctacgctttcaggcgaatctgaaatcgccatgaaaaggaagagctccaaataagcttaaaagataagataacagtacgagttttgtttggaaaatgcagtgagaaaataattatgaaaagaaattctccattgacaactctaaattcgtctaaaggaaaaacccagagatatatatctcgccagtggcggtgaatctatgtaaaatatactatgtgtatatatatctatatatgtaatattgtaatgtattgcaaagctaagtaaagtttttttattattattatttaatttttatttttgggaaggcaaagaaaacttcaccttcacctctttaaatatttaaatgtgcgtttatattactattattgctattggccacggcacctttatatatattaaatatgaacgatactctgtaaaaaaattattatattaaattatataagtcataatacttaattataccaatattgattaccacatataaaaaaatactagacactattggtacctaatagttattctctttcttattttattaaatactaatagtgtacaacactttttatacttaacttcttataattgattatc

SEQ ID NO: 188305 - DNA, 3892 bp, Cannabis indica
aatctgaggttgctctctttgatttctcatctgaatctccgtcaaatccaacctcatcaaccttaacttcaggtactttgatccattcttcttcactaatattaaagcattttcatttcagaattttcatctcttaaattcaattcaactaagtatttggttgttgatgattgagcttctgtaagtgtagagtggatttgaggaccaaaacaattatttctcaattttgctgattccgatcgatttatatgaaattctattttgatatctaaattggtttgtcgtttttacattaaaaagaaaacttttaaatctattacctgtttgattaaatgcctcagtgtagtgatgaagtacattttgatgaaaggcctatatcattatcactcaagagtttgatgtaattgactaaatatattgctgtattggttgatgatgattgagcttctgtaactgtaggttaattcatttggctaaaccccattttttcccattatggctgattttgaggatcaaaagaatcaatcacttggtaaaggtataattctttcacttttggttatgtgtttagagagagagagagagagagagagaactctaggaagtgtataactaatctctataattttttcaggtgaaaatgaggaggaggatgaaattgttactgaaggtgcttcatttgttcatggggagcagcctactcaggatgctagtggtagtggtaatggtccccctaaagttgattcagaggtggatattctacaagagaaagtcaccaagcaaatcattgtggaaggtcatggctctacaccaaccaaatattcaacttgcttctgtaagtgtttttttctactttcccacagtttagctcttgggtaggaattgcaaatgaccccaaaagttttaggttgatttgtcaggccatatttagatttttaggtcttcaatttcatttgtggccttaatattaatctcactagtataactcattagaattgtggaggctgaatagtcaagtctgtagtggttgtgtacagtgtttctaagtttgtgtcttctaatttggttggccagttggcattatttgttagtttagcctataaatacaggagagaattttgtgtgaaatatttagagtaaaatactacttagggagtttaccaagtttctcgaataacttgtagttctttcaacaactgaattgtgcacaagtttgtatcaggcagattgtgagttatgcaggaatacagattgtaatggcagattgtgagatatgcccgaagaagtgaaactggaagcttaggcttcgtttaggtctagcgctttgctttctttctattccatcccatttgattttggggtcgctcccaactcttagaatggaaagaaagtcaagttgagcttcaagtttgagtatataagttgtattatcttgaagtgcttgctctgtttctaatggccaaataaaggccccatggacttggtagcagacgggttgcccttcatttagaaaaagaagttgttctatattattgcctatggatagaaataatttattctggtcttattttttgtataagtccttgtgtctgtaccaattttgctagataaaatattgttattgttacatctcaaatgtttattattggtatattaagggggtttgtggtatcccaaaataatttaatacacattcaaaatagtatactcttttacaagttagagtactaggttgttgctctttaaagtgagaacatcagccatcaactttgtagctttaataaatttcgatctaagacatgatggtgacctgccataatatttttgttgaacttgaaaggaatgccatgcaattgattagttgattaatctttgatcgaaatttaaatttttcttatatttaccttcgctgctcgattgcaatttattgaaaggatttattgtttccaggttatctaatactttgttcataaatagtgcactacagggcatggactgaaggcacacagcacaagtttgaagacacttggctagaacaacagccagtagaaatgattttaggaaaaggtatgtgcctgatttttattaggaaatgttcaatgttctacgaataattaatttttctcttgtttgtagtcttacctactaagttcatgattttcagctggtttgacttgaattaattgcatttgcatggtctcatttcgaaaaatgttttctcttgtttttgcgacagagaagaaagaaatgacaggcttggctattggtgtctctaccatgaagtctggtgaacgagctttgttacatgtaggttgggaattaggatacggaaaagaaggaaacttttcgttccctaatgttccgcctatggccgatatcatttatgaagttgaacttgttgggtttgatgaggccaaagatgtaagttgcttccaaataaaatatgaagtttcaattactcggatttttcaatatatattggccatataacttatagttaacttattctttattaataggggaaacctcgtagtgacatgactgtcgaggaaaggattggaacagcggatagaagaaagatggacggaaatgctttgtttaaggagggaaagctggaggaggctatgcaacagtatgcaatggtactcacttattttcattttattgatactaactttccttatgtactgtattgatgggtcaattgttttcgggattgtcaggccataacgtacatgggcgatgatttcatgttccaattgtttgggaagtatcgagacatggccttatctgttaagaatccatgtcacctcaacatgtctgcatgtttaataaagctccagcgtttcgaagaagccattggacaatgcagcattgtgagtattccgctaaattatacccgctacaatttcattattgtatataaagagactttttgtcgaacaagtaactcaggtgtaattaaaaaataagttcaagaaagaatcatgaaaattagagcgatatcaagaagacttaatgaaattaggaaacacaaactcatttaactaactaaaaacttaatcttttgctagcggtttttgacggatatgaatatgacttgacgaaactagaatcaattatgaaatcgtcttttgggcaggttttgtctgaggatgaaaacaatgtcaaggcactttttagaagaggaaaggccagggccgagcttgggcaaattgatgcagcccgtgaagattttctaaaggcacgaaaatatgctcccgaagacaaagcaattacaagggagttgcgattgttggcggagcatgacaaagctgtttatcagaagcagaaggagatatacaagggactctttggaccacctccacaaccgaaaccgaagccaacaaattggctgatagtgttctggcaatggttgttgtcattattccacggcctatttagacaccaaaggcagaagagtgactgacgagtccaacttataagagacaatttgtgagaattagataacataacatgacaaatgtttggaaaagaagtaaattttaagttgatggaactcatcaattgctttgtgatgtttgaatgcatcaagaaattccatcactatctgcatcttcttctttttttaacatttttctatataatcaagtaaacattcagcttagtttgtggcttgatttggttaaccttcattatatcttgtgagttatgtattttacaatagagaaatgctaaaggttccagtggtgcgtaacagtttttaatgtgttatattgttattagtgtaattgagtatcgttcatatagtttaatgtgataatttgttataaaatattactaactaataacaatgcatagccctgatgtataatagagatgcaaataatta

SEQ ID NO: 188306 - DNA, 875 bp, Cannabis indica
cttcaacaaccacttcatgagtttcttctttctctccttccttttcggtttcagcacattcgggtttcgattcctcagttgatttttctgcttcttctccttcttccttcactgccttttccttctcttcagcactttcttccactgccttctcatccttctttggctcttcttctttcttataaacattgttgccgagaatggcttcttccaatttcgccttcaaatcaatcaaagccttcttctcaaactccttaagatcagaaagaaagttactctcttccttgtaagaagagcttttttgaacggttgtaggcttagattcttgtactacttgcttcttgctagacacctcttcactgatagaaacttcacccatttgagtctcttcaacttcaaccttaacctcaacagtcattttttccaacaaaagcccagaaaaattcccaagaaacccaagttagaaaacgaaaaagaaaaaaaaacaacaaccttggctgtttggtcaatcagaaaatgaagagagaaaactaaaagaaaatattacgcttgaggtttagtttgtaagaacctagacaagaaagtaacggttatatataatgaacttttgtaaataaaaggacacgtgggccccatcaacggtcacttatctgtggccacctcatataggagccgttgggattattcttcattccaagggttttgctagcctgtaagccagcaaaaatttggcgtgaaagaatcaaatttggcccacacaaaagtatttattttttattcagcacaaaaaaaaagtatttattttttattggaagccatatcatgtacactcaatcttacataaacatgtttatattcgaatcttattggtttaa

SEQ ID NO: 188307 - DNA, 6862 bp, Cannabis indica
tttatatgggaaaactcactagcctacgtggcaagaagaagctgtttgttctttcctatgattcttttgtagagagctcatcctttagcttctctgttcctttcactccttttcagctcagctccaccgccggccggtatcgcaagtatgtaaagttcacccatttaactatcattctcattatggatatatggtttctgtttacttagccctttcatctttatccattgtttctttaactacattccaaacatgcccttaatctaaatttttgattttttgaagtaaatctttcatgttgtctgtttgtttcaagtttgggtttttattgatttgattgtttaagaacttgattgtgccaattttaacagtttttagtattgaatttgtttgattagagaaaagaaatgctctactgaacaccccatttgctcaaattcaaaatggtttattcgttgatattgtaaactgctctaatttgtatctgcttagctaattaagatcactgtacaatgtataggaacttttgtgataaacccaattggggataagagcaaagattgggaaaactagatttaatactatgttcaatttctgtagctgcataaaatacttttgatttgaatattttaactataataacttgttatgagaatataggtactaatctctactcttgttatgtgttggattgtatatgtatcactagatcagaatcgttctcaacgagtgcataagaagtgatcccatttcatttcattacagtgttgatttcggaatctgtatattgtcatccaacaaattgtttatcaataaatgaagaatagtattttgttttcttgaatttctctttcaaattgccttatcagaaccaccatagtttggccgagtcaatctcattccttgttctgttgaagatgtcatcaatggcaaaagcagtactacaatctcctatacatacctcggtttcatggcctttctctcttcctccccctcacttgtttaggccatccacacttacaacgaaccagtctatgataggacacgggggagccttaattctgcgtcgcagcagtttcatcattgctgcagcgtctggatcatcatcggcttcagcagtcacgccaagcagcggctcagctccaccggtaattaagaagagattgaggtataggaggcagtacccgggagagaatgtgggcatcaccgaggaaatgaggttcgtggccatgagacttcgcaacattaatggtaagaagtacaatggtaacagtgatagtgaaaacgaggaaagtggagctagtgaatcagaatcagaaggtgatgatgatgagtcggggacatggaagcctagcatggaaggtttcctcaaatacttggttgatagccagctcgtgttcaacatcattgagcgcattgttgatgagtctgatgatgtttcttgtgagtatcttatgttccttagtgcttttctgtttgtaggttttcactctataatcttagctttttgcttaataactgaacagattcttactttagaaaaaccgggttagaaagatcagaagcgattttgaaagatttagagtggtttagacaaaagggaatggcgattcccgagcctaccaatgttggagtttcttatggaaagtatcttgaagagctagctgagaagaatgctccaatgttcctctgtcatttctataacatatatttctcccatatctcgggaggtcaaatcatagcaaagcaagtatgtctctaaagcattactctctttttcggtttcactatgctatgtcaagaattgataatgaattgttgctttaggtttctgagaatcttctcgatggagtggaactcgaattttgcaaatgggaagcagaggtacccgagttgttgaaaggtgttcgggaaaagcttaacatgcttggagaggtattcattacaaacgttctttcgttctttctcgtgcttgtgaatactttattgatagaatttttatgatacaatcaaaattttcaatacagcattggtctagagatgtgaaaaacaaatgcttaagagaagcatcgaagtcattcaagcttctcggtcagctagttcgcctaataattttgtgaaacaagttttttcatcgttatcaagtaagttacatgttttccttctcattgttaaagaaaattttgcataccattttcttatctcttggcgggtcagtactgaaaatcgaaaatgcctgcttacctacagttcttcgggttccaatttttgtatataaaggaagagattcaacatcacttgaaactaaagtatgattcttggtttaccttgattattagtaactctttttattggtttgaaagtagctaaatttgctcttaatatttgtgtatatattttttgaacaatttgaaattagatttgtatggtggtttagataaagtgatatgaaacttagcaaattgagggtactcaagtttaacttccaacttatgtcttgattttcatgataaatttaagatatcgatgaatgttctttgttttcggttgggcattgcatgcattcccctcacatatgctttctagggtcggtcttggactaagacaggctaggcttgcgcttagggcccactcaacccaagggccctgcaatttttttcccttttaaaaatacggattttattattgatttttgaaaatagtacatatattttaaataagggtctaataatattttttttactaaatcctcacaaatctcagggccaacctaaactttcagctgtcaaaagacatttgtgttgcttatactcgattttattttatggttcttctagaatttttctatcccagtcaaattttttaaccataaagttttatttttgccgaaattcctgacaagtcatccacttaagcatgaagaacatccttcatttttgagctttttaggcaaaatgtctcttgtttggtatcatcttttaaagatatcgttttcaatgaaatacaatatcttaagcttgtttaaatcgcaacgttttcattaaagctacgcgaatttcttgctgcatttgccaacataaaaatggattataagcgtgttgaatagatgttaattgtttgagcctaaccgatatccatatccatgcatgtttcggaaacaatgcaatgttgtatcaaacaaattcaaattcaaaagcgacaacgatgaacttctctactcctcgaattaagaaaacccagaactggtatgctcttagcaagaccgacatagttaggatcgcgaaaatgcaagaacattttgtagaaaacttgaagtaaaaccatagatggttgtcagaattttaaacataaactaatgtataataggtatgtagcattgattagtgttcttggcttatttagatgaaagtagagacacatgatgggaagaacagtggtcctcctttgcccatacataaaggcacatggttttgattagaaaagaaatatcaatatcaagttcccaatagctaattttattattgtattcaacaaacattgacatccttatttattattatgtttatctaaacatcatgtggagaagttgacacttgacaaaaaggcaactatcatatcattaagttgatgaaacaatttctccaatcactaaaaagtgcaccaatagtattcaacatcattaaaagttgttataataaaagattgggtcttacatattttaattaattttaataaagataacattttataactatgttgcacactaatagtgtctaatagtaatatttagaagtataggaaaaatttattgtacactccctaaaagaaatgtttcgatatactttaatctgtttcaacatttaaaaaatagttttagtagtttttttattattttataattgtgtatattgtagtaatttagttacacctgtaaatatttaaattttttgaatagtttacagtatcgaaaaataaaatttaaacagtacttagcacacatataagaaaaaacaattatgtttattcagaattttctcaaaatttataggtaatttttgataactagaacgtgtagattaaaaaaatatcgaaaaaaataagagatacattttaccgaaatatctttttagagatgtactgtaaacttatcccaaagtatgcaatttaatttgaattttattaaatatatatatatatatatgtattataagagttcatgcttcttcactatattaatgtttatcacagtaaaatggtccttttttctgcactattttggccagaaatattgtcactaattctatgaaacatcataacagtcacaccactcactattcacataaacttttctgttttaaaagagaatttgttcctttctgctacaattttatacactaatttttccaactcaccaatcactctactcattctttctgcaataatattattcactttacactattgtatagtttgttgttgcaatagctcaaaaatttgacaaaataaaaataatactttgtttgtctaagcatattaagtttaggtaagataataattgagctataaataataaatacatataataaaatgaaaacaatatgtaacatattggaaattaataataataataataattatagcagccattgccaaccctatgacattaccaaacttttcatttaaaccataattgccaaccttacaacacacacctaactattttcagagtttggtgtgtagtgtaatgctcaacattttgtgctatcaaaacttttaagtctttgtatttgtgcaaaaagtaaacaaatttgtatataataaagtatattataataattagctatatatctattgatttatagtaattatttcaatttgatagtgtaatattatcaattaattctttgtttctagatctaaatgagaagcaattttctttatttttctaattatcaaaaatatacaattgtgtgatgagacaatatgtattagagtttagaaggggacttaactacataactctagttagacagttagacttggtctgatcatcaaagtctgcttcaactattttatatcgaaagatgctaagcctgacccgttaattattgatcactaataatatggattaatacaataaagaactatccaattaactcatattttatttaaaaaataataatattttattaaaacaaaaaaaatgtaaacccaaataaaaaatctaacagttgcactcttttttttttattattccatattatgcttgttatgcatcaaaacggtctacattgagtaatgatatgtgtattcaaaatatgtatcaaaacgttagatatgtgcatccaaaatatacattcaaatgttatacatagtgatgcactgactaaaagaataatttgcgacataaatacttaagtttaactctcagttgcagataaatacctaagtttatttgtttacggatgatacctaaagttatatttctgaaatttctataggaatctaaccgttaagtgttaagttattttccacatgtcattttcttattaatatatttaaattaacttttaaataaaaataaaaatttaatgacctggaccaattaaaaattattacgtgaatattgacttgacacttaaccattatttggtaggatatagaaagggagggagaggagtttgcgcacacttaatcatttttttattcaaaatcattccaaaaatttctgtagtgatgaagggatacttttttctaaaacagtaattgtagttgattgaaatggtataatatttttgaaaacgaaattgtataatttttaagtacatatttttgatgcacctatcattacaattctacacttaaaaaaatagcttgtattgacaaaaaaagcattagtgagcttattttcaacttaacataataggttaataaataagacaaggattgattttatattttcaactctaatagtatatactacccaatcctatcacttctaaactttatattttcgagtttattgtgtaggttatttcaatatttcattttcatgtttagtcaaaacttaattatatttttgaaaatgtggcacaagtaacctaatgtagcacaagcacttctcaattgggagttacttgtgaagtcgatctcgatcaacttttgcaatgccacatcgttaatttgtgtcgtcctctgaatgagacaaaagtactcatatatttagtaccataaaatatatatttttttttattactattatcgagcattgctatcatacaccagtattatttaatattactataaaatgatgcttttacaagtgattaatgatttttttaaattaaataacgctagcagtgatataacacgtttaggtagtgtttagaacaacaatgacccattctatattcacaccgagattagatataaaatttatttttatattaagaatagaagtagcatttattgacacaaactaattggtgagaaaaccaagcatattttcaactttaataggaccccctctcactaccaactttatgaataggaaaaagattgattttcttttcttctaaacctttggattctaatgaactagtattttcaatactaagagggacctttttcctaccatggtgggttagtacaatttcttttcctttttcattaattaaatatttgatggcttattattattattagttagtgtgtctcttctaagaaagaagcaaaaatgaaagattaagctattcgaaccaatcttggtgggaaagaaagaaaagaaaaagataagttggtgatttcaacaatcattgttatactcatcatatatataaatatttatctatataattttttt

SEQ ID NO: 188308 - DNA, 1463 bp, Cannabis indica
tacacggctctttgaaaagtaatgaaggctctttaagacttaatttgttgtttgcaaattatcgatttcagtgcttttgaaataatcttcaagttattcttgggactgtatcttccatagagaagagggtataatataagaccagggactggagactctattgtttattgtcttgtaaatttactcttactaatgtccatacatacttccaatgcaattgttttttacagaggcatccagaaattcatcttttcgctgctaggctcaaagaacaaagtggggacactgcaggtgctcgtgctgcttatcagcttgtacattctgaaatttcaccagggcttctagaagcaataataaaacatgcaaacatggaacgtcggctggtaaatttttttaattcagttggttaatgttttagcaatttcttcatgtatattttatgtttgacatgtttgattgttttatttctcagggtaatttggaagatgcttattcattattcgaacaagctattgccgttgaaaaaggaaaagaacattcactggcgttacctatgttatttgctcaatattcacggtttgcatacttggtatggtggacaacatgggttaatttatatatcttttttttcttcatttttctctctgcatgcttggctagtcggttggatactagagttattcaattgtgttgatatttatctatatttatttattttttcgagaaagaaatcattacatgtgtttcagctcccgctgttggtcagtcaaaaaattaatgttggcaaattcgtgagtattagaactttttgacagatgttttagtagtttactctaagaaaccaatttgtgtacttgatcgtgttggcacatgcatgctttctaagtttaatcccattgatggtttatcgccaaggtgatgttgacatttgtttttcgttttgtcctaggtatctgggaatgctgtaaaagctagggaaattcttgttgaagcacttgaacatgtccaattgtcaaaacctcttctcgaggtgctctctctgcccccttctttttatgttttagtaataatcagacacaagaagtgctataatgtgttatattttccttctgtgatgtgcaggccctaatacattttgagtcgatacagtcccaaccaaagcaaattgattacctagaatcattggttctgaagttcatagagcccaactctgagacaaccaacgttgcaagtgttgccgaaagagaagagctgtctagcatttttttggaggtatgtgttgaaaactagaaaatactgtaagatgaatgtatcttgaatggcttaatagttggctcagccttgcatccctttgcatttagtgtgctgttagattagaagagacactacatttcagtcattttctttttcactgtaatcatcattatctttgattccatatatcggtttttttttttaaaaaa

SEQ ID NO: 188309 - DNA, 924 bp, Cannabis indica
gttaaatattaccgtcaaatatttattggataaatactctgtacacttgtttatacatgacaataacacattgaagctaatactgtagtaattcaactggtatttaactgttatatttatctgatgcctcaaatttttaaaaacaaataaacataaaccaatttttctaaaaaataataacaggattaagtatataaaatcaaaacataaaaaccctatataataataactaatatgttttaggtgtatattattttataactaataaatttgtaattatttattagtatagatatgtaaattggcaagtttaattaggaaatctcttgtagctgctacacgttaaatccatatattgtggagatgtatctcttgtagccgttatcccctcacagtggccacatttgatcaaaaatcaaccgatccagttgaattccatttcttactgtcagaaattatatattgttcaatattttttttctcttaatttggttataaaatgaatataccctgttgatgaggcttctttgatcatatatttgtttcacagtatacatactaggcaggtcttgattaaaacacatatcttatgttaagtggaggagtcaactggtcaagcagccattaggacttagaaatagaatgggagcactcagatcaaacgactaactttataaattggacatatatagctaaagccatctcaaaatgaaaatagcaaaatgggtcaacggtcagatatattggaatcactatcaacgtcactagtgtcccagtgtcacagcaatttccccaacaagttcgcactcaattcccgtcctttaattaattagttttcccattacccatgtacaacaaccaaaagtataacttattctccatgtatctaaacaactcccattttgatatttttttaacaaccct

SEQ ID NO: 188310 - DNA, 1271 bp, Cannabis indica
tgagcagcatgttgaagatcaccatttatactccttaaactatttgcattggggtgctcctaagatgtggtatggtgtccctgggagagatgcttctaaactagaggaggctatgaaaaagcatttgcctgacctttttgaagagcaacctgacttgcttcataagttggtgcgtaagacaaaattatttatggtactgtataatttggaaaatcctggtctcgaataattaactccatatgtcctctgatcttataaactaagcgaatgacctagaacaggaagctaatgcaacctttataacctttgttctggtattttagaaaaatagcaatatgattttatattgaacactcggagaatgttgaagcaagaaagaatgcctctctttttttaatccctgacttttcttcaacctttcctgacattatttctaataaataaatacaggtcacacagctctctccctccattctgaaatctgagggagttcctgtctacagatgtgttcagaatgctggagattttgttctaacattccctcgagcataccactcagggtttaactgtgggttcaattgtgctgaggcagtcaatgtagctcctgtggactggctgccacatgggcagattgcaatagagctttactctgatcagggaagaaagacttctatttcccatgataaattattacttggtgcagcaagggaagcagtaagagcgcattgggagttaaacttattaaagaagaacacttctgataacttaagatggaaagatgtttgtgggaaggatgggatcttagcaaaatcactcaaggtattttactttcttattcatatgttgataatttacaaaaaagaattcatggtttttggtttgttaggtaatgattcagtatcaaggcttggactattaatttgcttgggaatggaagttttatacggatacattttttgttagatattctactaaaatagtaaggtcaatccacatccactgtttgacttttaaaatcaagtccaaacaggattaacatagtgaacacgtcctggcaatttattctgttctacatacatccaaattataatagatttctgcccacacaattgggggaagcagttgagctatagattgagccaaatctatcccttcaaattcattaaactctaccaatataactacctagcaacccactgttgttcagtacaatactctttgccttttgcaaaccgctaaaatatctaacaaaaatgtatccgtataaaact

SEQ ID NO: 188311 - DNA, 5614 bp, Cannabis indica
aagaagaagaagacccattaatggcttctggtggtaaagcagcttatgctcagcaacaacaacaacaacaacaacaagctcagtcttcaggtacaagtaatatacgagctcaaaatacagagtccatgaacaaagccattgctcagtatacccttgatgctcgactccatgccgcctttgaacaatccggtgagtctggtaagtcttttgactactcaaaatccgttagaaccactacctcaaactcggtgccggcggagaaggaaatcacggcttacttgacgagaatccagagaggtggtcatatccaaccctttgggtgtatgatggccgttgatgaatccacgtttcggatcattggttacagtgagaacgctcgagatttgttgggtctaacccctcaatcagttccaagcctcgaaaagcctgagatcctaactatcggaaccgatatccgtacactcttttctcattcgagctcttcactgctcgagaaggcttttcgagctcgggaaatcacgctcttgaacccagtttggattcattccaagaattctggaaagcccttttatgcgattcttcatcgaatcgatgttgggattgtgattgatttggaacccgcgaggacagaggaccctgctctgtccatagccggagccgtacagtctcagaagcttgctgtaagagcaatttctcacttgcagtctcttcccggtggtgatatcaagctgttgtgtgatactgtagttgggagtgtgagagagcttactggttatgatagggtcatggtttacaagtttcatgaagatgaacatggtgaggttgttgctgagagcaagagggctgatttggaaccctacattgggctgcactatccagccactgatattcctcaggcttccaggttcttgttcaagcagaatcgagttcgaatgatcgttgattgtaatgcctctttggttcgggtaattcaagatgaaggactaatgcagcctctttgcttggtgggttctactcttagagctcctcatggttgtcacactcaatacatggctaatatgggttctatagcttctttagtaatggcggttatcatcaatggaaatgaggaggaagctggtggtggtaggaacactatgaagctttggggtcttgttgtttgtcatcatacttcagctcggagcataccgttccctttaaggtatgcttgtgagtttcttatgcaagcttttggactccagttgaatatggagttgcaattggcttgtcagttgtctgaaaaacatgttcttaggactcaaactttgttgtgtgatatgcttcttcgtgattctcctactgggattgttactcaaagtcctagcattatggacttggtgaagtgtgatggtgcagcactgtattaccaagggaagtattatccacttggtgttaccccaactgaagctcagataaaggacattgtggaatggttgttggctcaccatggagactcaactggtttgagtacagacagtttggctgatgcagggtatcctggtgcagcaatgcttggtgatgaagtttgtggtatggctgttgcttctatcacaaaaaaagattttcttttttggttcagatcccacactgctaaggaggtcaaatggggtggtgcaaagcaccatcccgaggacaaggatgatggacagaggatgcatcctcgttcttccttcaaggcgtttctggaagtggtgaaaagccgtagtttaccttgggagaatgcagaaatggatgcaattcactctttgcagcttattctgcgagattcatttagggatgccaaggcaagtaattctaaggctgttgtaaaggcccaggttgagggggatatggagttgcacgggattgatgaactaagttcggttgcaagagaaatggttaggttgattgagactgcaactgctcctatacttgctgttgatgttgatggccgtataaatgggtggaatgctaaggttgcagagttgacaggactctctacagatgatgctattgggagatctttggtccatgatcttgtttataaggaatccaaagaaactgttgaagaactccttaacagtgctttagaaggtagtttaattgtcttttgtctcatttattgctgaattccagaggttatatcaaacaatagagtagagtcaagattcttttatataaattgttttctactaaaagttcaattctttatatgatgatcttttttcttggaagtaaacttttatgttaccaaaaaaagccatgtaaattaaataaggagaaaaaaaaataagctatatcaatttgacagatttgttttataaattaaatgatctccctctcattcgtacaatagaacagcattgtgctcattttgtcacataatgttttgttatgcaggaaaagaagataagaatatagagataaagatgagaacatttggcccggaacaccataatgatcctgtttttttggtggttaatgcttgctctagcagggattttacaaacaatatagttggtgtttgctttgttggtcaggatgttactggtcagaaagttgtcatggacaaattcattaaattacaaggcgattacaaggcaatagttcacaatcccaatcctctgattcctcccatatttgcatcagatgataacacatgttgttcagaatggaatactgctatggaaaagctcactggatggactaaagaagaagtcaatgggaaaatgttggttggggagatctttggcagttgttgtcggctcaagggtccggatactttgacaaagttcatgattgtactgcacagtgccattggagggaaggatgcagacaaatttcccttttcattcttcgatcgaaatggaacattcgtacaagttctcttgacagcaaataagagagttaatagtggagggtcaagtgattggagctttctgcttcttgcaaattgctagtcctgagttgcagcaagctcttcaagttcagaggcaacaggagaagaaagatttttctagggtgaaagagttggcttacatttgtcaggaaataaaaaatccattaaatggcatccgcttcactaactcactcttggaatcaaccgaattaacagaagatcaaaggcagtttcttgagactagtgctgcttgcgagaagcaaatgttgaagatcgtaagagatgttgatctggatagtattgagcatgggtgagttttttactacacaacttatctgtttctttattgacaaagcaatgttcttcattatagttatcaatttctcgcaaacaagtatctttggaatccttaactagtttttctgatatgtgattcactgatctgttagaactttgtgtcaatttatggtgttgtactgtttggatccaagtagaggattactttggctttttacttttgttgataaatgtaaattcaattgccacacattttccagggagatggggaaaatctttcctgtattaccatttatatgttgctgttgagtctgtagttgtaagattacatcttttggggatatgagcttccagatactttttcaatagagagagcctcaatcttatatgttctaattttattttgaagtagttcattggagcttgagaaggcggaatttctacttggaagtgtaataaatgctgttgttagccaagtaatgatgctgctaagggaaaggagtctacagcttattcgagatatcccagaagaaatcaaaacagtgacagtttatggtgatcaggtgagaattcaacaggtattggctgaattcctactgaatatggtgcgttatgcgccagctgaaggctgggtggagattcttgttcgtcctagcttgaagaacggtccagatgaccagactctacttcatactgaagttacaggtaaaaattatgagctctaatcattcagcagcacatgtaattagagtaaaacagaatagcatctaataatactgtcctggagtctcatattggtaacaataaatatcttattatcatcattaacatttacaaaaattgtatgttgcgttatggcaaaaggaatggtatgccccggggaacgggccgtgcctcctgagctggttcaggacatgttccacagcagtagatggatgactcaggaggggttagggcctgagcatgtgcaggaagatttaaaaagctcatggaaagtgaagttcagtatatcagagaatcagagagatgttatttcttgattgttcttgaacttccaattcgtcgaagagccttaaagagtattcttgactaagttattgacacataatattaataagctcacttatacttctttgtcttacctacccctgaggatgatttttgatagctagttacagatcaaacttgaactgaagcaaactgatttggatcaagctattgatattctacttgttttggcttgctatattcatcctagctggtgtgggctcacaaggactaaatcaccaactccccctcatgtaatatagctgattatttttcagtataagtgcagtctttgagaactacttaatgtaaaccaataccatatgctaatttggtggtgtacaatcatttgttttttcccatcaaggaggaccaagtagttgtcatctgagtttgtctttgaaactttaaaaaagactgaaggattttgcagattcagactcaaaaaccagattctggtgcatcatctttcatcgacaaacatgtattctacctaaataatttgtaatatttattatcgagtttcgaaatagctggtacatttttgctctcttctgagttacaccctcagaagctagctctccctccttttgtaaatttcagcttactatggaaataaaataccactattttgtgcattgaaactaattactcactaatgattataacaattgctcttatattcaatatgagatcctcttgttgtgttttgtgtcttttgtttttattgcagctcaatctctgaggtcccagttgtacaagctcattttggtgtctccttaatgactttatgtcattctgctcatttttggaaggtgggtaatcattaactgataatattttccatttaagttcatttcactgtgcataatcatattgttgagtagtagtagtagtagttccaaggatccatgataaacagaaatggtcttttttttcctgttctattatatatagaaataaatgtaaaggattttgattgtttactttaatgtatttatcattcttttttttcttttgatataataaagttttcttgtttgcatatgtattttttttccctctatgtgctgtcccagctgttggttagtgaagtatgactgttccattcaaaaaaataaagtcttttggattcatggttattaccaaaacacaaaccaaaagggagaaaataaaaaaaaagaaagaaaattcacaccattctcaattagaaatgatggagtaaatggtattaattattcttatatttaaattgaaaaaggaagaaataaaaaataaaaacatagtttatgaagaagatattatctgcatgtgtgggcttaaataagtgacaagaagaaccaatgaacttag

SEQ ID NO: 188312 - DNA, 2068 bp, Cannabis indica
tttaaaaaaaaaaaattgaaattgtgtatatatcaagatctcttagtatatagtaactttagcattatcataaatcataatcataataacaatcacggaaaatacatataacataagctactatgatcttaataatatccagataagaaagaccaaaaaagaagaaactttctaaaactctgattaaagggtataaatatatatgatctatgcaaacctagagccattatgccatatatagatatatgcttatgctttacaactttaagaatctctaaacagtaaaaaatagctagtcaaaatatatctaactttatgtttgaatgcaataattgaattgaacctataataaaaccatagatagtacatatatagcattgcttttgtctttgatgaatcttttattttcctttagtggtataaattaaattcaaaactttattgccacctaaaatggtgacaaatagaacttatattattggactgataagtactatacatataatataatgtaataattaaggcatataattgtgcacccatgcatgaacttagtcagtcacacagcacacagtgacctacacctaagtgtatggtgtttctttggaagattgagaccagaccaaggctcaatgggccggttgggacggtgctctatgtgcttaattaacatgatcatcatcatcatcgtaatataatatacaagaaaaaaattataaagtttgtatttataatggtgtggatatttctaagtttttttggaaaattttaaatcatatagcgttaaaaataaagttcaagcattcagattcgaacattcaattactcgtgtatatatatttttgggtaaattctattttggatgctgtgtttttcaaaagttacagattgaacattctattttgttaaatggcaaaatagactctatactttttaaaatagtacaaatatgacactgagtttaatttttgacaacttttttttttttaatataatcaacttgaagacaattcctaacacgaacaaatatagaaaatttaaccagttttttcataacacctctaagtcagattattattaagtttgattttcacaaaaaatcagtttaggatcctatttgtactaatttagaaaatacagtgtacattttgttatttaacataagagagggtccaatttataacttttgcaaaacaaaaggtctaaaataatatttaccttatatttttatacacatacaattgattattttttcatatcgtaaattatatataattcaggatagaatgtctaatataagtacaatatatatcatcatataaataaattatattttcataaatatttaaaagagtaaaaataaaattacaaaaatacggttttataaaattttaaatatgtttacgatttatatataagaattttttttttacatacgaactattgatatttttcatattgttattttcttattatttatatgttgttttctatttattttcatgttgtttcatgttattttcataggacacttaaagattataattaaaaataaataaaaaaaaatgtaaaataaaaaaaaaatcttgtaaaaatatatataaaaaattatttgacagtaaaaatattaaaattttgcgaaaaataatattttaagtaatttttttaaaaaaatatattatatattaactttttcaaatgccaaaaataaacatatccggacaaaaatacaccctaataaaatatagatgcacttatatagataattactctacaaaattaaacatatatatgtattgttagttcaaaatttttaggactatcactaatgattgtaacacatttaaattgcacaaactatcaacatataataatttgtgatttttttttgctctgataccatattataattttatataagttgaatggggttacatttcaaaattatttggcaatggcaagagtagcccattcctcttatatattctattatttttccacacattagtaatgtgggactatctaataatatcaaacacaatatttacccagggccggccctaggcat

SEQ ID NO: 188313 - DNA, 2984 bp, Cannabis indica
ttttccattgtgaacaaaatgaaactgatttcgttgagctaagagctgaggattgaagaaccacaatatgattcaattcaattccagtaatgattcaatttgatcttggtatttttatcataggcgtggaccctttgaacttttgtgaatgaccaacatctgagtcttaatcatctataaagacaagcagtgatattttagaattgggttttggacagtttcacaagttggtaaaacaatgaggcagagaaacaaagctgtgtttactggaaacccaaatttacatggttccctttcagagaaaacagaggaggatcaagacttcagtccctcctcactctcacccagaagagtattcgcaatctgtttggcttttcgattcgtaaatgctcttttggtgcagacttatttcaacccagatgagcattggcaagcccttgaagttgctcaccgaattgcatttgggtatttctggttttacattgtttatatgttgtttcttacttttgagtcaataggggtattgtttttgttcttatttttgttttgtttttttctctagatatggtcatttgacgtgggaatggaagaagggtattcgtagctatttgcatccattgatatttgctttgttttacaaagttctggccttgctgggattggatactcctttgttcatggtaaatgatgtcttctaaagtaacatctaatagttagatttcattaggttatgtttcatgacaatgaattgatgataattaggttgttgtatcctgcattatttttcacattggactgcttttgctcaactatagtgcgttatttatgatattttgaagttgtaattacatgcttaactcaatgttttgtagataaaggctccaaggttgctgcaatccatgttttctgctgtaggtgatttgtatatgtacaaattatctgttattgtttttggtgagcgtgttgccaaatggactgtatccttctgcatataatcttatatagagctttacatcattttttgttcttactatttactaaagacaacagttttagacaccaagagtttttttatatgaaatgtaccacgtacttaactgtcttttagctctttgcccaattgacgaattggttcatgtttttctgtatcacccgtacattgtcgaataccttagaaactattcttacccttgttagcctgtactactggccttgtttgcgaccatcttccaacaaacttcccttgatgtcaaggaagtggggtttggctatggcagcgttagcttgtggtatacgaccaacgagtgctattatttggctgtacgtaggccttcttgagctatacgagacgcgtgatagactcagattcatttttctggaagtggctccaattgggtaggtactaatccatctttatttaatataattttgactattttaccgatttatcgtttgcaacttgtactagcagtagctaagaagaatgttttttctgagcaaatatgtacttggaaatgaagtttaaatataggatgaaccagttattgagtataaatagatgattgaaacataaaagaaaaggaagcaacaactttagaaagctaacagatcaactgagatactgtttgatttattagagtcttccttgagatactgtttgtataaaccatctacctatatctctgttcttctagacacatttggaagacaatggatgcattacaataattctattactcaagtaagttagattatccaaacaccagcaatagtctttattacagttattgcagaagtagatagctttagtggactgggcagtacaaaattcttggcaaccttcaacatgcaaattcatttagtggtatgttggtttttatgtggagtttataatatttgcttggttttctatttggctaatatgtcagggtcttggtgcttgggcttacatctattttggatcgattgatgtatggttcatggataatagtacctcttaattttctaaagttcaattttctttcctctggtggagattattatggaactcacaagtggcattggtacttcagtcaaggatttactgtcatgctctttactttcttaccattctcaattgctggaattatgcagtccaaaaaatggaagctttctggtcttatagcatgggttttaggactttacagtgtgctgggtcacaaagaattcaggtctgtataccttatatataaatatataatatacatatttatttcttaagcattgtttttgtaaaatgaacaattttgaccattggtttataattctcattcccctactctgagtgttacagatttgtcctgcctgtgcttcctatagccttgatgttttctggatattcattagctagaataagcatatcagattctcccaatggtaaaaggaagggttcttcaaatatttctagcaaatggcctcgaaaaatgctcttagccatattcttcttgctagctaccaatattccaatggccttgtatatgagtttgtatcatcaggtacagtttttttctctcttttatggacatctttgtatttgttaattctgtaataacaattgttattattcttttgggcaacataccaccattaccagctttagttttaagttaacttccactttcaatgtctaattgtcaataattattcaagcataaaagatttctaagtaatcgttgaaagttgtcttctgctcgggttatttgtacttttctgatatgtgcatgttagacagagaggaactgaggatgtaatgaactatttatcgaaagaggcgctcaaccaaaaagttgaaagtatccttttcctaatgccctgtcatgcaacaccttactactccaccctgcaccgcaatataccaatgcgttttctggactgcactccaaggtttgatttcttactatttgcacaacgggcatgcttttccctcgtaactcagatttagttta

SEQ ID NO: 188314 - DNA, 4485 bp, Cannabis indica
actgtcttcttactgctgtaaaagtaagtccattcttactcctgtggtactccttggtagttgggatgtccttatatgtagcctcattttctttttgagcttatttttttttattatagtttgctttaccatgggataagacttatgtggcttcttcacaggttctaatgaacttgacaaatgacaatcctgttggctgtcagcaaattgctgcctgtggaggactcgagataatgtgctccttgattgctggccacttcccttcatttagctcgtcttcatctctttccaaggagataaaaacgaatggttcacctgttgatgttgataatcgtttaagtgatcaagaactagattttcttgttgctattttgggccttctcgtgaacttggtagagaaggacggtcaaaacaggttattcttctaatcattttttgaggtttttttaaatgccatattgtttctaatgaacattgtttggtttaaaaaagttagattctcacaacttttgtgtgtaaattaaaattaaaatgttttctgccaattgaagctttcgattatatttttttccacagatcacggcttgcatcagccagtgtacaattgcataaatcagaaggttttaaagagctgactagcaaggatgtaattcctctactctgctccatctttttggccaaccaaggagcaggcgaggtggcccaggaagagaaatgtttgcaagaggtgagtaacatatttttgccgaatttagaaacgttaaaatgtactggggtgcctcggttcaaaaagacttgagcagaatgcatttccttattcgggtattcacatgttcttgcatttcttacagaatgacgaggttgaagcagcactggtgcaaggagaaaaagaagccgaaaaaatgatagttgaagcttatgcagcattgcttctagcattcctatctacagaaaggtttgtctcgtctcggtctttttcccctttccccttattcagctcttttaaacatattctcaatgcaaagtttgtttggtatctaatacagtaagagcatacgggactctatagccgactgtctcccggatcacaacttgtcgattgttgtccctgttctcgacagatttgtggtaagagtttgttttaattttgtggcaatcaaacagtcataaatggcacattagaatatagatatcgaattgaatatcttttttcctgtttgtgtgaatattaggcattccatttgtcattaaacatgatatccccggagactcataaagcagtgagcgaagtaatcgaatcgtgtaggataccctgagaaaacttcttgagattctgtacagactcttacccttcatattcccgaatacaactctttcgttgttacgagaaacgaccaccagagatttgggtctgttgcatcataattcgtataagatttgaccaatcctgtgttaattacagtctagttgacatgtgttccctcttcttcttcttctctttataatttttgtatctttttctatttcattcttttgtagggtcttttttttgggggggtttctcaccaatttgatgaggaaggagatattattgtatacaaaaatgatagcataaaaaaagccaatgcaaaatgtaatttgtgtttgtattaacccttttttcttttcatgagcaaaatatattgaatgaaaggggaagacaggtggttttgaagctgagcattgttggttaaacccgaaaagaaaacctttcgattcggggatggggatgaatgagggtttttcggtttctttcaatcttaatgtgcaacaatgaaagatttgattattagggtttttttacattggtaggaaatagtaatgaggaaatgggagttaatgttgaagtgaaagtagttgaaaaaatttaaccataaataattacaatccaaatttgaatgtttagtagttggtattaagggtttttttcattggtactaattaggaaatgggagttaatattgaagatatagtagaaagtagttgagaaaaaattaaccataaataattacaatccaagattgaaagtttgggagttggtatttagtaggtaggcaagggcatttatttgttgttgttactattatcatttattgttgcataaagttgagtcatctcttatgtcacacacatcttgtgtaggtttttattataaaatgtgttcattacaacataaaatagaaattgagacataataaaattctaagtctattagatttgaacatggtcttttaggaaggtgatgaggaattggttcactttgtttgggaattgctcttgcatgaaatgagttccatcttccaaaaacttaatctccaaaccaccaacatgataatccttcaatttctcactcttcacatgctcctctattcccggaaacttaagaaaatagtcttttcctcccattatcaacattcttggaacttcgattcttggattacttattttgaattcgtgtcgttccctttgcaatgcaaataagaatagtttgattaagacaaaatgatatagaaaaatttagtgatatctagaatgatcgaatataaatgataagcttacttgtaaggaatttgcattggagaatcaaatccagaattttgatataacgtagtataaatttcgagatcatcttgggttagccaaggaggaagaggtgtgttagttaagtccaccaaatccataatctctttatctttacttgctataggaatttcaggtctagagaagagaatatatattttgcttaaaattgttttcacatcaaaacgagcaaaatcagcttcagctcttccagattcctgtaatcatatatcaaaattcaaaactcttattatgtcaaattcaagtataaaaaaagtgtgaacaaataagatttgaaccatcagtatcgagtgtgtctggaaagttattttgtaaacaattatcaaaaagatattatactaatacaaagtgattataaaaaagcgaggctatttttgctaaccttccaccgggacaagtagaaaccttccgaaaagttcttgtagcgttgaggattaggaagaaggaaaggtacaccgagtgatatgactccggcaacccttgttggatgagttagacaaaatagataggcaacccatgatccaaagtcctttcctactaaaacaacctgtttaaccaatgataataaccaataaaaataataagaagaaatacaatagaactagaagcaaacattgatccatattccatacttagtaaataatgggggatcaaattataatgcttttataagttgtagtctttataaatttatgttcttttatttctatactcttatgtattttaaaactaagttaataagatgtaaaaacatatggaaaaagtgaattttgttttgtgaaagtacattttgtggtctccataactattggaccaagactttattaatctaacacttagaagcctaaatgaattaaaccgagtttaaagtacattttaccaccctaacggcgaattcaaaatttaaagagagaggaacataatttatattaagataggaacaaaagtaaatttgaaaagaagaaaaaagtgttcttagtgagatttgaaccattacaccaaagctaatattatatttataaatatatatcgtaactaactaaaatacatatacatttttttctcgatttttttagagggtaactttcctcctcgctttctagtgggtccgcccctgcaccaccccaatcaaaatacacaaaacaaaaataatgttgaaaaattcaaatttaataagacaagatcctacactaacactcacacacatgcattttaaaaaatatatatatatatacataatatttatataaatagtagctttaattaccttatcaaagttgaaaaactcaagaattgaaagtatgtcatctacaaattgatagaaagatgggtttgaatttgagtttgattttgaagttgatgataggccatagccactcaaatctaatgcaattgaatggtaatcaaattgagcaagtgcaaccatttggtgcctccatgagtaccatatttctggaaatccatggatgaatatcaccactttactacaccctatcacaacacaaaacaaatacacataattaaatcacatatatataaatatatatatattatattatataagaaaaaagaagaagatgattttgttaaaattaaataatttttgataataccatttccaatctcagctatgtgaagctttgctcctccttttgcatctatgtacttgtgttcaatctcatccatctttgaacaaagaaagagaaaaaatagagagagagagagagagagagttgactaatctatatatatatttaaattaatttgtattttttttatctttaattttgatacattactataatttaaaaaagttatttgggatttattgaaaggatattttat

SEQ ID NO: 188315 - DNA, 1869 bp, Cannabis indica
agtctgtaaatgcaaaacaagaagaatagtagacaataaactaaaccaatacccaagctgacaataaacaatgaatcggacaaaagcagattcttaccaaaataattgatcagattctttagaatacacagttcgtagagagagggggggagaaagcacaacaacaaaaccctgaagatgcctctatattaccctggtctgtctattcaatgttgaaaaagaaaacaaaaaaataaataagtaaactttctttatatgaagtaaaagaaagcaacttacatatacttctctggactaatgtaaaatattgaacaatagcttaagatatgcctcaagtgtgcaattgttcactgatcaaccccatgtataaatctcgtatgtacatcagtcattgaaattatgtcacctaaagtatcagatgtctctatatgggactctacagtagtttcactgaggaggttacacttgtttcctcattcatcctgtgatagagaagctttgtaccccctaagcagtcaacaattcggacaaaagagaccgatgcttcattgactaaagaagaccatctaagagtctcaatcattcgtccatggaacttgattcaaagtccttattagtctcaggcatgttagctttattctcaagttcctgtttttccagctccaaatagtaaatcttgtcattcataccttcctttctataagcatcaaccattatagagtaagttgttaaatttggtacgcattccttgtctttcatccgctgaaataccctttccatctctatcaaatcatcggcctttgcacacgctgatatcaccgcattataaaacgaagtattctcaggtatcccaaactttccagccaacttaacactgctgattaccttatggaagaggcctgcattagcataaccattaataaggcagcagaatgtttttgtgtctggtttcataccttctgcacgcatctgatcgaatgtgcattccatgtgttttgcatctccaacatcagcaaacgcctcaattacgttgttgtaagttgaggtcgtccaaggaaattgaagcttccgcatatactccatcacagatgacattttatcatacattcgtttcttcccataagcaccaatcaatatattaaaagtgcgtgtttctggttcaatcccaaagttacggaacttttcataccatctttccatcatttcaatctggcccatgtttccaaacacactgatgataatgttcattgtccaaacatcaggcttacaacttgtgctctccagcatacctgacaacactttctccatctgctcaaatttcccagccctgccatatccactcaacactatgttctgggtgactgtgttaggactaatttgtcgttcgttcatttcttcatacaaggactcaactaactcatactgtgaagaatcaatgctggcctttatcaaggtactataagtaaaaacatcaggctggcagttgggaagggttttcatcttgtttaaaatagagaatgcctcatcaataagattgtttcgacaataagcttgaagtaaggctgtatacagttcagcagtggggtctaattcttcttccaccatagtttcaaaaagcttacgagcatgatggggttgcccagatcttccaaggagaaccaaaagtttcatgtaagtcccttctttagggtgatagaaaggctgttctctgagcatgtcaaacacctaaaaaccaaataccaataactactttttcatcactcatttaaggataaaaaaaaaggaaaaagctaataaagcccaaaatctaattttatagttctagataaattcctatgacaaaaagtggcagaaataatagagctagtg

SEQ ID NO: 188316 - DNA, 2526 bp, Cannabis indica
gtgatttttcattatcacacactataaatcttttgtaatattatacttattcattacttttttcacctgttgactttttctaactcatatattttattatttaaaaataaattagatctgttaaacaaaggcaatcatttaaccataaaaaatgattatttctcacctttaaattctaagtaactcttcttattttcaagttgtgtttttttcaaatcaaacagccatgaaatactattattattattattactactactttgttattgttttgatcataagagtcaacttaatctatggtcaacaatattatgacccaaatgattgttcttcaaatgtaaccaatcaaggtacaagatatacatgtaatcatttatctcaagattcatgcaaaacatttcttgtgtatagagctaaccaaaaatttcaggcaatttcaacaatctcagctttgtttaatctcaacactaatgatttacttcacttaaacaatctcacatcttcatttgagttactcaaaacaggtagagatgttcttattcccataaattgttcttgtttgggtcaattttttcagtcaaattttagctacacacctcttcaaaacacatcactaatagaaattgcttgtggggtttttaatgggttagtgaaaaggattactctttacttagaaaatccatttggaacaagaaattatgtcaaagctggttcaaatattcacttgccattaaattgtgcttgtcctgataatttgactagtcttaaaggaataaagtatttggtaacataccctttaattgaaggtgataaaacaagtgatttgattaggaaatttggtgtttcacttaatgatttatctgaaattaatcatttgggaaatggagagccaactatttttacaagtacaactattttagttcctttaagagttgattcaatcataaatttaagtatcccaagtttcacacatggaccatccccacctcctaattttcttccaatttcaaaaaaaccaattgaaagttcaatacaaaggaaggtgttgtttatagttggatgtgttattgggatatttctactacttttgttattggtaacttgtgctatttattatataagagcctttatgaaaatgaagaaagggaataataacaacaagtaccattccttcactactccaatctcttcttctacttgtttatctcctgattttcttgttgggataaaattttctttgttaagttatagtatggaagagattaagagggctacaagggatttttgtgaagagaataaggtttgttctcaagtctacaaaggtaacatggatgatcataatgttaatgtgattgttaagaagatgagatttgaagaaactcgccctgttattgatctacactcgaaaatcaatcacatcaacattgttaagttacttggtgtttgttatggagaaagtgatgatgatttttcatggtgttatgttgtgtttgagtaccctacaaaagggtgtttaagagattgtttaactaatcaaacaactcctcttaaatggcatcaaaggacacaaatcgcctttgatatagctaccggtcttcattacttaaactttgtacatttccttcttatgctcatatgaatttgcatagtagaaacatttttgttacatcaaattgtagagcaaagcttggtgacataggttcaactccttttggtgcatcttctaagggaaattattgcaacaaccgaagtgttcgggccccagagtaccttccacagagcttggaatcagataagattgacatatttgcatttgggattgttcttcttgagctcatttcaggtagagagtgttgtgaggagaaatcatttagagaatccattagattcttgggaggtagtggagatagtagtgatcatagtgaaggtggttgctttgaacaactcaagtgtttcatggatccatctcttaaacacgattattctcttgctgaaactttgtgtttggctgttttagccaaggcttgtgtggaagatgaccctttacataggccatctatggaggatatcatcaaagttcttgcaagaatggtgtattcattctagtaatgtaaaaaaaaaaagttactagtaactagtcactcattcatcattgtaacttaattaaacatatatgaatacatgtatatgatttcaagaagtatctttagttcctttcttgctttccagtttagattctgcataaatatagtgtgttcaagtgaattaggggtcaaaattgaacatatcaaacttttttgtccaaatttttagatttgttgttgactttttcataatttcaattagtgatctttattatgaagtattagttctaccaatttattttgtttactcctagagcaacttcaaccataacactataattatgttggtttaaactcaaaaaaaaatataaatttttagctttcaattagttttcaaaatttccaaccatcaacactagaaagttacaaaaaaaaaaaaaaa

SEQ ID NO: 188317 - DNA, 6436 bp, Cannabis indica
aataaaatttaatattttggctctaaaaaaaaacctagtaaatcttacatacacaccacaccagaccaagtacggccaagtcggccacgtttgagtttgaatagtaatactactttactaatcaaacgacagaatcaaaacaaactctgtactcttgtaccctgtgatgtgtagtagtagcagtagtagtatagtgcaactgcaacacataactacatagaccttattctcatcatttccacctcaaatcaatattcagctcaagcttttgcttttttcagtttcattcttcttttctttatatttactgtaacaaacaaaagtttacacacacagagtgaacaaggaagttcacaatgagccattgtacaatcaatcattgtaagtatgacccttttctccttcaccctctattcctctaaagccaacacctttccattccaaggaccaacaaaggcctcttctttgaagctccgttcatggggtccgactcaatttgcttgattttgatattgggggctggaccgattgtgattggcccaatttgtgagttcgattactcaggtactcaagcttgtaaggctttaaaagaagagggttacgaagtgattttgattcattccaatcctgaccttgctgaccggacttacattactccgatgactccggaattggtggaacaagttcttgaaaaatattgggttgagttgattggagctaagcttgaagctgttaagaaagctgaggatagagagttgtttaaggaagcaatgaagaacattgggcataaagactctaaaaactctaccttcaggattgggacgactcttgatgattgcattgaaattgcttatgggattggtgagtttcctttgatcattaggcatgcttttacattgggtggttcttgtggtgggattgcttataatagggagcaatttgagaccatttgtaaagcagggcttaatgctagtttgactactcaactttaaatctttgttgggttggaaggaacatgagcttgaagttatgaaagctttggatgacaatgtggttatcatttgttctaattggagttcatattggggagtctattactgttgctccagctcaaactttgattgataaggagtatcagaggttgagagactactcggtagcgataattcggagttgaatgtggtggttctaatgtgcagtttgctgttaatccggttgatggtgattgagatgaacccgcgagtgtcttgctcatcggctttggcatctaaggctactggttttcctattgcaaagatggctgctaagttatcacttggttattcattggatcagattccaaatgacattacaaggaagacacctgctagttttgagccttccatagattatgtggtgacaaaggcaagtataatttcttgtttttatacatgtgtgtgtactttatgtacataaacagtttcactttgctgctaacagaaatagtttcaatatagtctatttagttctggtactttgttgtggatgataaatgtgtttatatttatatatataacttactgcaaactagaacttgtaattgtctttgtgctgcaatgacaatgattgtctttttggtttcatagtagagtggactctgtttaggcatagttaaacttgtaagtttgtaggagatggtgatatgtagttcttattttgaaattagacagtataatggcagagttaagcctcatttttcacactgaaaatgttagttaattgttgttcgatgatatacacaaatctgtttttcttcttcttattaattaatatatattcttcatttttttcagttgtgttcattagctcccatggttggtacattgaataataaatatagaagaaaacacaaacggatatctgattataaatgtatattattagttttgatctctcataagaatattgcattagtttataagctatgtgttgtgttttatattcttcatgggcatcttgaattggtcttttctgcatggtaggactgaaattgtcaatatacttgctaacaaggcatctttttaaccataatgaagcaatgacttattttcatattgttatttatttttacttatttttctctaatgttcatcaggcagatccctcggtttgcgtttgaaaaagtttcctggttcacagccaatactgacgacacaaatgaaatctgttggtgaatcaatggcattaagccgaacattccaagaattctttcagaaagtagtgagatctttggaatgtggccactctgattgggacttgaaccaattgaagtatcgcttacatgttcctaacccagaccgaattcatgctgtatatgctgccatgactaagggaatgaagatagatgacattcatgaactgagttaggaacagttccttttggctcggagcttgtctaatctaacacaggaagatttgtatgaagtgaaaagaagagggttcagtgataaacagattgcttttgccaccaagtcgactgagacagaagttcagcagactaggctgtctctaggtgttggtccagcatacaagcgagtgaatacctgtgcccgctgagtttgaagctgatactccttacatgtcttcatatgattttgagtgtgaatcagctcccacccaaagcaagaaggttttgattcttggtggtagaccgaatcgaattggtcaggggattgaatttgactactgctgctgccacacatcctttgcccttcaggtttgtgctcttttttcgattatgtttgtttattttgacatttttttttaaagaaaaaaataagtagagaaatattccttatgacttttggttctatctgattgtgtaaaatgttttgtttgttcttttatccttttcacaaaacaggttatgagacaattatgatgaattcaaatcccgaaacagtttctacagattatgacacgagtgatcgtctgaaccactggccgttgaagatgtgctaaacattattgctttggaacgtcctagatgaacacaagcttaaatgtgctagtggtgatgggaatttacgcatttggggtacggcactggattcaatagatgcagcaaaggacagagaaaggtttaatgcaattcttaaggaattaaaagttgaacagccgaaaggaggaattgccaaaagtgaagctgatatgtttagggtggtcaggctatggaaattgtctgtaatgacgaaaaacttgtgacctaccttgaaaatgctgtaaaggtcgacccagaacttcccgtgcttattgacaagtatttgtcaaataccattgagatcgatgttgatgcacttgctgacttatggaaatgctgtcattggtggaataatggagcacattgagcaagctggggttcattctggtgacttatggaaatgctgtcattggtggaataatggagcacatcttcttgcttggagacaatcaggacatggactatacaattggctaagagacttaatgtgtgtggcctcatgaattgtcagtatgccattacagtgtctggagatgtgttcttacttgaggcaaatcctcgtgtttctcgcacagttccttttgtgtccaaggcgattggacatctgttggctaaatttgattcacttgttatgtcttgaaagtctctttatgacttaaatttcacaaaagaggtagtccctgctcacatgtcagtaaaggaagctgttcttccattcgaaaagtttcaaggttgtgatgtattactagggcccgagatgttgattatgaatttcccattgcatttgccaccactatttgacaaaacctcatctggaaaggataataaaggcgttccaaggcctcggatttaagattgtttcaacttcaggaacagctcatgtccttgaattatcaggcatcccagtgtggaacgagttctaaagtcgcacgagagggtcgaccgcatgctggtgatatggtatcaaatgggcaaatccagttaatggtaatcacaagttcaggtgatgcattagatcagatcgatggacgacagctgagaagaatggctctagcttacaaggttcttggcaatcaagagtttgaagactaacaccattaagatgattgcgcttcaagacttcttcaatgtcgagtccgaaactgccaacagtagtaagtgataactgaatcccttcctaaattggtaaaaaagacatttagtttattttgttgtctcaacttaatttgcctaaatgaatgtattcgatttgcaactaaagtcctacattagctagaaatagaaaaaattataagtatataaggatgaacactatctccattagtatgaagcttttcgggaaggtgtccaagaataaaaccgtgagagcttaggcctaaaacggacaatataatcagttaatcacttttgagttaaaggtgatctatattgggtctttgttcttacattttttgctagaagagattgttgttaattcttaaataagtatattttaattagcaattatggtctataatttgttttaggataatgtgaagtgtaagcaaaagactattattataatgacactatgcttcctaatctcattctctactacattagaaagtggtcaatccaaacctacctcaactaaattagcaggactttccagagacttagagaatgacaattaattattggtgccattttgtagttaattattaggataatgctgttggttggtatgtgaatatagaataaactatactataaattagtgccacgtgtacacacctaaatcttttcttaagggttctaactattttttgcctgtttacatacctaaatcttttactttgattaaattttagctgaacagtatttagttatcgttgaaaatttgttttgtgtctttttacctactctttttttgatgttccatttccataatcccaacccttttaacgacagttattactgttacttggttagaagtaagaatgtgaattatttattgagcattgttattgggacaccagtagtgtccagtactttttataggcgacgttttaaattttttaaaagttattttttttaagttatatgggtatgacacgcaataattataccttttaagaattctcttatttattactcaaatgaagaaagctttaaagagagaatgtttattctttctttctactttggcacatgtctttgattttagtggcaaattttgcctctgttttcctttaccccataacatgatatatatttatatatacatatatttatagaaatatgctccacaaattcaaaaaataagcctgttcttggatatgcccattaacacattttcttcaagaggaaaatgacacttgtccaaagtgggctcaaacttcctccactcaagagctcaaaactactattaacacataccaatttgaagggcttaaagtcattgatagtggaaacatagcaagaattttaggatcatatatacatataaagatatctatatatttatatattatataagattactcttagcggtcttagtgggaaactggttgtagcaagggataaaaaaaccgtgtggacctttttttttcttcattgaaaccaaactgatgtgctatagaaataggaagccaaagatcaaagaatctctagaaagaatagaaaataaaaaaaatgacaacttgcagccatttgaggatgattttataattaatttgaaattattgtacatttttcagttcaaaatccactaaacagagtcagttcatttcagttgttcttccactcttaattgatgatataactcaattatgttacattctctgcacattaatgaagtgtataaaaaagtttgaaatttctgggtcaaagtcttctgaattggtcatggcattaatatttgtaataaaacagattaccccttaatgggggagaagtataacaaggactgcataacagtttttgatgatgatttgaatttaattctttattattattaattatgagaaaaagttgtaagtagaagaagggtattgaaagaaagagaccattgaattgaattgaattgaaactgatcaaaatgatcaattgatgagtgatctaagtactagtgccgtattagtctagtgcacttgtataagtatagtattatattattgattatagccaccactaccatcaccacaaacactatccatgaccattcaaacttgaattttgattaggacgtttgtaaatgttagccatgactacaacattttgccaatatgcaaactcaccttttttctttcattattacttttctttttataactatgattatcaatgtgtatagatagtttataagagtgctaattacaatttcataatcaatttttatactttgaaattacatattggtaatattttttttttcat

SEQ ID NO: 188318 - DNA, 2917 bp, Cannabis indica
aaatatatataataataattaatcacataatttgaacatacatctatataatatttcataataaatagtaagatatatgtacaactattttagcacaaatgcatggatgggtggaattgtttttcctttttatgttttttcaaaaattatggcgcagtgagtcattttaccagaactctcttttgtaaaataataaattaaatcatataaaataatatcttgagttcagcttgtagattattattgaaatagagaatcttaaattgttttttaataaaatagagattctagtaaacagcattgctatttggtacaagtggtatctaacacttttagatatgtagccttgcgattgactcacaatactccttaaataaatactccttaaatattattatattaaattatatgaaatttgatatttaattagaccaatagcgataataacacataagaaaatacaaaatacatacttttaacatttctctttttttaaaaggtattcttcattatttccaagttatataattacaaaaataaatatggttcaaatggggaagctcaagtatttgtgcttgttgactatgaataatcacaattcacaatgtcagttaatacatttttgactcttccattttcaagttccgatcctacaaaaatgtttgtataaatatactatttttagaaatttgtgtagtacagccttaaaaaatattttggtgaacttattatttattttgatatttagaaaaaacttactctaactttttttcattaataacataactctgtatttacttataaatttttaaaaagtgaaataatttattatattaaaaatagtccttaaatattcacttactatacctataaaaaaaactaactagtgtgtgcaataaagagtacaaactatttaaaaaaatttctgtaaatttataattggtcctaaataaatataactaattaaaaaaaaaaatctaaaaatataaaataaatgctaatacaaatagcaatctactaaaaagtgaagtgcatgtaccgaaacagatagagtctacaattttaaattgcgccgtgatactgtgaattactttaataatgcatgataccatacaaaaatatacagatcatatcatcacacaatatgtcatcatatattcatatcaaagaaacttaatcatcatgatataaattaaaaaaaaaaaaaaacagggatatagttcattggttcttctaccactatataagaaattaagaaaattaatcctatttaattatttatgtacacatgcatgcatatatatatatattaaacatcaataaccatactactactactactactagaagagatgagtttaattgagtgattttgtcgagtgttgaagcaacaaagtattgtactcttgtctcatgatgttatatttctgagtcaaagtcttaaaagcttccattttgtcctcatctgccactgctaatgacttcgtcttcttctccaatctaacctttgtgtattcgatttgctttttcagttcttcgatccttgatattttctcctcgtgctctttttgtaattcttcaagttctgatgaagatgaagatgatccctttttattctcacctaaatcccaacctatatctatgtataaatataataaaatacaaacatcgtttatacattaatatacatatatatataccttataaagaaaaaatatgtaaaataattaatcaaatatattatatacatataaactacctgagaaaaggttattcttggacatgttcttctccataacttcacagatctttttgtaagaaagttaagtatcaattagaggtcttttgaattatgattgtgtagctcttttctctcgctctctctctctaattctaggaacttgtgtatatagaaagaaaagatcattaatgtatttctaagatattttctttctatttttgttttatgatcatggatttcccagctaagcatataaagattcatacgttttcaactgaagtcaattgatggttttacacattgtattagtaataatgagtactttgcatttaccaaaaggaagtataaaaagaaatgaaatctttttttttctttaaaagggaaaaagaaatgaaatctttaaaattattattatatatacttttctatttatatttatgcatgatattgtgatatgaacatatctccgctcaagagaaattaaaatcacagtgtttgtcgaaaaaaaaaaaaaaagaaaaaaagaaaactgtgtgaaataatcctactgcttataagatgacaaccataatatgttctttttttctttttataagacaaagtccttaataaatgaaaatttcagaagaaaaaacaagcaaacaaacataaaacatatctcagataaaaagccaaagaaaaggataatagaataaaaaaaaacgatatagtcacttacttaccttaaacctttattgtcctcaaaaaacttgacactctccctgttttcactatcttctttctttctctcttttgtggcccctagtaagaaaagaaaaggaaaaaaaaaaacgaatgatctaaaatttggcccccaaaacccttatataagccaaaaataaataaaggggctaacgtgaataaagattaaaattttggtttaaaataaaaaaaaaaaaaaaaacttaaaatttaggcacatgagccctgatgaaagatgatgatgatcagatatgacccatttaagctgaccatgcaagtaatgtatgtaaggcattgctgtagagcatctttcctctgttatgctataaaatcagggccacagattatggtacatagatttggtgggacccaaaaacaacaatgtgaatgaaattatgaaatgactcttttgtttctccattctattctggctct

SEQ ID NO: 188319 - DNA, 10067 bp, Cannabis indica
agattaagtttacttccacacttctgaaggtatgaaatttcattttgtgcaagtaacaagctttgttaatgactaagaagttacgaaaatgggaggatgagttatcctatagaataaaacaatgtaaaaaaacataacaaaattagtatacagctgatcttttgttaagatgtgctttacggtctttcttttgagaattagaagtattataaattttctaatgctcgtctcttttaggatgcatgtgatagcagagtagcgccttacttgaggaaagaattgcttaggatatacacaaaagaaaaggcctgcagagagcggctttggaaaaatggcattgtcaaatcatcccgtatgcctcctaagaaatgcccagaatatgttggtaccgaagaggtatttactgccacccacttgtcacttttgattataatttgatgatttttctaagataacaatcagtttttatgcatatatgcttttgattttcacaggatgcaacatgcataatatgcaagcagtatctttatctttcagctgttgtgtgtcgctgtaggccatctacgtctgtttgtctggaggtttgtactttttgtagtaaaatgttttcaaataaattaattgaatattgcctttgaggtaaactagatattaatacatttgtcatcattattgtgtttggcaaatttttgttcatcatattttttgttgacaccttgacaaatttgttttggaagtagggaagaatgtgcctttacctttatcccgagattgattaccatacaagttaaattccaatatgtatattttttaatcacttctaatgttgatggtccaataggtgttccaatattcgtttgaaaatttaaataatgatgtgttgtgattggttaagttctgccatttggttctgtaacttttgatatgttttcttttcacgcagcattgggagcgcctttgtgaatgcaaatccagtaaacgtcgtcttctctatcgccagtcacttgcagagttgaatgacttggtgattgcggtggataaatattgttcagaggagactacacaaaataggaatgctcgaaggcagatttcttgctctaatgaacctaaaaccttgatcaaaaaggtctcttttttaaatctctgccaagtcatgatagaaacttactctagtactacatgcgttaatgtctcttatcactactatatgttgcttttatattgtctttatctggaaaatcttgtagattgagtttgatacacccaatgaaaaagaaaattgttttgtttggctttctgagttggttaatgcatgtaggtgaaaggtggtcaagttactttgaatcaacttgcagaacaatggcttatgcgctcgggtaagatttttcagcacacattttcaagggatgtttacattgctgcaatgaaggaagctcaacaatttttgtgggcgggctctgagatggatcctgtgagtttcttctgttcctacttaattttcatgtattgtgatcagtgttttgttcagtttgttcattttacttttgtatctaggtaagggacatggcaaaaaatctggtagctgctcggaagtgggcagaaagtgttcgaaaatgtgtgtctaaaggcgaaaagtggtcacgtaatcaacatgatggttttgagaaagttcacttggagtacgttaacgagttgctgagtgctaatcctatgccttgtaatgagcctggacatactaaattgaaggttcttacttttacgtaattgtatattccattatactatttccggcctgttgcctgatagtgaacacttttacaattaattcacatatatgtgtgttggcagggttatgctgaagaggcaatggttttgatacaagaaattaataccgctttattagcaacctcaaaggtgtgcaaaagtaaaattttgctatcttctaactcattgatgattttttattgtgatatagatttcttacaattgtcactgcagatgtcagagttggaatttttgtactctagagttcaaaacttttcacttcacctgaatgagagtgaaaaattattgcagaaaatttcatctgctaaggtatatatttgctttaatcatttatgttttaattttgctgtaaaatcctcacaataaccaccacttgaggcaagccccaagtggttgggttgggtgggtgattgattctggttcaagtcccatgcaaatgtttatattagaaaagaaactctgcaccatatagttttttaaattattttttttctatcccaattggctggtatagaaaattcagttgtttaagcctattgtacatctctttctgggcaaaattgtgagtttctgtatgtaatatcattcccattattatagtttcagggttgtggtcggttgtcatgattcgaagttacttgctctattctgcttctgtagtgtccattttattaggggctggtgccattgcagtgtctttctacttgcccatcttgtggagtgaattctgatttgttcatagctaatgaaatttttttgtcgaggcaggtatggctagagaatgtaaggaagtgcatttcagaacaatgtcttgctgctgttgagcttgaatctctatatcagctaaagtcagaggtgatgatagtttcttatttatttttcaaattattgtttacagtctctgaatatttcgtaatacttattttttgatttttaatggttagattttggagctccagattcagtttccagagacagaaatgcttctggaattattaaataaagccgagtcatgtcgtgctcggtgtgatgagattctgaaacatcctattaatttaaaggtaatttttgagctccattcagttctttctttatttgcttgtttctaagttcacaaggtggtgaacaattcacctctgcagaatgttgaagtgcttcttctagagatggataattttactgttaatgtacctgagttgaagcttctaaggcaatatcacgctgatgctagtttgtggatatcacgctttaaaaatattttagtaaacatttccgaacgagaagatcaacataatgttattgctgaattagattgcatcttaaaggacggagcatctttgaaaattcaaggtttgacatttttttgcctgattgtatctgtagttccataccacttttcattattccctctctctcaatttagatatatttttgtttttttacaattgaaaagaggttcttggttgtggtttctttacagttgacgagttacctcttgttgaggttgagttacagaaggcttgttgcagagataaggcactaaaggtaggttcattgttgttgcttgttaaatatttttcttcacttccccccgtttttttatcatgctatggaattttttctatgtatttttttgcttgagctattaaattagtttcattttagtatgatcaacttcaaatatttaaagtttgtcgaaaactgatgcaggcgtgtgagactaagatgtctatagactttcttaggcaactgatgttggaggctgcacagtaagcactcgtccctttttcttttacaaactaaggatcgtaaatatttcttttgttttgcttcctctagcacctttttgtttagctttaattacttttcttttatttggttctcttttcaggttaaatatagagagtgagaaattatttgttgatatgttaaaaatacttgatgatgccatacaatgggaagcaagggcaacagatattcttgcacgtgaggctgatttgtctgagtttgaagatgctataaggtttttagcatgttattctatggttttgtgaattagttatgatggtttgagattcttccatatgaactgtttgttgtttattttttattttgaatattttagggtttcagaagatatatgtgtcattctaccttctctcaatgaggttgaggaggcatttgctctggctacatcttggttgaaaaaagctaatccatattttgagtcttctttcccttcgctacctttaaaatttgaagccctgcaggttctcttcccaacttacatatgcttgccttactctgtcgaagatttaatagtaatcttgctggcttacattatgcctacatgttgcagggcttagtttcccaatcaaagcttttaaaggtctctttgagagaaagaagtatgcttgaaacagttctaagagactctgatgactggaagagtaatgctagttttatattgcgagatacacaatgccttttcgatacaactgaaatttctgatggattattatgtgatcttagttcgaaaattgagagtatagttactagaattgaatcagtcaaaaagaaaggttcatcttttggctttgacttagatgagattccaaaacttgaggatgcttgttctacactgcaatggtgtaaaagagccttttctttctgttccagtgctcctccttttaaggtgactatctcatttggttgtgttacattatttatggtattgtgcgttacttatgactttcatgaccaccttaaagcatttattcttctcatttgtaatatattttttctttttgtcttatggaagatttatcaagttaaatgatatcttctgtacatattttagttgcttttaatgttgggtgtttagttaagaggaaagccattgttggataattacttgtatgataaatggttgattatctgcatcagcgctctgttggatatactttttattgcttacattggtcggcttgcataaatcaagtaggaaagcaacctcattatttttttaggccttgtatcctagcctgacatgtgacttttaattgtcattttcttgaaggatgttgaggagttgatggaagctgctgaacatttacctagcacatttacttctggcagtttctggagctcactgattaatgcagtcaaatggctttggcaagcttccgaagtagtttctttgcaatcaaatttgaaaagatgcaccttgagtgatgctgtaagagttcttgacagttctcaggtgagtttctactttactgccttttaagaactttaattctcttaactttaatttattcattggtagttgtttattggtttgagttgatgtaacaaatttagttgttctgtttgcagcatgtcagtagtatctacccagtcatggctgatgaacttgaaaatgcaattcagaaacacaagtgagtcttgtttcccaacttcctttttctccaatttgccagtttaaatatgaataacaatttgacttttgtgagagaacataactttctggccattgtattcaatatctaatagttagtgtgtttaccacgtttggagtattcaactcatactaaaaaagaattctatacatagatatttgtaaatatcttttaatgcagttgcagcttggtataagtgggtgttgcttaaaagggcttacactgcagcatgtaaatgtagttgcaggcatgcagcatgtaaatgtagttgcaggcatgcagcatgtaactctgatgtacatgttttaaatttactatgtcctaatttttccgaaaatgctttgagaattccttgttttttttttttccaaattgcttacagaaactcatttggttgagttttttcaacagtttgactgtttatatcttcaaaatttgttgggggcttggggtagaattcttctctattttgctgtgattgcttggagtgattttttttattttattattggaagttatatgtactttttcgtatttttgtttttacaatgttttaaatttacttttcttttcctgtgcttgaaataagccccatgtataatttgtgtcacttttttccccctttctctacatacttgcgaaattgattataatcaaacattatgcaggttgtggcaagagcaagtgcatcactttttccacctagaacctggaaaacgttgttggtctagtattttacagcttaaggtatggtctgaatttgtttatattacaggggtgatattttgctatctatagcaattatctaatgttaatgtgtattgcaattgcagaagattgtctgtatctgtaagactatctttgtttgccttagcttttagtgttttctactcatatacacttaactattttctgaggctgagtatgtgactataatgcttttattcaattctgttgtcatgcattgcaaaacgagtgaatgaggtttttgtgctgtgatttaatatgtattttaacttgtatatgattccactataggataaaactttttttttacatatagcttaattgttataatcatatgcaggaaagtggaattgctgatgctcttagctgcccagaactcgatatggttttatctgaagttgtaaaggttgagaagtggaaaaaatcttgcagagacatcttagggaccttaattgataatgagactacattgcttgacactttgctaaaggttttgtctgatttttctctcagttctgtattaacctttgttggtttgattattatatgtatttatgttgttttatatttattaatatacagataaagcagacgatagaaagatcactgtacatattagacaagtcatgtggttcacaagcaaaggattactgtctatgctgttttaatgattcccggaaccaagagtttcttatttgttccatctgcaaggactggtaaggtacttctagctttgttgaggttttatcttatttattctaaactcccagaattacctgctgcttatagataattttataaatatatataattcaaacagctactatttatttcttctgtattatatcctgaattgcttaatatgttgtgattttattatattgctgtcatcatttattaagaacaacctgtgttttttgtaaaaattaaaacagctaccatttgcggtgccttggacctgcagctgtggatgtagcatgcgtagaaggatatagatgtccttattgtgaatacttagtgtcaggacaaatttctttcaagggaggtggtcctctggtacgtctttctataaagattttaaaatttgagatgagtgtgtatataaatctcattccattttatgctcgcagagatttgctgggaagcgtccagagcttaaaatgcttattgaacttcactccaatcatcaagacttctctgtctggtaacaaaatctctaattctgttaattcaatttctacctctagacgtgatttctacttcatcaaataccatctgccttttcacttgaaaactgaacttcttctcactgcttcttcagtatcttttaatttgtacttcactgtaggtattgatatatttttttttcttatttttgttggtgcagtattgaagaaagagaaattttgaaagagctggtggaaaaggctaaggcatgcaaaactcgcattacagagattgctgataatgccttagctttggttgacaaagatctgagtacaatttctggaaagttaactgctgctttaaaggtgtgctgtggattattatgttgtggtattttactctactgtaaacaacagatcctccctggttcccattctccaggctcttcttcttttctcaaatgaactgctactataggattttggatcgtgcaaaaattattgtaattcattaaacttcttctgtgatcccacccaagagattcatccacacttaagaaagagaacaaataattaaatagtagccaaaattttcttatactgctagaattttgcttcatcctgattgttattctttggttctaaaggcgaccgagctagcaggtgtatgtgacaatgcagttgatcgcaatttcaagttggctttagctagaaactcttggaaacataaagtgaataggttactggtgagtttagagaagcccacactccaacagattcaacagcatttgaaagaggtatgctttttatgcaaactcaaactccattttgtgctctctatatgcatttatttgagtccaaatgagtggaacgcttaatttgtctggttaaaatttaaaattgtcatttcttaagagtgccatttatgaagtacaatgtaaactttttgagctccactttggtcctttaagtttttacaattgatgcaattatgttgcggtaattttgtcagctatctgtaatgcatttttataaaatgttgcaggggctgaccttgaacattccaccagaagatcacttcaggcagaaacttacagaagtgaagcgtgtaggcctgaagtgggcagatcatgctaagaaggttcaaatcgttgctccttttcttttaaaaccattgctcttttctctgtcatttcttgtttcccttcaagccattcctatctctccctctctctcacatttgaaaatgttgtgttcctgtcaataggtcgcagcagattctggggctcttagcttagataaagtttttgaccttatcaaagagggggagaatttgcccgttcatctagataaggaacttaaggtaatacattgggcctttagactaatcaagttacttggtgtttgtgtaaattgttgttacaattttcttcttccatggatgcagttattaagaactcgtagtatgctctattgcatttgtcggaagccatatgatcaaagagcgatgattgcatgtgatcaatgcgacgagtggtatcacttcgactgcatcaaattagtgactccaccaaacatctacatctgtcctgcatgtgaaccacgaaaggctgaattgctgatgctgtcattgatggataatgagaggtcagcctggttttatattaatgaatttatattatctccatattgcatttctctaaattattgtgctgctcttatgtgggaaccaagcatgttttgttaagcagaatcagtctgcagtgtgccacgggtttagaggtttgaatgttatagacctgttatcgataagcaacaagaaaggctcctacgaatcaatttttgctggcatcatattagcttttatgtttgctttgacatattaccaaatgtccatcatatcattgttttcgaagtgctctttcttgtacatgttatttaaagtcggttggtgatagtgtgattttgttgagaaatgttctacaaccattcatttgctgtcctttatcaattcccttaagtttcatttgcaataactggtaacagatcatcggatgccaaatccgtggagcctaagacaccgtctccccgtaacacaaagtcaataaagaaatcgagaagggtcaattccgactcaactcagaagatgctctcggatcagaacaacactctgaggtgtaatagtgggattgagcgtctttggtggcgaaatcggaagcctttcagaagggcggtgaagaaacgaacagaacttgaaagtctttcatttttccattctcaacaacattgaacatgaaatccagttagttactaaccattcgattcattcatttcattcatagtcaaattagatctcacttgtcttctccttttcccttaatcaataaaggggggagcatttttattttgtcaaaaatgtcttttgttgcttagaagaaacactttttttgtggagaaattatgctaattattataaagtttagcttatcccttattaatattataagttcaagctttttcttcttttaggagtggcttggctaggatttttttgttagattttcagcttctgatcattttgtacaggcatttgcataagaacgaagaagctggtcaatgcgatttcctcgtgaatttcttaccatataatatatatggccaaaaggtcaaccaataacgatggtcgaatgatatcatttggggtttgtttattctttgttttcaggggcaatattttttaaaaggttaattagaataatagtacaattaccctaataaatcattgcattagtttttcaatgttaaggtgcccactggtagcaggcataaagttgataacaatagaagtgatcgtagggttcatttagggctcacctctttaaaaggttatatggacgtattttttttt

SEQ ID NO: 188320 - DNA, 3638 bp, Cannabis indica
attattatacaacaacccaaattgccaaactacaataaaagtcaaagatgatagtaattaaattaagttgaaaagggtatttgagtaaaataataagtatttataagtattggttggcctcgtgcactcagtcagttctatatatacgagacacaagcgagttcaatttccactcgacaagcttagctcaggcaccattcaacgcttgtgatcttgttacacttaccaactacctccatctccatccacgacgaggtaatttaatctccttttctcatcatcttgttttcatttccctcaactctgcattgaacatcatgtggatctgttactgattaaccatttaactagtaacaaggatctctctttcatggaaaggaattccccagaaaactgtctgctttctcatgctttcgttattattatttagttgttgttctctgatagatggtggttagttttcttgattcattcatgtttatttttccccctcgttggagaaaactatcactaatctttcattttctttttaaatttcgttcttacttttaaaaatgatttttttccccttcaaataatggggtggaggttagtttcaatagttcagatttttagaaaaatggcagaggttatatgttattctttttaattttattgctcctttctcgataatatataattgatatgaccctgttggaatggttccgctgagtgatgtgattttacgtgatccgtgcagatttttgataacagatatccatggctccagcagcagcttcttcagagtcagtaaagtcaagaggtttcttgtctttgtctattttcatccatcgctgtagattcaagatttctgtgtttaaattgtagcacatgtgttgatcagtagtaatgtttatttatacaatttatatatttttattgtgaaaattttcacttaagttctcagcttctttgtataatttttttagagatagttgaaatttttagctatttatgtcctgcttctaatagtatacataattataccctttttgttcactcaaatgtgataatttaagtgagttttgatcatttgaatttcgaagataacagaaatttaccatctttaatctggctacttgtattcttaaatcctttcgttttcttttcagatgtttgcattgttggtgtcgcccgtacaccaatgggtggctttcttggtactttatcctctttacctgcaacaaaacttggatcaatagctattgaaggtaagttgtgaatattattccccagttattggaatgaattttcattatctatttatttttaaggttatgtttttaagacgagaaaaaaaaaagattatgcttttaaatatttttttaattctcttttgtagctgcacttaaaagggctggtgttgatccttcacttgtacaagaagttatcttcggcaatgttcttagtgcaaatttaggtcaggctccagctagacaagctgcattaggtgcaggaatatctgatacagtaatctgtaccactgttaacaaagtctgtgcatcaggaatgaaaggtgcactcatcatcatcattaatcatattggtctttcatctctcttaattatttgttatttatttgtgaagatataatgtcataatatgcattttttttggttgatacagctacaatgcttgcagcacaaagcattcagttgggaattaatgatgttgttgtggctggtggcatggaaagcatgtctaatgtgcctaaatatattgctgaagcaaggttagctagtattgccttctttttcatggttccctggtgcaaataaatttcagatttgattgatttggtcttaaaatgcagaaagggatctcgacttggacatgattctcttgttgatggaatgttgaaagatggtttgtgggatgtttataatgatgttggtatgggagtatgtgctgaaacatgtgcagaaaaccataaagtaacaagagaggagcaggacgattatgctattcagagctttgagcgtggtattgctgcccaagacagtggggcctttgtgtgggaaattgtaccggttggtaacctatttatgagttcaatagtatgcacccttgtgttttttcaatcttttgtgccttattaagatattacacaggttgaagtttctggtggaaggggaaaaccagcaataattgttgacaaggatgaaggtctagggaaggtaaaaataacttttgcttgtatcagatggatcatttaactttgtaaataatattttcagtgcagtttcttttatcctagactatctctgcttctaacagcaatatttgctcctttcttatgctatcagtttgatgctgggaaactaagaaagctccgtccaagtttcaaggcgaatggtggctcggtgactgctggaaatgcttccagcataaggtgtgtatatgtgtaaatatattaatatatatatcattatacttctaataaaattcgttaaatttaccttttctttccatgctattaatatatatgaagaacagccttcttgaccatttattcaactgtgttatatgttaatttatattttcctttccaaaatggttgatacgaaagatgaagtaaataaattgtgctttaaacattaattactgaagtacgtacattgttcttcagtaccaatgtagagtccttgttgccaggccactttcctagtagacctttttgatggagtggaaacatgtatactatataatataattgaaaaagcccagtttcagcaattttcctgtcttatatttcctcaaaattattcaaaagtgttctactttgaacggttcccttagtgttgaatgatgattatggactggtcgcatatacatttcttgcaaataatttattatgaatccatttctagtataatattatttgcaagtcttacaaaaagatgatccagccatccaagtgtttactgaaaaataaatctttctggttgaagtgatggtgctgctgcattagtcttggtgagtggagaaacagcaataaagcttgggttgcaagttattgcaaagatctctggatatgctgatgctgctcaggtattttccacaaatataaatatttgcaaagcaactgttgatgtcagtctgagaaatacgttgaagctttcatatcattcgcttttctaatttttctttatataacatgtaatatattttatttatatgtttgacaatttgatgctcaaatcgacttgaatgtacaggcaccagaactatttactacagctccagcccttgcaatccccaaagctatttcaaatgctggcttgaatgctaatcaaattgatttctatgaaattaatgaagcttttgctgtaagattctatgcgaatcacttaaatgtacaatttccttgtcaatgagatatgtcaagtgattattttcatgttccttacacaggttgtggctcttgcaaatcagaaactgcttggactcaacacagtaagttcttttccacaatatctctctcttacactctgctttgttttttttttttttttgagatggatgtatgtaccagtacaattgggcgcatacaagataatcaaatgcagttacatgggaatgcttgcattcattctgtt

SEQ ID NO: 188321 - DNA, 6274 bp, Cannabis indica
acttgacaaaaatcctcccctctcaccgaattcaggcgacatagtggctacggacgagacactcaccactcttagtctgaactcttgattggtatttcgaccgcacatatgatgatattagctaggaaaatcggcactcaaccaattacagtcttaatcgatagtggggcaactcacaattttgtttcgatggaagttgttactaccgtgggtcttcccatctcaaccaccacttgctatgggatacttttgcgtactggtgggaaggttagagctgaaggaatttgttcttaagtggagctcgatttgagagcaattcgggtcattaccgatttccttccagtagagttgggtggagttatcttgggtattaaatggttcggaacatggggaaatatgcaagttaattggagaacaatggtgatgaaattcgaggtggagggtttttgggtgacattactaggggatcctagcttatcaaatggcccatttccttcaaagctattatgttcacggtagacaaagcggctgaagcattcttggctcagctcggggctttaaccacagaagaggatcaccaccactcaccaattcctgctcctattgctcagctcctcgagcaatgcaacaatgtgtttgaaatgccaccgggattactgccaccacgttatagagaccatttgatcaccttaaaaccaggcacatggcctatttcgtttcgtccttaccgatatgctcagattcaaaagggggagatcgagaagatggtccaagagatgcttcgcgttggcatagctcatcctagtaccaacccattctctagtccaagttcgttggttaggaagaaagatggcagctggtagttctgtgttgattatcaggccttaatcgagctactatagtggataagtttcccatcctggttattgacgagttgctcaatgagctccatggcgccaaggtgttttacgatactggacttgaaattgggatatcatctgacccgaatggccccaagtgaagtggagaagattgcttttcacacacatgagggacactatgagtttttggtcgtgctttccggtcttacctcccgccacctttcaagctctattgaatggggtattatgtgattttcgtgtgttggcgcggtttttcgtcaacggatctaagaagattgtaaacgagcaagatgaattcaagcaacagtaaatcaaagtaaattaatttgtaaaagtaaattcaacaaagccaaacacaaggattttatagtggttcacctcctttcagcggtaataagctagtccacttggagtgttattaatctcaatatttgaggagagttctccaaaagttcaaccctcaagtgagtttttagaaattgagagtgggagctcaagagtatgatttcatgagtatcaaattcagggtccctttacaagtgatttcactccttttatataagttttcttctaggatttaaaattccttaacctaggtgcaccttcctgtaactatagtcgggttagctttaaaatacaaaataataatgaaataatcattcaaaaaataaatatatcttcacttatcattttttgactatattttcgaaatagctttaagagcatgtgtctttcgcatttagctgaccggatcgtcatggacacacaaagggagccaattgggtcccttaacggttcgtgccaattaggtccttgaggtaatttggtagttgaggagctctttgtgccttagcaggatggagcagggagcttagtacgcgcaatgtgcttcactggtaggaggtggtgcaatgtgctccagtggtaggaggtggtgcaatgtgctccactggtaggaggtagtgcaatgtgcttctttggttcaaagtgcaatgtgctccttcggttggaggtgcaatgtgctcgttcagttggaggtgcaatgtgctcccttcatagaacttccaaatgtagaacaaaatccatgcacatttatattggaatttttgagggataacatttgccccttaagtttattataattttataatattatgattttataatattatgatagacttgtagaaaaaataattctcgcatttttggattctatacccgcaaatatttgtactaccaagaacaaatatgtagaaaccatcaatatttcctagcatcttggaaaactaacaataaaaataaaaatgaataacaaagacccttatagtctttaaatatgttctctttccaacacaaccattttcactcttcccttaaaaaaaataagagcccttccaaaaaccctctcaaatagctccaaaacatatttcaaaggaatgctcaaaggggaaaccaaaaattgttggagaggattcaagcttaaagatcactattgagtaagttattcccacccatttactattcatttctatttcctatgttaaaatgcatagaaactatgaatgtcttagtgttcttcaaattttttcataaaaaccctctttttacctatttgccttttgctaatgttgtgaaatttggtttgtaatttttagaatctatgaatagaacttagtaatgtaagttatgggttatcttaattcactctttattttagaaatgatagagatttatatatttggtgtgatttgggtaaactttttgagcaaaaatgaagaacatgatgatggtgatgaacatttgaagtctctagtttgatccaaaaagatttgaaattgagggaaaaaatgtgtttgtggctatttagactttagggaataaaaataaaagtagaaaaaatgagtaggcattgatgatgatgaggtccccttgtatatacatgctatatatataaatatatacatatgtacacgtgatgcaattcgtttcttttatttttcttccctgatgctattcatttcacttagtaatttatatatataaacacctcttttgcttttgctcttatttgaggagctaatggagccattcagctcctttgtgccattctgttcctttagtgtcattcggctctctttagtgtcatttggctcctcttagtgaaaagaagcattcacctcttttgttggagccaatcggctcccttgtttttttaatggaccaaaagattctttgaggagtttgagcacacttatttatttctaattattctaagtgaaactttgatatacccaaaataaaccaaaaaataaaatatttttcttgataaaattcatttagcttagttaatttaaattagatttattctaattcaacaaaatttgatttttttaatttgatttaatcaaatttagtttgtacttattttttgtaattaaattagttttttatctaattttttttattaactgaataattcatcaagtgaatttagcttatttacttatttttgggttaccttatcctactcatgtttgtagatgcatgctcatgatcattgtggaggtgacaactgcatcgacgacgatctcctagcctgtctatactcagattatcagtcacctccaaactcgtcagatttgtcgtcttcacccagtccttcaggtattagtgagtcatctagcgggtctcacgagagtgtctgtcctattcatagagtatggagattgaagagaatccctccatgttggaacttgtacttcttacacgaaggagagtgcttcacccctcgtactattgcaaaaatgaccaatccttcctcccaagacgtcgtaagggaagtcaaagcttatatggcccctccaaatccccttaagaaacgaaggaagcggactcaataagaggcgatgactcaacacatagtcaccaccttagagatgaatacatcatatgacctagtacctgggatcccaacattgcaattgattgtttagacaacaatttgaagctgtctgatgtgtaggattacccttctcgctgcccttttggtgaaggggtggagatagttttggcagagaaagatcaaaaggctggctctcctccaaataatttatgtgcctggacaaaatactacattgagactggggcgactttgccgttccatgattacttttgggatgtggcaaactactcgacgttttctcgattcaaattgctcctcatggctatctggttttatctgctttgttcatcctatatcaccagaagggatgggaagactctctcctcacgaaattcattacctcctttcttttcggagttgcccatctacaaattatttagaatatttctatttcatgaactgagaataggatcgaccgtatgtctctggtattagtagcaaatctcgtgaaaaaaaacatcaatcgtcttacttttttacgaccccaatggacactacccatcgaactttcaactatacgggtacatattttagaccaaatccaacagaggagatgatacaacatgcaacgattttgacagccatgccagcagccaagaagtatgtcccaaagattgtaaccatggaaatgctcaagttggtaaaactgtacctttttgagtgtaattcaactgtcgcaagtatgattgatggatatgatactcttgttgttccctccaatcggggaaatccttctcgtgggaatcttaccacaactaactcttctacacacatgactctacaacccaccacttcgaggagggataaggaagtggttcgcgttgagagcgaccctgagagtactacggtgttggatgattatgactctgaaggcccctttttttttttatacttatttacatttctgaccatatttctactatagtactgtgatgttgttatcatgtgtattgcgatattaatgttgtttctgtttctcttatagatttaggtatgttccgccccttgcttgcgagctacgacgagattgaggatgtgagtgcgtttggagaagaggagagcatacaaacccttcctttaatccctcgagcctattctcagctgaggagaccttgccccgtggcggtagaaggcgaggagaccttccatcgggttgccaagactttgtcctgacagagctataattcaaatgctagatctgtgcacgacaactattgaggtggtgtgcggcatgtctagttacgaaggtgatactttcactaggagggtccaagatatcattcgggacaggagaggcttgagcattctccttgccttctaccgccacatggcaaggtctcctcagctgagaacatgctcgagggattcaaggaagggtttggacgctctcctcttctctagatgcattcacatcctcggtctcgtcgtagctcgcaagcaggtggtggaacatacctgaatttgtaagagaaagagaaacaaaattaatatcgcaatacacatgataacaacatcacagtattatcatatgaatatggtcagaaatgtgaaaaagtatatataaaaaaagaagaaaaagacctttagagtcataatcatccaacaccgtagtactcctgcggtcgctgtcaacgccaaccaccacttccttatccctcctcgaagtggtgggttgtaaggacatgtgtgtagaagagttaattgtggtaaggttcccacgagaaggattctcctggttcgtgggaacaacaagagcatcaggtccatcaatcgtacttgtgacaattgagttacgctcagaagggtacagtcctaccaacttgagcatttccatggttacaatctttggggcatacttctcgatgaagtagaagtattccgaatgtttgtagataggcaactccagaaagaaaggagataaggaatttcgtgaggagagggtctttcccatcccttctagtgatataaacaaagcagataaagccagatacccatgaggagcaatttgaactagcaaacgtcgaagtagtttgccacatctcgaaagtaatcatggagcggtaaagtcgccccagcctcaatgtagtattttgtccaggcacatgaattatttaggagagagccagcctttagacctttctctgccaaaactatcttcgccccttcaccaaaagggtagtgagaggggtaatcctgcacatctgacagcttcaaattgctgtttgagcgatcaattataatgttgggatcttaggtactagggtcatatgatgctttcgtctctaaggtggtcactatgtgttgagccatctcctcttgttgagtccgcttctttcgtttcttaggggtatttagaggggcgatatgagcttcaactttccttgggatgtcttgggaggaaggattggcc

SEQ ID NO: 188322 - DNA, 9142 bp, Cannabis indica
acgggaagaactactacaccgttgagtttcaacttacatctcgaatctttgcaacaacttcatttgctaccatagccataggaaatggtgattaacaaacataccctataatgtgtagtccacagactttttaactgttatattacaaaagaatcacatcataataggccttttctttcttcagagagtaagataggttgaaactttagttgtgtagtttcatagttgaatgtgaattagaataggagtgtaggattatcataacttgggttgtaattattttgacaggaagatactacacactaattgttggagccaatgaaagacgctggaaaagagtccgaaacaagctcaaagtggttgcagactcattcagggtgttggatatttaagaccataattctccatctgtgttatcatttattcttcatgctaattaatcaccattcatgtatataacatatgtaattgtactgatcgtctttttatgattgcattaatcaaatgcaaaaattcagacaaaggagtaataataattaaaatcacccatgaaaattattgtcacttctgtatgaaaacggccaagaaggttgaacaaatctttttcccctactaatgggcattttacttttaattaatgaaaagattaatgttactaaacatgtgtctaacataacagtgatgtgaaattttatagtacacaattagaattaaaatcagatccaacatattacaaattaataaatggaagtgccttgtagcaacacattctaaaaaaagaatagagaataggcattaaattatctgtatatttacaaagttacaagagttctattttcctcctaacttttaacagttttcacaaatggaagaaaattttacacaaaataataaattcatccaaactggagaggagccatgtcaaaaacgttcactagaattttaagggaaagaaacccacacctcaccaaaaactataactagctccatccacctcattttctgattgaaaaacaaatcaaatataccacaggagacagcacaaccgatccgatgatgcctgcctccaaaagaataagcatccagccctgggtagagaaccccggactgaaccaaactccaaaaccctatctctaaagcctacatttcatcaacactataactatgctgccgcttctgtgcattctgcccactcatcctgccatataaacattgctacacgtgtcattgttctccttctccctctaccccgtttcaggaaatcaccaccagagccagcaggttaaggcatttccaccatttcaaaataagaacgaggagagcacagataaaactgaacattagttccatggatcacaaaatcctaaataagtcgatgaggacgcaacttcccaaagtgaggttgcgtcaattgtacatataggccattcttcgcgatcaatgtatcacgggtcccttcttctacaattcgacctccattaagaactacaatattgtcgacatgcctcatcattgcagctctatgagctatcaaaatggttgttttgttccccatgatcagcgtatcaagagcctcttgcaccacacggctagattcagattcaatggacgagcttgcttcatccaacaataagatgggtgcattcttaagcacaacccgagcaatagcaattctctgtttctgtccaggagtcaagtctactcctctcatccccacatgtgtgtcataaccatggggcaagctactgatgaaatggtgggcatttgctatccttgcagcctccttcatctcagcttcactagcattatgccttgcatatatgatattttcccttatggttgttgagaaaataatgggttcctgctggacaagaccaaggtgattccgtaaccatctcaaattatattgtttcaaatctctcccatctagtaacacctggccagcaactggatcataaaatctctcaatcaaatttattatagtgctttttccggatcctgaaacacctactacagctatagtttgcccgccattgactttgagactgaaattgctaagcaccaacacctctgggcgagttggataacaaaaatcaatatttttcagttcaatgcttccataaacattaggtggcttcaatgctaaattatcatctgggtcaattttaggcactcgatcaatgatttcaaacactgaaatcagagatttacgtctcttaagtatgtatggagccagtccaaacggctccaccagcgcaaatgttgcaaaggagaaaaccatgtactccttaagagcagtagatagatccatatattgtcttttcacagaaaaggcagtataccacaggagaagtgcattactagcgaaaagaagaaactgtgaaaagccgaatgcaaagccaatagccattcctttgaggaaactctgtgtaaatattttttttaactgcagtctgtagagctccatgaccttgttaccagcacagaatgctacaacagtgtatatgtttctaacagcatcctcaagaaccaaagatgcctttcgatgcatttcctggatgcccctagaaaatccagcaagccataatttctgcaataatttatattggaaaatgttaaaaaagactgaaaaagaaacaacaaagcaaatgatggttgttcatataaacaacagcaacaacaaagggctaccgcagaacatgtctttttcttttttaatctctcttttttctttccagaagttgataaaagcactttacaattagactaatgataagaaaactaaagctgtcatagttcatctaacaacaaaaatagcaattttacttttattttctttggtatatataaagtacacgtgataaacctgtgcaattgcagaaatggtaagaaatggaagagtagccaaagccaccagagcatatcgccactctagcagcatcccaattagaacagccacaataacagcagcactgtcctgtataaaaatggaaagccggttactaaaagcagctcgcacaaacgtagcatcatttgccaggcgcatggataaggtatcagcactgttttcctcttcatcaaaccatccaacttcattgcgaagcatcgctgtcacaagatcaaaacagataagctaaagtgcatacaagtaatctcaagaacattgaaacaaagtttaagaaaaagagaatgaaagaaagagacgcacacctgagaacatcattcttctaacacgttcagtcattttctcacccataattccaaaatagaaatgctgcaagaagttggcaacaactgttactacacccatgcaagcaatgatcaaacaccatttgtctacttcatgccgcaagtgatggccttcatttttatagtatgctgtcacaatcaatgcgataacataagctagaagcggattaaaagaaccaaagaatagcagcaccaatgcttcccaacacagcataaagccattctgcgaaactaagctcagccagcctccaaaactagatggtggctccttttcggtatcctttgcttcacttgcttttgttggaatatcacctgagtgactatgaggtcggctaaaagtttgtgaatgggatcgttcatttttgggatcagatgttaatagaggtgaaactggggattcaggatctgaaccatttgatattggccgttgtgcagagtgaacatcaattttgggcaattctggtagcctcatttcaaaactatcctgccttattattgatggttccttgtcggatgcatccaagggctggccattttccatcattttctctggcggtggactccgaatatttggtgattcatgtgagttaaaggccccatcagtgggccggaatacgccaggtactctctgaagtgagggtgatttcatcattttttggagaagatggttcatggtagctatgacttgctgaagaatccttttcaatttggaaggctgccgtctccttgtagtttctcactggcatcctgcatgaagaacatagccagtatgatgaacttgctaacagctagggaaattagttattaaagaaacattcttaatccacaaccccaaatagaataactaatttttgtcagataattataaacctttgatgatgtaagcaaaagcatagtgatagtattctcttgaatcatacctccgaggaagttttgcagcttcttcacatttaaggagctcagcatatagaccatcaagggttaataattcatcatgcgtgcccatttcaacaagttgtccctcttccatcacggctatgtaatcagcattctttataagactgagccgacgggctattattatagttgagcgcccaagcatgaggagatccaaagcctcctgaacagacctttcagcttcaaaatcgagtccaccagtgacctcatcaagcaaaagaattgaaggatttaaaagcacagccctagcaatcgaaagcttaatcttctgttcttctgtcagaggtaaaccagctctcccaacctgataataaacagaacctcaaaacatacaaaacaaatgccaaaaaccagaagaaaagggaaaacacaatttttcaaaacaaagttactatgacatttatctgtcctccagattatacctgtgtttcgtatcctttctcaagtgagctaataaatgtatgtgcatgtgctatcttagcagcctcttcaatttgatcacatgtagcatcccgcccatatgcaatattatctcttatgctcaaacttagcaaagcaggctcctgagtgactagtcctatctggcttctaagccattctaatttcaagttttttatattttctccatccaaaagaacttcccctgcaccaacaaacaaaaagaagattgacatgtgcaacaagaaatttatcgctaatggccttggcaaaaccttaaataatttaagcccaaagtaacaacatacctaatgtaggatcataaaatcgctccataagtgggataatactgctttttccagatccatttctgccaacaagtgccactgctttcttagcaggtacagtgaggtaaaaaccactcaaaatagggatctcgggacgagaaagataactgaaatatacattccgaaactcaatgtttccttgaacaggtggaagagtagttccttcttgattaacagtagaagatgaccgactaatcatctcataaagtctataagcagcaattctcccttgatcaaatgaatagaagtttgtcgctgcttgattcaacccgctacagataatcagaagagagtgcataaaataacatcagagacagtggttgtgcttgcaagaagaaaaataaaagtaggaaaagaattaagaggcttacaggccacttaaaattacagcaaacaaggctgttacaatttcaccaccatgagcttgtcctttcacaacaaggaacctcccaacccacagttgtagagcacacgaacaaattgcaagcccatacgtaaatccaagtccaagtccttggacaagacttataagtataccatatctcagagttgcttgtagtgatgtcgcataagaatacttagccagtgtttcatttgtaaatgcgtacaatgtcctaatatacgagacagcctaaataatggacaaatcattcacatttcagcaacataggatttcactactttgtcaatttatcacagctaaaataataactctctcaataattttgtccaccggaataaaatctttatttctaagtaaacatttatctgcaaaagatataatgcacaaaaacaaacctgttcagcaatgctagctgcttcagcatatgcatcttgaatattctcagcaagcctgtggagaaatatgtttgatattcctccggccgcaacaataaatggaccagtggccaatgttatgagtgcaatctgccaacagttgacaaatccaataacaagaccagcaaaaaatgtagccatgttgtgaacataatttccaacctgtaatcaaagagaaacacagactttagacaagaaatttgaatcaacaaatcatatagaaagctgaaatttttcataacaaataaaaattcccaaaagggaacatgagctagctaatataaattagcataaaattaccttttcacttaaagcggactgaatgagcagcacatcactcaaaacttggctcacaatatctccattgttgccataggtatcaaaaaagctcatatcctggttgagtaatacttgcacatattttgacctgatgacagcagtctgtcgttctccagtcaaaatccagcaagagacctctataacacagaagaaattagtacatgtggataacgcaaaaatcaactatgatacactagcacaaaggcagtaacacaactggtcttttgacaaagtttaaaccttaccaatccaaccggcacaaaaaacagccacagcaatatgaacaatggttaacgcaagctgcaaacgaaacaaaattgagttgcggatataagattcgtaccttgcaattccagttcactcataaaaaaaacattgactaataactaaaattccaataggacagaaagaaaaacatataaagaaggagaatctaaagctcatgtaaaattgaaaacacccatttctattagtaaacctatcagaatctaaatgattctacacgtaatcctttattaattgctagacatccacttgctttcgtcataaatttctacaaacatactattgcagactgacattttcacagattaataaaggccagctttcacaagcatgagttatatgctttctccctgcagccaccattaccctagctccacccatgaataatcaacctagaaaagactaaatgacaagataattactaagctttaataattacagggcccggacattactaaacaaaatgcttaatagttcatactgatttcctgccctcccaggctcccacccttaaaaatgctattatgtagaaacaattttcttttctagatatttgtgggtatattcaaactccaccgcgatttcaccaccgaaacgaacactatttcgaaataagtaataatatgtgtattacacagtggcgagacatttttctcaaccagttatgtttaattgtttatttgagatggacccgttatttcaaaaagagtaatgatatgtgcacacacaaattacacaaacttgacactcacttatgagcaaattattttaaccaatcatattcattttatcaatcgaaccccctacatagcttaagtgtgtttttaaagaataaactttcaattcttccagagaatatgacaagcagaaccatagaattctctatgctgactactaatgtaagaagttctagtctgaacaagatcaatatacattcttaaaaaggaaaaaaaaaaattaatagaaaggatgcttacacaaatgccactgtcgcccaagcaacattgcatttcatttaataaaacaatacacggcattaccaccagcagtaaatgtaatcatcagagggtaccacaatataagtttttaacttcaacaactaatcaaaaaactcatttttgagcacacaatactaatttctgatgatgcttctagctaagttgaaaagggtgaagtttctaatctgccaaacaacaagaacctagaaacgtcaaagtcttaaaatatatttccacttcatacatttcccagaaatcaaaccaaataattatgcaaaactaataactggaacggctaaacaaactccatttagaatacgatacagaaattgaggatactagtagcttagttaataaactttgaagtatttcacgtctaagtccaaaattatttctgcttaatatactttacacgaaaacaatagaaacccaaatgcaaaagcccaaaaggattaaatccataaggtttcagctaaaaaaagaaaaaagaaaaagaaaaaataatgagcttacgtcgatgaacttatcatgctgtagtgcagcgatttgcttctccgtcaagttggggtcatcgtggccgatccaaaggacctgaatgatcttagcgaagtagtgcaagtaaacaactaaagcggcaccatgagcagcagctgctaatgatccaacgaacataagcacccaatctagccggtcggcacaggcaaacaaacgcgagaaaggtacagcagctggcggaggctccatctcttctggctcctccatctcttcctccggctccatcggctgacccgacgtctcggcacttacgtccaagtacggcgacggagattcccggaaattcataccacacttctgggtggagtcaacagctgtatatgaggaggggaccatccaaacagccccatcgagatcatcatcttgcttgaccaaataacgaaattctcactcgctcttcttcttcttcttcaagctcagaatcaaaattcgtacgaatcccgcccaaaagccctaattataatcctctctgtctctatatttagcggatctgctactaaattttagaggcacacagaaatcggaaccctaaaaaaatttgaaaaaaaaataaaaaaaaaaaaacgctttttgttcaatgagtgtattttgtgcgctgctttttatttttcttttcattatttttaatttaattttatattttagagaacaaaaggttcgtttcgttgcaggtgggtggggactgagtcaaagaaggcagagagagagagaaagctcaaacagaacaattgactcacctcagctccagccacacataaacaaaaatcacgaccaaattaaaataaataaataaatgtaattctttaggaattcttgttcttccttctactattctattattaattctctttgcttattttattacaataacaccttactatgtcaatataaattatttgagaaatgatatggccgatcactatatctattcaatttctttttttgttttccttttttttatcacatttatttagtaaaattattgttgttagaaaaaaaaataggatttttttcagttttaatcaaaaaaaaaattaacgaaaataccacttaggcttcaatccaggatccatgctttctgggcaaatatcggcaaccacgctgcaatccaacgcaaccgaaacgaaaaattcaacc

SEQ ID NO: 188323 - DNA, 1315 bp, Cannabis indica
ttttattaaactaaactctgaaaatgagcatcaacactaagctagtgttaattgggcacttataagctagtgtcaatcaatgtcagttaattggtacgtaagctagtgtttttgggcaattgtgaagggtaagtgattcaggatccctgtcaaataattctaatggtaagaggatggatggtaaattaaattaaatttttatttttgacataactcttctttaaaaaacagtataggactgttgtttctaattagttgaaggtcatatcatatgtctgtttgtttgatatgtaagcttgaataccccacgacatttaatgtgacattcaaaggagatttcagtatcaaattattaaagagaaagtgatttagagccacaaaaataaaataagttactaaagatgaacttctactttgtgcattaaaaatgtatgcaggatctaatagcgggtggaacagagagctcaacagtgacagtggaatgggcaatctcagagatgttaaagaagccagatattttcgaaaaagcaaccgaagaattagacagagtgattggaagagagagatgggttgaagagaaagacatagataagctaccctacattaattccatcgttaaagagaccatgagattgcaccctgtggctcccatgttggtcccaagatttaccagagaggattgtcaagtggcgggctatgacattcccaaggatactagagtcctagtcaatgtgtttaccatagggagggaccctagcttatgggatcaaccagaggagtttatgcccgaaaggtttcttgataagtcgattgatgtgaaaggccatgattttgagctccttccattcggtgctggcaggcgtatgtgccctggttacagtcttggtctaaaagtgattcaatccagtttggctaatctcttgcacggtttcacatggaccttaccacccaacatgaagaaagaggatttggacatgactgaaatttttgggctttcaacacccaagaagtttcctcttgttgtaatttctaagcctcgactttcacctcatctttatggtcatggcctgtaataaggttcattaataataatgggcttagttggtttaggctgatttaagttaagaatgaataagtcattgtctttgggattaagttcaaaaaaaaaaaaaatcccattccattagaaaagaaagaaaaaaagtgtgcatcgtttattttgatattatgatcatcgaggccagtagtgtatactagatcagaataagttcaatagtattgagggttgtttattgtttgatgcacttaataagta

SEQ ID NO: 188324 - DNA, 3919 bp, Cannabis indica
agagagagagagaccctaaatctgtagaaagagaaaatacaagtctgagaaaacacatatgttgacctcgcttttggccaacgacactgagtcttgaaagtgatttagaattaatttaattcaatgagaatatgtttaaaatatagtgtaaactaagaacacaagattttatggaggttcaacactatttatttggtaatagcctattcatctttttgattatatttcacttgtgagaagagaagcaaaaacagcttgatctctttcgaaatctttttacagatatttgaacaaagtaatagctctcttgaaagtatatttttggcgccctcaataatggaatggttccattatttataggggacaattaccatggaaaatggtttcccaaaaactgtcaagctgtaaaaataggaaattaataatttcctaaactgtgatatttacatataaaaatcctctaaaatagggatttgattatataaaatggtaaacttcatttaatgaattctcttcacacgttttcctctggtccaattacgtgaagtgctgattttacatttgcctcccaagtctgtgtgagaactttctggttggtgcgtggacttgcccaacacacataataggtgaatgcggtgacacgtgttagatggataagcatggagaacaaggttgtcacttcaaatcttttgaagcatctttttaaatatttgatgcatttaatgctatgatataaattaccgtgcccttaggggcatgcgctgacgactgtacttataatgagtaatcattacaaaaaaaattagggggaaacaaaaattttatttaggtgcacaaatcactatcataccctttgaaactcttataaaaagaaataaaaggttcatttggcatttttacataattttagccttctaactatcacagagattttccatttccctctgatcttcaaggatccactcaaagtttttaagcgatctttatccaattattcacggctatgcacatcacaaccagcaatcttaacagtgagtaagtgtcttatttccttgtgcattttccctttatctccttgcattcaattttacatacttttctggaaaaacctggtttatgtcgttgatattcttcattgtttgaatcaaaatttacatttgcctaaattatcatggttaaatatatacgtacaaagtttaattgttaaattaccgaacatatacatatttttcctgagagaatgtgttgaatgggggcatgtatgtcattttggcaacttctgggttgttacccaatctttgaacatctttaattcaagatcttcatcattaggatggacttcattccatcgatccaagcattcgcctggaaggaataaacaacctatttttattcaaattctttgcttctgtttagtacttacatccctcttcttcttttgtagatgaattcaaacgactattagggaggtaataactttattgaagacgaccttttataactactcttcaaggatcaaccaaaggcccgtgcaaagtctccttcttctgatggtaactcttcctctagctttgaagagtgggaagtatcaagtgacaagtctaagcctgttgtatcattcgtccaacatcatttttacatggaccaaattggaggcaacatgtacaggagattcgtctgggagtacaacagagttttgaggtgatatttgccctctaactggacgtacattgtttgtgttggtgtcccaggcactttgctagaggcgaatctcaaaccttcatttcggcctaaggtcaaggcagaaatagatgtcactgtctcagatgacccttcatcgatctatccattttgctcaagaaaagtggctcgtaccaaacaaactgtccaaaaaattggtccgaaggactggaattcgtccagttaattgctaggcgacacaaaatgggaggggcgaactctgagggggaagacgctctgcctatacgggaccaagaagtccaagaaatagaagggaaatgtgagaatgacaggcacaccttcatgccttttgagggtgtcggtggctattcagaggatgggctaccattcaactctcagggccgtcttttaaccttaggttttgattacacaaatgaagagtttgatgaggttggaccattcgagcatcaggaggcggaagggccaatgtgggtttctctaccatccgaactaatagagaggcaccttagaaatttggacaaaatggccttcttggcgacgtgcacgtatttctcccctttgagggacaactagccaacgatccggttgtagggatgtgtgtgtggtctagcccacatgctaagcacgatgccctcttgccacttcattcatatttcatgaagttggctaattactacaaaattcctcgatgcaattcacgtcaaaggaaattaaatacttggtcgtgatgtttattttttgcgcacaacaaggatggggggaaccttctgctcatgacataaactagttctttgaactgaagtcctctccgcatcatgaacgctcaaggtattatacttttcccagctggagtgttcatggttgatcaacacaaacgagaagtgtgtcaactaaattggtggttttcttcaagactattacacagtcaccgaggtgaggactaaatttatgacctttcaacgtgctaaaacttatatctagcctgattttacacttggtcttagggatagggcccaagccatcttgaacttgtctaattctgctcgacatattgttcttttgacatctcttgagaatttactcaagtatggactctatccaagcccagacagtctgttccccgagaagccattagcgtcgaccaaattaacctcttccaagaagaaaaagaccaaagccaataaggtcaaggcttcgcctgtggaagaacctattcgtctcaaggatcctgaggaagaacctcttcacagggtcgttcagcatgttgaagggaaaaggaaggcaatccttgaagaaattgaagaagaatcctctgatgataacgctctttcaatccttgttcgggagggtgctcctctaaaagttcagggtagacactattaataggttgtgtgccattttataatcttgatcaacattctgaccaagtttttcctctttcttatgcaaagattatatcagaaatttttttattcgtatatgaggttgtcgtttgtagttgtacaaagaattaagaccacttagttataaataaaacaatcagcaacatattaaagttataaaatctttaatgaatggttgctagtacggttcactgatgcttattcttcagtgcaagtaatcttagttcagaatacttttgtagtgagacatcaaagtgaaggtgctgtatataatagaaattatatatgacaatgaccgatatgaataaagatgtctttattaacatgttgtttatcataaagacttaattcatatcataacaatgatcaataatagattgacctaaatcttgagttatcatgaactcctattcatgttattagttactttgattcactcgtaaaagtttctcagagaatatgattcttccaacttctattttgggaatctaataatgtggatggctgggaacatgatgtacaattaggaatcttgactttcctaacgaatcaaatgttggttctttttaagttagtaaatatgattctataattactaagagtgcaattctatatttatggtagagtaatcatgaaattaataaacaagggatttatttagttgataagactcaataaataatctagtttattgaagcttaaggtccatgctccccgaatcaccaccttgaaacactgtcaagggtagggataacgtgttgtataaagatattaaaaaaaatctattttgaatt
